United States Patent Application Publication US 2008/0039413 A1 - sequence listing, part 11

SEQ ID NO: 1240 - DNA, 262908 bp, Mus musculus
  misc_feature (1)...(262908): n = A, C, G or T/U
ggatcctcccggtagtactatgtccaattttctgaggaaccgccaagactgatttccagagtggttgtacaagcctgcaatcccaccaacaatggaggagtgttcctctttctccacatccacgccagcatctgctgtcacctgagtttttgatcttagccattctgactggtgtgaggtggaatctcagggttgttttgatttgcatttccctgatgattaaggatgttgaacattttttcaggtgcttctctgccattcggtattcctcaggtgagaattctttgttcagttctgagccccatttttaatggggttatttgattttctgaagtccaccttcttgagttctttatatatgttggatattagtcccctatctgatttaggataggtaaagatcctttcccaatctgttggtggtctttttgtcttattgacggtgtcttttgccttgcagaaactttggagtttcattaggtcccatttgtcaattctcgatcttacagcacaagccattgcagttctgttcaggaattggcagatgattcttatggtacccagctgttaattttttcagagaattttgagcctctctatgtttaatttgaaaggagtactgaattctccatgaattactagttaaatgattgatcattcttcaggcaagttctctttttgctgtagacatcatagatgcaagtaacactgggtaacatggtaactcaatgattattgccttaacatagaagtaattagtaaaaaaaaaaaaattaagcaaacatcatgtaagctgatgtgactagagctcaatctttcctgagctccaggcttatttagacaatagaaatatactatcctcttttacatatgttaaaactaacaagaatttgttgggctttgcatgataatgtttttattaactattaagaattaacctattcctggcctggtactgggtgggacctttgcttagattatatctagttggagtattgtccccattaaagggtatctagttaggtttttactgctgtgaacagacaccatgaccaaagcaactcctataaggacaacatttaattggagctggcttacaggttcagaggttcagtccattattaccaaggcaggaacatggcagcatccaggcaggcatggtggaggaggagctgagagttctacatcttcatctgatggctgctagcagaatactgacttccaggcagctaggactagggggtaaaagcccacgcccaaacagtagcacacctactccaacaaggccaaacctccaaatagtggcccactccctgggccaagcatatttaaaccatgacacagggtaaccctatgtaagttacttttatatatgtgtacttaaaatagtaggtttccatatggctttttaaaaaggcctttattgttagttatctcttgctatattccctcctctgccctatgctcccataccccttcccacttagccttcctattctaattttcctctccatgatttataaagacatatactattgactctctcttgggagattccctctccctccatgctcacttactagctatcttactaacctctgtgggtattttgaatgaagcacacatattgaaagattaaaagaagctaacatccacatataagagaaaatatgccatctttgttttggggggtctgggctacttaattcaggatgatgatgtctagttccatatatttatttgtaaatcttttatttcattttttaacagctgaatggaattcaattgtgtcaatgtgccacattctcattagccattcatcagttgatggagatataggctacttccattgtctaatacaatagtggcacaaatactatgtgacttaccaactacctttaaaaagatggatttaaggccagctccatgggaagagactcatgtctgacacatcagtgaggccaacaatctggagctaaataggtcaagcttattattcttgtgaattgacaaataaacaggccctgaaggccatattgctatattcattatgcaaccctcatcagaaaaacttcttcttgcagcagatggtagaaactcacaactgttcaagatacataggataacagaccttggaaaactcagacctaaatgggatatctgcatttcacttcctcccttcaaaggtcagggttctatgcaaaagaagggaacagaaagattgtaaaagccatagttgttgggtaacaacaaggaaacgtggttttccagatacaacagggcagatatatgtatgaactcacagacattgtgatggcgtgcagaagagctgtgaatattcaagccagaaaaactcctggcactcagaacgagggaggtgatcaccaagttccacccctaccaaaggagttattggtatttgatcgctgctgggaaggaaaactagttttctttggtgtagtaacaattggtatttcaaccatactccagggtaggccctacgcccaggagtagttggccgacacacactggactccattggggtttgtgcttcatgtaaaatgtcattagatttattcattattattttatgtgttttgcttgtgtatgtatataagtacacgttgtgttgctttgtgtccacagacgacagaagaggggatcagatcatctgtaactggagttagagttgtaaaccaacacatggtgctggaaatagaacatgggtcctctgcaagagcagcccagtgctcttaagttctgagtcatctctctagctccacactttctttttgaggatgcgcatgtgcgtttggtaggtagaaagataggggagcgtctggagggttggaagatcctgctatttaaaggtcatggtccttgatccacgtgggcttgagtttcattcaggctgataagcatgagtctattttcattcttctgcatgtagacatcctgttagtccagcaccattttccaaagatgctttcatttttccaatgtatggttttggcttctttattaaaaatcaagtgctcagaggtgtgtgggtttatttttgggtctttgattcaatttgattccattgatcaaagtgtctatttctgtaccaataccatacaggtttgttggtttgttttggtttgttttgtttttttattactatggctctgtagaacaacttgaggtcagagatggtgattcctccagaagttcttttatttttcaagatcgttttggctatcctgggctttctgttttttcatatgaagttgagaattgctctttcaaggtctacaaaaaaattgtgttagaattttgatgggaactgcattgaatctgtagattgattttggtgagatgtccattttcacaatggtaacactacctatccatgaacatgggagatctttccatcttgcagatgtgaagcttggtcttcatgtgaatccccaacaactggagagagcactatcccaaacgctgttgtctgtatgtggtatatgttctactatctgggctgccttgtctggcctcaatgggagaggaagggcctagcctcacagagacttaaagtgtcagggttgggagatagccggtgaattccaccctctcagaggagaaggggaagagggatgggggaaagattgtgatggggatgactgggaaggggcagtgagtaggccgtacaaaatgaatgagtaaagatagatagatagatagatagatagatagatagatagatagatagatagatagataaataggtcatactgaggaatgtcacacaatccttgtgaaattacaggtcctgctgacataccctttccagacgggagggaagcagcagaaaacagaaccacaggaggagttaagaggaaaggaatgaggctgggcagtgtggcacatgcctgtaatcccagcacttgggaggcagaggcaggtggatttctgagttcgaggccagcctggtctacaaagtgagttccaggacacagggctatacagagaaaccctgtctcaccgccgcccccgcccccccccaaggaatgaatatgataaaatgcattccctaaaactctcaaacaatacctaaaacctattgaaaaataaacaaaagaaaaaagattaaaaagtagggacacaagctatggaaagtgttctgtgttctagatattccttttcaggtttgacaccttagcttagcatctgtccaatgctgttagttaaataacactcatttcttctttccaagttgttgggagaagctgagtttctttttctttaaaaagatttatttacttacttgatgcatatgagtacgctatagctgtcttcagacacacgagaagagatcatcagatcccattacagatggttgtgaaccaccatgtggttgctgggaattgaattcaggacctctggaggagcagtcagtgctcttaaccactgagccacctctccaacccagaagctgagtttcttgaattcttactgttggtctgcatactgcctacctattactgaatcacttacaagggcacacaccacatatagtatgaatgaaaaccccatagatgggcaactggttaaaaacaaacaaacaactaccactgacaacaatagtgtactcatatggtgactttgtcaactgtagcaagtaagttttgtcttcacaaggaaaccacagaaatacaattgtgtaatattccttattattcccagtttcttggttggctgagtagttaagagtgcttgttgctcttgcagaggactggagttcagttcccagttcccaagtcaggcagcataaaatccttgtacggacacccacaaacacaaaataagtatttacaatcaacaaagttagtgtttaaaatgaaagcttacttttagcactatatatgtagatctctctctctctctctctctatatatatatatatatatatatatatatatgtatatatatgtgtgtgtgtatatacacataaatacatatacatacatacacacatatctatctatctatctatctatctatctatctatctatctatgcatgtgtgtgggatgtgtgggatccaaatatgtttctatatgctactataaaacagctccgatcctctagtcatagataaaacacaggctcattaatattcacaggtacatgcctttggtccatactaaaagccatctgtaatctggtgtatcagcaatgttttatttattgcttttatcagatttatctcacctttctcccattgctcatgcttgttaaaaatcctactcactcttcatcatctaacttcatttctacctcttgagattggagttcctgtcacctcttcaaaacagactgtctcttcttcctctgagtccttggtatctgcagtacttgggcactatcctctgaggttgtgggaagccacatgtgccgttgcagagtggcactgactactgctggccaccacgcataagtttggacaaacaaccaatgtgtacatatgcagtaaagttttttgcaaagacactgcctggcccgggcatgataatgaggctttgggagtataaccaatcagatgtgagacatgcaaatgaagtatgataatgaggctctgtgaggtacacagagagagggagagagtagccaatcagatgaggaacatgcaaatgaggcttagtgcataaccaatccgggtgtgagacacgcctctcctaggcctatataagcagcaccagttctgggctcggggtctcttcgcctctgcaatcaagctctcccaataaacgtgtgcagaaggatcctgttgcagcattgttactccagcgcacgcaagatgaggtctggtgcaccttgagtgtgctggtgtgtgctgctactcagctttccatgtgtgcacatcctgctacccaagtagatctgtgtgtgtgttagtgtgtgtgtgtgtgtgtgtgtgtgtgcgtgcatgtgtttatagaataagtattacagtcttgtgacacacaaattcatagcagaagatcatggaaacttctggctgttctcttgctcccaagacatagaaatcccttgtatgtgaactctaatgtaagtggaactaaggtgtggaggtgcacccaaagatgaaaaactgacttaactttattgatggtttccggttgcctggaaaaccaagtgtattctcatattctccttcatattcagattacagggctgtttcccaactgtagtgcagacaatgtatactcatgtccctcaacaaaggttactttttctagcttttctttttcttgttgcttctgcttatcagccattcattctctcattgagcgatacacttgtttgcttccctacagcaacaagtagaagtccttattgtgcaggtgtgagctggcatccttggaaatggctgtctctcctgtgacaaactgtcctttgagtctaagagcttgatatgtgctctcagagtaatgccttggacatcaggactcttggagtcctaattaaagtaacaataatataaccagatagggaaagctcccacaaagttaaactgattcttggaatttcaagatgagaaggcaaatagcactcatgaaccacgtatggcctgaagctaaaagcaggcggagctctctgtgtctttgatttttacataactctttgggtctgacttatgctttctgtagcaaactagctcttacttttcccagctttacaatgaagtatggggggcggtattctctgagtttaaaaatccttgaatccaagtgtttacaaaataagctgctgaccaaacctctattatctgaagaaggaccttcactactatctgagcctagccgtggattaacatggtcagataagaaatgatggctcgttcccttgtattttcacactaattatttgggtaaggggtggtatgatggagccactgctccagacagatatggtggacgtgcaaacgaggtgtgtgctttccaatttgtgggcatggaggggaagaatttccacaggctcttttccatatctaatctcctgctagcttcaggatagtgaggtaagacaggtgccatccttaggcaccacacccaggaggacacatgcatgcctttagaacccaaacaacttatccaagattctgacaggtcgtaaatcctccttctagaatggcctgacaaaaatccatcttctataatattctttaaatcctactgtatccctaaagcgagaatggtgccaggtgagggagaagccttgccttttgtcctcttatcgctttctcctctgtagaaatgcagtttcagagaaacaggaaaaggggcaagttacaaagctgcttacccatgttctgacctggggacggtgacctctcctctccaaagaagattcatgtccatgacatctcctttctgctacccagaaatgaactttgtgcttcccaagaacctaacatgggacactgaacttagttactcaaatggtctctccacctagagtgtttccttttggggacgatgattttaggagtaatgttgactcattaagtcaacagtttatgtaccaggtacagaagaacagggatgaagcaggtttaaaaactggaattgtgtgacaaaactttcaacctgttaactatgtactaggcaatgctctttaacatttgaagctacactgtttaataaaatagatatggttgtatatatataccacatatatgaaatatatatatctatatcccctacacacacatatgggtttctttggtttgttttgttgtttagttttgttttgtgtttttgtttttaggacagggtttctctgtgcagatctggctgagccggaactcattgatctatagaccaggctggcctcaaacacactcatctgcctgcctcctgagtgctgggattaaaggcgtgtgctgatcacacttggctgatatatatatgcgtgtgtgtgtgtgtgtgtgtgtatgtgtgtgtgtatgtatatatatgtatatatgtatatatacatatatttacacacatatatacacacatacacatatacatgtatatatacacatacatacacatatatgtgtatatatatatttttaaagtttttgaggcttacattttagagacaaagtgccaataatggtgtatgttgtgttaatggtggtgatggctttggggaggaataattgtacattaacttgaatgataaagggaaggccctatccagagtaaaatgaagggaagagaaaaaggatattttaggaacgatgtttcaaggacagaggaaaacacacacacaaagactgtgtgggtacggtaggtatgttttgtaaagagcagggagccccgagggaagagaacacacgagatcagagagataataaggaaccaaatgtcttaagacataatggctttgacttctgcttgggggagaacagagctaaagcaggtttaagtactggaattgtgggacaaacatttcaacctgagcactatggccaagagaggacagtaatgggacacaggcagaactggggtttgagtggtgatggggactgctcagatgtgaaatggtacggcagtttagatcagctggtagccaaacaggtagtggagggtgtaaggtaatggtttataaaatgacttggatgaatttgtgatgttagaaaggaagtatgcaagcaagaggaaagtggctgcttccttttggactgagccgtgaccacaggaaggacaggtctggaggagagagtagtcatcgaccatccaaagagaactgctagggactgaatgtgttctccccaaattcagtgcactggcatttggaggctaagcccttgggatgtaattagtttatgagaatgaaatcttgggatgtaattaacttatgaggatgaaaccttggttggagccctagtcagatgacacacgggtgcagtctctctgtctctgcaacaagaaattctctgcgaagacaatcacctgtcaggaagagtccaggaagggtgtctttgccaccccttagattgcctagaactttggctttggactttgcctctgcaagtatgaggaacgcattttcattgattgagccatatgtcaaaacaaacagcctgaattaaggcaggaactgacctttgcaatcacagctgaccttgagtgacttcattgggtggggaaggcatgaatggaagttcaataaagaacaggaggtgagaatcaggaggccttgagagtttggtttaaaggcagggagaggaggaataaatactcctgcccccattatctaccaagtcaaaatgtggttcccacagtattttcagaggttactggcgcagttccccataatgctgccgttactagctgctatcaccattagacaccatcatcaagcaattcattaatcaatcataaatgcctaatttcttgtgctacttcataaatcaaaattaggagccttgttccttgggggacccagctcaaggggaagcagtagtgtaaaacgtgccaggaaggtcaaggaggggggtgaggtgcgggtcggaggcagaagtctcttgccaaatcatccagccccagttcctgattttcttttagcactggagaggatgatccttcccctcccactccttcctccttcgcctttgcgccccctacttcttcttctggggttctttttcagcgcagggctctctctggaagctcggcccctgccaggctccttttcgcctccctgcgctcaggaagaggacaagagcgcagacactccagtggggcaggagctggcgttctaaccaggtgcgacccaacttggggctgggacagaggtgcgggacgcgctccaggtgcgggtccagagccagagcgcggcccgcagctcccagggcgtgggcgagccggccgcgtgtgcctcggtgcttgacgggaacactagccaatcagggcgtgcggccaggctgccacgtgacaggcgaggcggcccttttcccagcgcggccagagggaggagtggagcggatcgcggagcctgagagtgcagcggccacagaggaggcggcggcaggcggagcggcagcggcaaaggctcccggccaacccagcgcgcatccccagtgccctgagctgcagagagctcggaggagcgcgggagcagcgacaccggagtggacaaagcaagatggcagggatcttagcctggttctggaacgagcggttttggcttccgcacaatgtcacctgggcagacctgaagaacacggaggaagccacctttccgcaggcggaggacctctaccttgccttccccttggccttctgcatcttcatggtgcggctcatcttcgagaggtaagaagggccgaagtgcctgctctcccgcacacacgcacacgcgtgcacactcgcctgctccgtggcgcacgcccccgcgcttgggctcacacctcccaacctttgtgttctctgtggggtcccgatccctcggccaggctgacttctagggagctagagagggtccaactcgaccgcggatttcctccggggcgccacgaaggggcggcagggcgcttggtcaccgcccgcgctcctcctttcccggcttcctcctcctagagagggtcggcgaacaaaggtgagcggaggctggccgcggggaaccgctgcgccgagggctcggccggctccctccgagccggcactaggcgcttccagattgggcttctcctccgaggctcgccgccacccacctgacagcctggaacgatggggacgcgcggcccggagggaggaggagcgcacacacttccagcccttccactcttgcacgcacgcgggccgcgctgcagaagaatttgctcggacctttggctttagcttgctccctggcttccatccgtgacacggagttttaggccctgggtcctgggaaataggtgacgacagcactccggatcgctactggtttctttaaaagagggcagaacaggaccggtgcccctcgaaatagtcatttgaatcgatagtaggaccccgtgactaatcataagcgtcttgctggtaccggaagacacttgaaacgttaaaagaattgtctcataatttttggtatgagtcctcgatttggttagatctcgccattgtaactgcacacaaacttgtgctactctcactgagtcagccttaagtcacagaactagatcttgcctgctgtgcattcaacacttactcgtgaaacaaaatcagcaccgcacacttctttcttttaactgaaaaaaaaatcgccttcctctttcctcctcccacctccattcatcagcgaaggctgatttcttagatcacaaatatccatttctactctaacctcccttccctgcctccagctcaccttggctgttgctcaggctgctgctatcttgtttactgttggtttgcctaaatccattattgagaatgtcagaatgtatcttttgtgtcttttgttgcctgaaatagcagctaagcttcctgggaactaaaaaagtatgttttgtgctaaggaaggtgtagttttcaatgggcagtgttgttgattatgaagtaagtcagctgttgccatgctgaaattgactcgcacaaagggacagcctctattttaaaaggattggattccagtgcggatatgtcattgatccagcgcctagtctcactgtgacaaagctggtgtgtttgaaggctgcaagtatttacctacagaaaataggaactcgagtctaaccttgccatttctgcaaagacaagctgacttttagggataatagcaggctgttgcctgtgcaggcacagtttgggggggggggctccatacatagttgctggatgacacccaatgaaatctgtctggattcacttttgggtacccactttaaaggaaatatctagttgtcaattttgtagaacaaaaatcaaggcagctcatgaaccatatgtgaatgctacatttcctcagaattctctctcggtctgcttctgggctcttcagtaggttggaaaatattgaagatagcttggtttgtgcttggctttctttgtcttacacgcgcgcacacattccactgatgtaatatcagactgaaggttcagttttctttttctcagaaatatttttcttcctagcataatctaatgactttaagaatttatacaaaaggatcagcaagcagtcttcaactaccagtagtgacgacccgtgtgtgtgtgtgtgtgtgagagagagagaggccatcgatgagagtagatgacatttaatggactgtctaggaagtgagtaatgactctttgttccccgtgtgcgggatgccgctgactttgtggagggtaactactttgtttcttccttctatggtcctgacagatgtaactttaaccattcagacccaggtctctaaaagtcagagagtaattacatctggagtgagaggctctacatttttgggtttttatcaaactcaaagtacacactctgctattcaacctatggtgtgcatcttgccagtgtctatagctgagccagactggattgttgtcaaagatacagcttatgctaggtatccttttgacatgatgcatgtggagtttgtttctttgtagtgttctgtattggctaacactaaagaatcccatcataaactgagtgcttttgtaatagagacacctcctccaagagtctgtgctttgattatcatttacttcaaacttgagagcatactaggagatctttgattatccaagatctttatctcccattaagaaaagtcagtaatgtttttgcagaattacatacttgagtgtgtcttgagtataacacatttatttctcttcatacaggaaaccactaatgaactgactgagtcgggtcttatcaatagatgaatcgggtcttattaattgactagttctatcttttcttttctttttttttttcctgccactgttggggtgtgacagagaaggcagcagtggctagaacatgtcattttgcaacaacatatggagaacaatatggtgtcccagcatggctgattaaaaatagagcagtctaaggtcactgacttgagcctgtgaaacacccagacctcccgggctgttagtagcagccttatacaacccttagccctggagagaagtggcatgagccagtgtacttactgtctgattagcagagaaaaactgttgaaaaacaaacagatagcatctcttcatgcctttaatcccagcactggggaggcagattcaggtgaaatctcttgagttttaggccaacctgttctacagagcaagttccaggatagctagggctatacagagaaaccctgtctcaaaaaaccaaaacagaacaaaacaaaacaaatcaaaagaatgaaaattatagtgtctcccattatattatgttggtgacttgatgacagaaaaaaaaaaacttgatagtgaagaattatcatttactccatgtcttgatttaacacttgttcctattcttcagactgtccctgggaatcgtaacaaaggcttcttccaacttcactttttaaaaaaatgtctcgtacatgagaaattaaagtttggttgagtttctgattggagataaaacttgtgggaattatacttatgaaaggcaactttactgtattttcttcttgatggatttaagagagatgcagacagttctgaccatgatcagaatagtcaagttctagtgagcatgcattgcaagcttggagcagatcctgccggaggtatgtttattcctcaaaaccaaatgaccattgagagatattctttaggtgttgtcacttacgccatcaaaactttcttatttttattttctctgcatgaaccgactaaaggtttatttgtggggtaaagagtactgcagtgtgcaatgataatttcttcccatgaacaaacgtacctgtcacctgagaaatttatttcttctcatgtgagtatttattcttggaagttcttaagtggtgtacacaattttatttgacacagttgccttcttaagtagtagatcttaaaaagacattcctcctaactaaaacttgacctctgtctctattctcttgtactctggagcctctagtaacttccagtctactctctgcttgtatgatagtgattgtgtaaggttggaagacatgtgagtgtatgtgcgtatatggttatgaagatttatatatacttacatgtatatgtgtgtatatgtatagatgtgtgtatatatacatacaagtatgtatatatgtatatgcctatacacatacatatatatgtgtatatgtatttatatgaacatatggtatttgttctctaaagacctggcttattttacctcatatatgttgccaatgaaagacattctttttttaaggtcaaatgagtgctccattttgtgtatataacttatttctccatccatctgttggcagctactgagctgaatgaatttggctgtgaccagtcatgatgtattgcattgctgtggtggttcagctagctcttcactgctctctagtcttctggatttgaaaagatgggcgtgggtggtggctgccgtgtagggtctgtactttacctttccttccaaactgctgactctggtgggtcccctgcatcggaagattggtcgttattatctcatgggactctgagggacttaaccatcatgctttgggaagcagaaataagccttctcagaataaagtggattttgtttgttttttttttttgcaagaatcttctagccagtcattttaaaggtgttttcctgttgtgtttagaagaaaagacttatttgggggtattaccacttgtgttcctaaacggtcacaacgttcctgcctagccaaaagcaaacttctacagagaaaacatttgtttgatctctttcagaactcttttttgttggaatccagagttgagctggcatctgactgggtgagagagcagtagctccctcctgacagggcgactctcagtgccacagcacatgaggagtgtcatttttcaggagttgactgccccagcccagagagcagtgctcagatccaaaagggcagtgtcttcccaaaccaccagggcacaggtgtcttaagttttgtggaaggagatgtctagctggcaggcctttccttatggttttccttaagtctctgccttgcggatggatcaggtaaaggcacctgagcagcaagggaatcaagggatggggaagagaatggagtgcggcggtgtgtttgggtcagggagttagagaaggactaccacagaaacgtgctggagccgatttatatatatccagtactgacaggtgcgcctatacagaaatgcagctaccttcagacccagttcagaagagaggacaaacctccacaggagtggttttctctgcgtgaactcagggttagatattaaatgctataaatgcaccttacttagcttattagagaaatggtgttatggagattaaaactgtagacacctgctgtgtcacacacagatataagagctaaaagctgggttctcacacaaagagattcttgattatggtttttaacctaggttgggagaaaattattaccaaggattttttttttaatgtgggtaaacaaataaaatggacagtgttatttgaagaagtttagcaagagtttttcattcggcaaaataaaagacttttgcattataatggtgcgataattcagctgtttgtaacaggctgagcagggggtaaaaggtgtgattctgtactgtgtgcagtgcattgggacggtaggggaagtctgtgtgaaaacctgaccctaccacaaatgacttacagacactacatgttatgaaaccagtatccaggcgccacttggggcttttctgtgagcctctctgttccccacaggggtgagaggagatggggagggctgcatagttcctctctggagttcctagtttggagggtattccagaagtagtggtttgtggagatgggctttgggtgaatctctactgtggctttgccaggcatcaccttgtctgtctgtttgtctgtctgtcttaaggtacctgactaagccttgttgacaaatgctggagcccaagcgctcactgcatgtggaaagcttcaaatttgttaagtttacacttctctgccagggtgaggggatacccaggggggtcctcacctgctcagaggagaaggggagggggaagggtagaaggattgtgggaagggggggtcaccaggcaggggtgggggtggnnnnnnnnnnnnnnnnnnnnnnnnnnnnnnnnnnnnnnnnnnnnnnnnnnnnnnnnnnnnnnnnnnnnnnnnnnnnnnnnnnnnnnnnnnnnnnnnnnnnnnnnnnnnnnntgggggcagtgagcaggatgtaaagtggctaagtaaaaaatacagcccaatactataaaagattttcgtttctctccctgtcaccagacaaaaccagatttctaaagcaaaattatatatttttccctctttcatcttttgaccgcttctcaaatacctttgagtcggggtactggggtgaccaatttgacttgatggtatggttggattgccctttatcttctttctctttgttgtttaagcacactggcctcttaaagcttatctgctgtttcatatcagtggtacctcaataatcattatccttaagattttatcccccccccccttctacactggggatgtgtagttctgctgggtttacattacaggctatcttcaagttcttgtagattaatctttcagttccattgatttcttaacaacatgtgttcaagaagtagcctttctaagtcctaaggaataactgctccagtgttcttgacggatacaggttgccagatagttgtctagaaggacactaatccttggcagtccgcagtccttgagagagtgcagatttcctaggagacttgaagatagttttctgttggaatatgaattgtgcgtgtcgactctggaaataactcatttccaaatcaaccagtagcttacactttgctttctctgaagtcatggatattttcttattgagatgaagagatgaggtttttatgtttatttttgtcagaaaagagatcttcttcctcctcctcctcctctccctcctcctcgtcttgttctgtttatctgatcatgtttacactcttgtatttctttctgcctctcctccctacaagcattttcccatcaggaaggtttctgagtacacagtagagagatgctgtcaggaggcagtagtccatacttgagtctgtggtggagagtgagatggagaggcagggctgggatgagggcagagctaggaagagtgaatagcttttccaggcagggacccttggagacagtgtctaaagtcattgctatagttctgaacttttgattaaaaaaggacttatgtgccagtgagatggccaggttgtgaagaacatacactactatgggggaggaggacctgagtttggttagcactcgtgtgtgtgtgtgtgtgtgtgtgtgtgtgtgtgtgtgtgtgtaagggggtgtcttagactagcatttaactccatatcctctggcctccacaggcacctgcactcacatctatgtacatcattaaaactactaaaagtaaatctataaaacaacaataactaactaacccacagaaaaatactatccccaaacccactgaatgccatcatattgttaatttggtttcagcatatcagactggagaagaaaagagccaggaacattcagatgacagcagtaaaaataaagttgtacacttaaaaagtggttaagatccgaccttttgtgtcaaatgccttttactacaacaaaagagaaaaaaaatagacatttcaatgagttaaaaaatgtcactccctagacataaccgtcttcagtgccctaggtctggcacctttgtagatgtgccactcctcttggtgttggttccctcaagcattaaactgaataactatcttcatatcgatgattggtcctcttttgtatggaattatgtagcgggcgtgtgtggaaggggagaggagggaagacgtgttgagatcagaaatccgtaagcacctgagctcactgagcgtttgtgaaagacacttgcatagaagagcttatctcgccattttattcatttattttgttctattttatttatttatttatttatttatttatttatttatttattttacttggagacaagttctcattatgtagccttggctgttctggagctgactgtgtagccctggctagccttgaactcctggagatctgctgacctctgcctccccaagtgctggaattaaaggcatgcaccgccaaggctggcaaaccagtttgttaatcagcatggcagagggcgtacaaggctctggaaaagcacagtgcgtggtttcccaagggggtatgcagggttctagaagaattcagtgtgtggttctcctgcatttcaggattacagtaaatgtgtatcccagtcagtgcaggatacatttacaagcaaggacaatgacagcatggtaatttcctcctgagccatgtggcatgggccatggttctgaggagatttgggagaggtgagatcaggtttggttctcttgcctctttccatttgctgtcacatgctgtttggaagcaagtgattagaacatctgaatatttgaatataactttctgaaagctgcatagtgcagtggctcgggtgtgtcaacagatagatgcagaacacttgttttgaaaattgattaaagtgtctagtccttgtataaaactctgctttctttaaatcatctgtgagaatatttggggcatgttcaaaaaggacttttttttcctggtgtctttcagaatggccttctttcagagtgctagtgcttcctctccaggcctttgcatttattatctcagaattggattgtggggtgtggtggaaatagccgaatggtttttaattccggggggggggggggagagacagagacagacattcctttaccaggtaatctctttgcacagtgacctaggactaacatttgctgggacttgccattgtctgcataaatgtcacatcttatctgggaggtgttcaggttacaagatattcctgcttccatggagctgcctgaaagcagggctcctttattttctgtgcctccctctctccctctctccctcctctcctctctcccctctctcccctctctcccctctcccctnnnnnnnnnnnnnnnnnnnnnnnnnnnnnnnnnnnnnnnnnnnnnnnnnnnnnnnnnnnnnnnnnnnnnnnnnnnncctctctctcctctcccctctctctcctctcccctctctctcctctcccctctctctcctctcccctgtcccctgtctcctgtcccctgtcccctgtcccctctctctacattagtgaagactctttagaggcactaggggcaccaggaagtctcaagagagggagagggatcatttaaagtagggagaggacatggaaaccatctaaaatcttgtatgggactgacttggccagtaccagagagagttgccaactagtctgagtggccctgcagatcttgccttagtaaatcacgtttcaaagcaggatgaaggcacttggccatgtaagcagagcggtaatttggacacagtgtcttgagtgttggaaaatggagaaggaaagtggcaatcagtcagtttggtgttgtagagagtaatggtgtcgtgtgccagtgggcgtgtcttcaggagcatcggcgtgacgagcatggtgcactgaaatcgatagtcttgtatgtttcctgcagttaattagacatgaacagctgtaacaagagttaacaggtgcacagagagatagcagaaagattatgcaacttgggttaaagtctggatcttctttaaccagccacgtagcaatggactgaattctctggagtcagttgtcctcaactgaaaaatgggggtagaggtgcctgctttgtagttctgaaaggggacccaattaaaactacacatcgtgtcattcggatacggcagtgtagggtttagcacctcctgggaagtaatgttcagtaatggaatttttagcctgttagtgtggggggcatgggagggtgctgtggtgcaggctatgaggtccagttatgtacttgaccctgggactggaagattgaattggttgagtaaatatttagtgttgggacttgaagcactgtcttcagcagtgcctgcctggttagggaggaagacgcaggcacaccccctcaactctccgtaaggagtagtgcgcgccagagactgcttgtttggttacacaaaggtcatctgttttgaagaggtgacggccagtgacaagccacatcaaatctggatccctggatccccggatcctgcacctttgaccttgggagaaatctttctctagggttttctaaggaaactccattcctgtcctaccttgcagggaatctcagctcacctcccactcctggtctcatctctgttttattgcctgcagacccaagggaaatgggctcatttgctattaccactggtagtagcaaacataaaaattggcattcgtattgactaaggatcagaactttattctggcacttacaaaccacaggcctggaagcaggttaaaccccttcaaacacagtttctccgtaaaacatacagagttagtatgaggttggggaagagaatggttggaggagtggctgctcttcctgcaggtttattctggccattcataggtgtctcctggcagtcactttctgggatgtgggcagaactctgatgtccagataccacatctagctgaccccactgcgcatgatgaacacacacacacacacacacacacacacacacaccacacacacacttcctatacagagccagtattatctaggcagggcatctccactcgttggaattgtgtgttccccattccctttcctcttctttcttaggtttgtcttctgggaaggctgattgttctagtggtatcagccagagtagccctagcagcttcatgaagaatggggtcttggctactccatccgcatgtaatacatttgatgtgcttgggcattaataacaagatagctcagagctccttttctcccacgaatagcttcccaacatgggaaagcatcaagactgacactgactgatccctttcagaatttgaggtcctatggattacttcctcttgatgccgaaggagaaaagaaatacggctggagaaacagctcggcagttaagactgtgtccttctcttacggaggaaggaagctctgtttcgaacacctaagtcaggtggctcatagctgccagaaactatggcagggtgtctgataccccctctggcctctgcagggactgtatgcacaaactcatagttacacaatatacacacaattaaaatattaaaataaaaaagaaggttcagtctattacctttgagatcatatttataaaaaccacaatcattcaacttgggctggaaaaaatacgttggtgtctttttcagagaaacagatgagtagaccccccatttgtgtgtgtgtgtgtgtgtgtgtgtgtgtgtgtatgtgtgtgtgtgtgtgtgtgtgtgtgtagtatttatgtctaacctcacttcacttcaaaaatgcaggagggatttgctctcaaccatgggcgttttttcaactagccataatttaaatannnnnnnnnnnnnnnnnnnnnnnnnnnnnnnnnnnnnnnnnnnnnnnnnnnnnnnnnnnnnnnnnnnnnnnnnnnnnnnnnnnnnnnnnnnnnnnnnnnnnnnnnnnnnnnnnnnnnnnnnnnnnnnnnnnnnnnnnnnnnnnnnnnnnnnnnnnnnnnnnnnnnnnnnnnnnnnnnnnnnnnnnnnnnnnnnnnnnnnnnnnnnnnnnnnnnnnnnnnnnnnnnnnnnnnnnnnnnnnnnnnnnnnnnnnnnnnnnnnnnnnnnnnnnnnnnnnnnnnnnnnnnnnnnnnnnnnnnnnnnnnnnnnnnnnnnnnnnnnnnnnnnnnnnnnnnnnnnnnnnnnnnnnnnnnnnnnnnnnnnnnnnnnnnnnnnnnnnnnnnnnnnnnnnnnnnnnnnnnnnnnnnnnnnnnnnnnnnnnnnnnnnnnnnnnnnnnnnnnnnnnnnnnnnnnnnnnnnnnnnnnnnnnnnnnnnnnnnnnnnnnnnnnnnnnnnnnnnnnnnnnnnnnnnnnnnnnnnnnnnnnnnnnnnnnnnnnnnnnnnnnnnnnnnnnnnnnnnnnnnnnnnnnnnnnnnnnnnnnnnnnnnnnnnnnnnnnnnnnnnnnnnnnnnnnnnnnnnnnnnnnnnnnnnnnnnnnnnnnnnnnnnnnnnnnnnnnnnnnnnnnnnnnnnnnnnnnnnnnnnnnnnnnnnnnnnnnnnnnnnnnnnnnnnnnnnnnnnnnnnnnnnnnnnnnnnnnnnnnnnnnnnnnnnnnnnnnnnnnnnnnnnnnnnnnnnnnnnnnnnnnnnnnnnnnnnnnnnnnnnnnnnnnnnnnnnnnnnnnnnnnnnnnnnnnnnnnnnnnnnnnnnnnnnnnnnnnnnnnnnnnnnnnnnnnnnnnnnnnnnnnnnnnnnnnnnnnnnnnnnnnnnnnnnnnnnnnnnnnnnnnnnnnnnnnnnnnnnnnnnnnnnnnnnnnnnnnnnnnnnnnnnnnnnnnnnnnnnnnnnnnnnnnnnnnnnnnnnnnnnnnnnnnnnnnnnnnnnnnnnnnnnnnnnnnnnnnnnnnnnnnnnnnnnnnnnnnnnnnnnnnnnnnnnnnnnnnnnnnnnnnnnnnnnnnnnnnnnnnnnnnnnnnnnnnnnnnnnnnnnnnnnnnnnnnnnnnnnnnnnnnnnnnnnnnnnnnnnnnnnnnnnnnnnnnnnnnnnnnnnnnnnnnnnnatatccaggtggtggttggccaccagctgttatttctgaggcgtgggcggaccagcaagtacttagttgcctatgtgtcttgtgagtctgattgtgtcgagcttttcaatatttgattcttgctttccctacagttgggtacctgtgtttatttgaaaaaccagactctgaaaacaaaagggtcacctgactatggcttagcgtttgaggatcaaagggctaggaggttccaggcattctgaggttgcctccctcggaggtagctttagctgtagctctctaagagctgggttcatggttgtcagcctgccctcctggccctcctcagctctcttcatctggcacagtcaagccatgtaagactggagggcagctagtgggcaagctggggcttgctcccgccttttggccactgtatcccacttccttgctattctgtatcttagttcccctcttgcttgaaataggctaggtcatcaaatccaaagagtatgatgtgcatgcatggaagcagtttgaggggactcgcattgacctctggccctcagctgttgcaaactgttctgttatcccttgtatttgctagagtgatgatgcgtgggaccagtctacatccatacacggcgagttcctgggagctctcagtaggatgtttgctaacctcaacattaaaattcttttatgttttgaaactgtaataaataacacagaataaaatgttcacactgttttcagacgtgacttcatggtacagggctaaagtttttttctgatttaaaaaagtaaaaataaaaggatatgcagctggttatggctttccatgatgttgagatgatagatttttttttttttttttttttgctgaacagttttctctctctccaaagctgaagatgacgagacaaagaaatgttgcattgaaatagaagcgagcttgcaagccttccttcctatcagcccccattccactttgttagccagtgtctaaacctttgcccaacattcagataacccaaggacttttacgcctttcatgttgtctaacgtgttcctaaagtggatgcacttggtcctggggacttttaatttggcctgttttcaaagtccatctaagagtgagggtgttactctgggaactctgaagaagtgacaggagatgtgcttgcctttacaagtggagttgagcacattatttcttgtcctgaggccagtgctcagatttggagaaagtgagacccagaaaaaagaaaggaattgagagaggtgacattgattttgttgattttcagggtgtgccacagccagaaagacttagagctctgatttggaccaaaacttggtaaacctggttcaaacacattataccctagtgggtattcacactaattgtaaatcctagctctcaaatgtgtagttatttaccacttacccaacaaacagctgtatgctttggttttttattgtggtcaacaggacacatacagaaacatgcccaaaatatgcctgactgaagagatcaccgagtcaccacaacgaagtgaacccactaaagatgtttttgttaattaatactttaaagctttttggcattgagacgtgtccgctcctggcagcacccatcaactaggaagaagagcctggacatcaaaggccctccatttggagatggcttcatttgtggcaagccagccaccccacaaagaaaatgccatgtgtttaactagttagacagattaagagaccattgttaacttcctttctcataaacttcctctcttagtattgacctagttttataaattaagtaaaattaaatttcagagtgaagatacaaaacctagtacaggcaacaaagctcatgtttctactcaaagccattggtttcctgtgaaggtcaatgttgtctctggtgtttgccacaaccaaaaactgagtactttttcttttcagggggaggcagtggagagaatgcacacacacacacacacacacacacacacacacacacacgcgcgcgcgcgcgcgcttctgttttggctgtcaaatttaatgttatggctgggaatgtagcgcagtgtacagggctctcacaaagacctagatcccactcctaataacaccactggtaggagaaaagcaaataagaaagtattttagagaaaaatgggaagaggatgtgagtctgtaagcaagagaaggaaccagttaaaataaccatttttctttctttcttaaatgtattttactatatatatttttgaaattcccctacacatgcactaaatttaggtcactttctcccttttctttgctattttagttcctcccgtgctgtctcccccccccccccatcaaattcaagacctttccatctttatcgttgtcacacacacacacacacactgcacatgtatatatataaatacagactgctgagtccattttctgctgctcatgagtatttgtgtttagtgctgagctcttgggatcagattaactctcaggggtctcttccctggagaagacccagtctccctctcttagcagccattagtcgcctgtattctttgcctgggatgggattgtatggtgctgtccttgtgcccttcttgcttagtgaccatattgctgagcttttttgccacatatagaagacagcatctcacagcagacatcctggttcttaaaccttccattgttattctagacatgttgaaacattattgttattctgagcatgctgaaacattatactgttttacatttaagacttacactccacttaaaacacatgtttttctgagttcttcttatctaagaaagtttttctagtctatgtttggctatatcttcaattcagataataacagatttctatactgcttccttatattaatattggaaatgttttaaatatttgaaattaccaagcctttaaacattgtttaaaatattattttatatgtgtccaatctcattgagaaactcaatacagaaaggaaacacaaccaagttctgatctccatacggattgctcagttcttgcctctgatgtgaccacaatgagaagtgaatatgtttatatccttcttgaatcctttcggttcatgactttgggtataagacagatagattggaattaaatatatataaaacggaatgatcgactctgagttctgccatagaacttagcatatctctccagtttagcagcctgtcttgagtagttttccagggctggcaagtgtagagcagcggtcttctttttagtctgatacagtattgcatggtgagccagagtcatagttcactcagatactctataaatgctttcagaaacaatgttacaacttcattattctatagagacgtgcttgtactgaggtgtcaactccaaactaacacacagaggtaaaagtgctggctcagaggatgtgcatagctaaaattgctaatgttgccagaacctttcagggaaccctgtaggaatttatgctccctctcagtactgtacggggaaacccattcctcatatgccttctactttgctggactggctctacaaggaaagtggccttcaagtccttttgtagcactctgcctctctgcttaggtaaacatttggttcttatggtgtgtattatggtttttacacatgtatgaaattgttaaaatatggagaaaagccaaaatctaacgtcaggaacattcatttccatacctcttaaattcagtgatttttttttttttttttactattttatcatcttcccagatagcatgcaaagtaaattgtagctatcatgacacatttccctttcgtctttgaatatatatttatctgtaatgataaagatatcccagagtggcttattaaaagtaaatgtttgaagaggtgttttatattgtagaatatttttatttttattctattgggaatggatggatagcgttaaagctctagagaatttacttggtgcttatggatttggtaaaactattatgcaaagaagactgtgcattaagcgcaatgattaaattctatggctgtataaaatctaaggctagaagtgagagttttatgacaaatggttgataagatgaagtgttttcctgagtgttttatggaaattaaggtgaagggtttgaactaggaaaccaacctagctacatgattgtttgactcactattcctgttagccaggcaaacctaagacaacagcgtagagtgaccttgagtctgtgatagtttgttacataaatgattgtaggtgaagtgtcagggttcagattacatactaaagccaagttgtgctgctattattattattattattattattattattatttctatttaagatataagctacaacttgcttaagccaattattgggcagaaaaagaaattacagcatggcaatcttgaacaagaatggcccctataggttcgtatatttgaaaacttgatcctgagttggtggaaatgtttgggaaggattaggaagttcatccctgtgggcagactttgaaggttcatgtcattcctaattagtgtacgtgtgagtgctctctctctttctctctctccctccctccccctctcccctcgcacctctgcctagttgttgtggatcaagatgtgaactctcatctcttccttctctccaacatcaaagactctaatcttctgaaaatcttaagtcaacttaatcttggctgtggtgttttcttctgtggaccatggccatagaaaggtaactaagagcacagggtccaactgttacatgaactgacatctacctcagagccttctttcttctcctgggacattacccaactctgtgcacttcctcagaaggtagctgataaaggaataactcgtgtgtatcattcttcttgtggttgtgacagaacaccggctaaaagcaacttcagaagcctgggtttattttgcctcatagttgagagtgtggttcatccctgcagggaagaaatagcagaaggagatagagatagctggtcacatggtattagagatagctggtcacatggtatccacagccaggaccaaaggccagcgagtgctcatgcccagccctcttcctctttctcactcaagcctgggactccagcctgtgtgatgtgttactcacatatagggtgtgtctgcccatctcaaatttaatccagtctggaaattccctcagacatttgcccagaagttatctccaaggttgttctagaccctgtcacgtggacagtattacccatcacagcacatgtctaattttttttttaaaaagagcccatcagtaaaataggagggtggggaaatgattgacatgaagcaccctcctcagagacagctgtagaatttttttctatacataatcaagcatatttgtcagtttaagatgctgtgataagataccataacagaatggatgatccaaacaatattcatttatttttcacagttctaagcctgggaaatgcaaggtcagaatattggcagatctggtgtacagtaaaaggctctagtttgtatatagccatattcttgctaatagggaaggagaaagggaagtgtgtgtgtgtgtgtgtgtgtgtgtgtgtgtgtgtgtgtgtgtgtgtggtggtggtgtgtaagagatacagaaggggaagactatctcttgtctctttaagagcactttcacttgtcccattctgtcatcttaatcacccccagtattcccacctcctaatatcttcacagtggaaatcaagttgaatgaggtgtggtctttgtgttcctccctgtctggccagatttagattccacgtagctaaccagttcctgctcacaactctgctttccaactcagacttagggtgccatttcttgtctgcttttgtgttttgttctgtttttttttcttttatagttgtcccttgctttgccctttacagttattttattcaccatgtataatgaaaattctctcttctagtattgcgtggctcatccatttcagaatccttgatctaagttgaattaatcttactgtaagaaagaacatcaattttaatgtcagaaatgagaactctacatttagttttcttctcctaggtgactagacagttgtcttaacaatttattaaatcatgtttcccctttcttttgaagttctactttttatcatactcttaagtctctgctgcttactttttaaagtaacatgtcagacagtatatcttactctctggtaatgttaatttcttttaatattttaaacacagagtttttaaactctgagttaaatagtgttgtattccccatttaattaatcttcaattttcatttatcccattttaaaatttccctactccaaatgatagtcacaaataaagttttatttctagttacaattttggatgttctgagtgtgtatgcttctatgccattttaaatggtgggtttccacagcattagcacctcggacgtcacattccaactaactcaggagaagttctacatggtgtcttcagtggtctcttcaggatgccagcataggccaagaatggacaacagttgtgttttgaacctactaagcattggctgtgcatgagtgtacattgacccagtagatgtgtcagttctgcacagttggtactcacaccaggaccagttcccatggggataagcattggctgtgcatgagtgtacattgacccagttgatattgtgtcagttctgcacagttggtactcacaccaggaccagttcccatggggataaatctccccttcctaaaatttcaacaaagagataaaacatgaacttgaagacaagcctatgggagtcatttcttactagtctcaaggagtggtaggatgaaaccatggctcattacaatagaacattctagaatactctaggggtctgcatatggcataggagatagcttgaatgttatgattcctgtactcaaactgaggtagacagtgtccccactaaacctaattaatgagccggagaagagtaggatttctgtgttcaaaatctgacactcactgccagtttttagagctgtgaaccggaacagatgcatgaagtcctctgactgtgtgaggtagagttcacactgactgaagagagtggggatgagggagagaaggagagggagggagacagatagagagatggggagggggagggagggaggggaagaggaggaggaggagaagatgaagaagaagaagaagaagaagaagaagaagaagaagaagaagaagaagaagaagaagaagaagaagaacaacaacaacaacaacaacaacaacaacaacaacaacaggaggaggaggaggaggaggagagaggagagaggagagaggagagaggagagagagactatctggtcaatagtaggtactcaattgaggggttctgcttccctaaacttgaagatgcttatatgcctgactcttcagaatgttttcattagccatcaacagggactctaaattactttccatgcatgttggtgtataagtctatgggttcttctatggtttcaccattgagtctgtaatttcaactattgattctaataagtaacacaccgggtgatattctaagcctttgaatgtacctgagcactcatttcacagctctccagactatagtaatagaatttcagtgctgaagggagacttggaaattactgaattgtttagtcttacagacaaggaaacagatcttgagggttattggatcaaccaagaccacacagttgtgtgatactagtggaagagccaggatcacaaatgtctacctgattccattgtatctcctttatttaccttttcatattttatttgctaaggcagactacccagagtcaccatggtgcctgcagactgatgtctgcataggataaaggatgtgtgagcttaaggaaaagaaatgcttttgatcttttgctttctgaggtcctgtgcccctgcctccaacagtctcttcttgactcaccagcacaatttttaactgtgtgacactaggtgtgaaccactaaattcagggtgagaactgggagttgtcttgccaaacagagtaaacatacattcaaatcagaggagtagaaatgccaagaccctgggcaagctgggggagctggaaattgcagctagaaatcttgagaggggaggagagggagagagaggaggaaggaggagagaggggaggggggaagtgtatcatgaagacaggaaaaatggatagcacatgccatgtcagaagtacacaccatagcaaaagcacttgtcatatcaaaagcacatgtcacctaagcaaatgtggagcactgattgggaactaccacaacgatacctgtcttgaggatcttggaaaatctgttgagatagctcagtgaggaagctgccttcactaacgtgatgaccccagttcacacctgaaaagctggacagggtcactcaagccggttagcccagcatttcagagacagacgggaatctctaagacttgctggcctagctcgggaaaaggatatgggggccctaggtttcctgagagaccctgtctcaagacacaaagatggacacagcctcctctagtatatcacacacatgcacacatgtgctcacacatgcatgcacagatacacacacatagacacacacacacatgcacacgtacatcaacaataaaagagtggtgcttctagctcagggacagccagctgactttgcacctggctttttcgcccaggattttaatttctggtcagatccgatcggctgatgttgattgttgttttgaggtatgacccttgtgtgaagtgagtaatttctgggtgagtgctcacccatcttcattggctccattggtgtctgaacatggtctttagaaaatcactggactctctgccttctatagttttatcttctgatcctacaactcattttggttttgggtttagtgaagaaagaaagccttaaaactgtcatgtgtctttaataagagtaacgttgaagctgtggccaagttaatgatccttcaagtataggtttatttattggcccaataatattaagtcatttatgcatcaatacaaacatcttttttggatcttgatgaatgtgaaacagtatctgttttgactagttttatatcaccttgataacaagctatagtttccagagatgagggagcctcaattgaaaagatgcctcctaaagatagagctgtaggcaagctaatggtgcatttccttccattatgagtggggctaccgcaactgctgtctggcttctaaacgaaagcaaactgagcaagccatggggagcaagccactaagcagcatcctttatagcctctgcatcagctcttgcctccagaattctgccccattcatgtcctgacttcttcaatgatgaacagtgatacggaagtgtgaaccaaatagaccctttcctctacaacttggctctggtcatagtatttcatcacagtaatagcaaccctaactaagacagtactcacaccagttttgactttatttccctttagaaaaatgagaggatgttgtaaagcttaggctgatgttttaagtaagtgtagagaaaccttcacaaacactgtttagagacccccccaaattatcttcattagatatgattttagtctgtcttccaaagtttaatatgttaaaatttaatcttcagagtaaggcaatcgagagttatggagacggggatttgaatatggtgtcatttggcagagctgctgtatgagtgatttcagttggataaggtcatcagaatagaattgcagtgattgaatctttgtggttttacagaaggtagggaaacgaagagacataccgtgaatctattctgtctatgctttgtgctgcagtgtactgctttgagacttgtagcagattgatcatcaacagattggagcccttgactttagactgtatttatgagccaaaataaatgtgttttgtttataagttacccagctccaagcatttcactgaagtaacagaaaatgaaataggatagaagtctcagaaactcgggtcgcatgaataatttttattggtagacttcttggttgaagtacaagggtagaaatacattacagctttccaccttgaatcataatattacaagtacatatttgaatgaggttttacatttagatgtggagaatatcaagtggtgattgctgttagagttgagtgaggaactacaacagcttattttggatttatcctgacttgagatgaattaaaacagacgttcgtttctcatttgctcaccggatctaagcagtcagttacggtggactaaatggatggatttggatgtcatggttgtggggaccacttacaaacatacgtgagtaaaccagaggaatcagtggagccattagctcctgtggcttcccctgatgcatctgctcagactcagaacccccgctatgggctgtaccctcctcagggtaccaaccagccttcttgaatccgcatggtacacgttgtgcctttctcttctcaaacggtgagtcataccgtgagtggtcctccttctgttctcaagtcgtacataattcatgcaaaaatatgatctcagctgtgtcaacttcaaagggaggcagccaggcatgtgtctggaaggatttgctcagggaccagttctgtctctcattttacaactggagactctatctttgatcatgtcagtagcaaggagctgaaggcagcttttcagtttccagccatattaaagtcttctgctcccccctccttcttgaatttaaggaggttcttcgggatgaaggctgagaacatttgacataaattatctggcttatatttgtaagataatcttcaaaaaaaaagtaatatgtgtgaagattgagatagctgctaatgaaagacccaccacctactaagtcttctgatgtcttactcggtggtaagtttggtcctaactgaatagagaatggagttgtgtctgctgcatgaacagtctgtacagtgtgcccccccacaaggtgggggcgggcagaggaaagcaaaaatgggttaaaaagtgtccagcacacctagaacactcacagtggtagtgggggtaactgagtcatgaccgtggccagcatctatttcagtttggcattcatagaaaatgttgtggtctgccacatggaaacttgtgaagtatgccctgcttttccttgtgattgagagatgtacacatacagaagtacaatggtccaaccaaggtctttttatgaagaccactcaggacacaagcttggtgcaaagagtagaaaccttcctacttattgactggtgggatggggatgctgagagacagtttctcctaagaggaagacattttcttgctttaaactgggaacgcagactgggtttggtattggcaccgaacttgactctttttctccagctcagaggaacacttggaggtctgaccccttacactgtacggagatggagtcaaaagacaattctgtgctcatcttcatctgagcatagaagaccctggggtcttttaactttgagaaaggaagttttcatatttatggacctctagcacagtgactttccagctgtctggccatcaaaattgcctgaagggactttagaagagggcccacacccacctcaggaattcctgatgcagcttggatcagggatgcattcctaacaagttctctgggaatactgatgcttctggcctgggaccaacttcaggattcattatattcaaaatactgtacaatacattcagagctaaaagggaggtgataagctatgtctccgctggtaaaatgagccagttcaagcgaaattagatcatactaaatgcaggtttaatgggaagctgcttttgggcaagttcactggccccaaggactgaggccagggaagtcagtcgccatggagaggtggtggtggggtgtggagggggagagtagagggaagagaaagagaaagggcagggcacattcacagagagagacaggaggagaaggggagagagagtgtgagagaccaaaaacatctggattaaatagggaagagcctctgggggaagggcagcccaggccctgggttggaaagttcaggttgggggcagggtatgccaggcagggactgagggatcctgggagaacctggaggcaggtctgctttggcatgtaaagttcagccccttgtcctgggctctgaaaccaaaccggaggcctgcctaccttttagcttatgagaagaaagtgccacatattgaggtcaagagctaagtactcctaggaaaaaggtaacattcactaaatcacagaggaagaagcagctgtcagagttgacaaaggaccatatatcttctgcacctgaggcgcttctccacagtttctggatatgtctaactacttcttgatggctgtgctcttttgttttgttttgttttgtcaacttaatgcaagctagagtcctagggggagagggaaccccaattgagaaaaatgcttctatcagattggcttgttgcaagtctatgaggaggatgttttcttgactaatggttggcagaggaggatgaagctcactgtggatgatgtcacactgggcggatggtcctgggatgtgtaagaaagctgggtgagcaagccacgaagagcaagccagtaaagcagcgctccatcatggtctctgcaggcgttcctacctctaggttcctgtggagcttgagttcctgccttgcttccttcataatgactacaagctccaaactgaaataaacctgcccagggtgcttgcagtcatggtgttttaccaccgcaatagaaaaacaaaccagaccagaggcattggaagggagaatgaattgagttattctcaagtctgcaagatggctgggcaggtaacagtgctgagctgtggcgtgtgtgctctgtcttatgcacccacagacacgcagtgtgctcatacacacagcaataattttaaaagaatgtatataatcataattaatgctcaagataattatgtatattatttgagataagaacaggtacttaagtatctacttacatttctcatattagaggtcttgatacactggcatttaagtcttgatacactggcatttcctaccctacgaatagtcatccagtttgaagggtgtgggaggaggtctatttctagagataaacctttggggctggaatcgcatttcctcgtctcacaaggactagagtttacctttgatttttatttgaaggttcttttttttcttccttcctttctttctttctttctttctttctttctttctttctttctttctttctttgtcttgtttattgtggtaattgatttatttattcattttccgaatcattggctggcctggaactggatatgacttccagggtgatcttgagtttgtgacaatccttctgcctcagacttggggttgagagttggggttacatatagataggcacagcgacacatacatactcttaatttttgtttattattatttattttgagacagtttctctctgtatagtccaagttggtcttgaacttgtgatccttccgcctcggccttaacagtagttatagctactccagaacatccagctggaataatgcactttagttatgaaaaaagaagacaagtagtgagtgcactgcaggttattgaggagggcagctgtgaggagagtaagtgggctgaggagggcggctgtgaggagagtaagtgggctgaggagggcagctgtgaggagagtaagtagactgaggagggcggctgtgaggagagtaagtgggctgaggagggtagctgtgaggagagtaagtgggctgaggagggtagctgtgaggagagtaagtgggctgaggagggtggctgtgaggagagtaagtgggctgaggagggtagctgtgaggagagtaagtgggctgaggagggcagctgtgaggagagtaagtgggctgaggagggtggctatgaggagagtaagtgggctgaggagggtggctgtgaggagagtaagtgggctgaggagggtggctgtgaggagagtaagtaggctgaggagggtggctgtgaggagagggagaataagtgggctgtctgccactgagtggagttggatgtcagctgtttttcttcatagcacagtttaggctttatgcaatttgaggaaataaaaatatcctgcattgctgttttaaaaatttgaccctttgacccttaagcaagacatacaatgggcatacaaggtatcacaccgccttgctttctaaggagtaaatggtctggtgtcctgggttatagggaagagaatgaacacacacagttcccaagggatcccgtttttccttcttattcacatgttttattaatgtaattcttttcctgcagctgatgggacagccaagatagattataaactgaaggccatggttgatactgctgctcactttcagggatgtaacttccttacattttgatgaatgggccatgccgtttggttagattttcaatcatacatgggaacatagttgctgaatcaatgctaaaaatgtacattatataagaaaccgaaagaccaacttactaaaatgtttgtactgttttgcaccccaccagcaatagatgatagcgtctgtggatccacatcttcactagtagggtgtgagtgtccccgagtgggatgatgggggtgattttttgtttttgtcagtctttgagttttggtcatgataataggttagagtctgcatatttaaattatgtatgacagtctagttttgtatgctaatttttcatttgcatgtcttagaggttaaaattcctgtgctgccttttgtccactcttcaactggacggtttccttatgtttcgttgtgcgtctttgtgtagctacagttcctctccctgacatgttttgctgggggtttccggtttgcggctgtccctctctgtctcctaaatgtatcttttccagagggtaagtttttaacttgagccttaagactaactttctatacttgattgaacttttctctatgtaaaaacaactatggtcataagtttgtctgaactcattttggactttttctcctaggagttttgttcttttaatgctgggtctgtggacaaaggtgtcgattctgtcttttctcagttttgcatatctggttattatggacacatgtattgataagatatccttgcttgaattccctttgctgccctttcagaaatcctttggatgtgttcatgtgaatctctaaaacagcagttctcaaccactagaaaacacagaaatttatattatggttcataacagtagtaactattattaggaagcagcaatgaatatcaatatgagaaattatattggagagtccttgcatcaggaaagttgaaaacttctgctctcttgttcttccccctacacccctcccccctgtgtgtgtgtgtgtgtgtgtgtgtgtgtgtgtgtgtgtgtgtacctgtacgtacgtacatgtgttttgtacgtgtaggttgatatgtggatcaggctagtggctctgcaagtttgccaggattctcttgtctagacccccatctcgctgaagaagtgctggagttacagactaggtgctatgcttctaggctttaagtgaactctggggatttgaactcatgtccttagtttacgtgacaaaagctcttcctaacccctctctttgattttcagttgtaaatttgggacagttgcttttcctctccttggcagttggtttgtggttagcattccattcttccaaacactccttgtggtgaggagacaggcagaagcagtatgctatgccccccccccccttttcctcttcacttatcaggactgttcattgataaagtcaaatctattctggtcaatgagtttaataaactctgaaattcagttaaagtttttttttctggcttccaggaaaggactatattaaaggagtgagcacacctataattgatgaggtacttttggtctgtgtcctagtttataaaattagaaatcatattattctttctacagcagagagctttttattctttaaaacaaatcagaccatagaagatatgctagaacacaaactgcgagagagccgtgatggtccacgtgtagctcagggttctggctttcccctcttggttttatacttcctgtaaggcaattcactattattgatccgctttcacggaactgtggaaaatattgattatgtagtttagacaactgatgaatatttcttgcagaagtttctatctccttgtttaataaccttttctaaaaaccaactaaccaactaactgaccaaccagtaagttacagtttcatatggagactgtgtaggtcagcgtaaccacctagtagaagctccacagcattaatcctgatgatgtcagcactgccttgtaaaacgcagtgataggcacaattcattattaatgtttacatattttatataggattttgcaattcattattaatttttttataaaaagtcacaactacaatcataacagacagtctaacacagaagggggaaactgcacacgggttccaccctcagacaaacaactacagataactaatgactgctaagagaagaagaattggtttcttctagggatgaaccccctaattagttatataatgtaaagtggtcagccctgaaattatatatacacaagcaacactaaatggactgaaaagatatttatatatctatgtgtgtacatatatatgtaataataataatcaaagaaaaagtggccatcagtgtgagagggagtagaggtgcttggaagggggaagtactatacatatttttaattcctaaaattttattattttacgtgtatgggtgttaacttgtgtttatgtctgtatgttatatgagtgcctggtgaccttggaggccagtagagcatgctggatcccctggaactagggttaccacggttgtgagctaccagctcagtgctggcattcaagcctgggtcctccaggtgagtggctagagcagcttactgtggagccagagcttcagcccctgtgcatatactttaattaataataataaaaaaaagccaaatacaactgtgagattctaccttctgtgtactccatggtactttcattcagttgcctctgaaagttttttttttttttttttaaactcaagctgcttatttaaataatctcctcaccatcactttctaacctactgtggctatctataacttgtagtgagaattccataccgctccaagtgcttctaaagtcctttgtgagtatctggaacctgaaacctttcccagatattgagtgcgtagctaatatgtactctgggattgtttttttaaatcagtagttgcagtaacttggtcttatatgataaatccatagagagaaagaactgatttgttttataagtcatcaatgaacatagctcaatagtttgtttaatgactttacaagttgtgggagaatgaccattgtgaataagttatgttaatgtggaaaaaaattgagaggcagatactgaattggccacaagagctttgatcactagttttgatcattgcacatgataaactttgtcaaacatttcatgtgactggatcgttatagttaaagtgcatttcatacaaccatcatacacttgcttctttctaagtaattaaaagtcccaacagtctctgggatgtgtttagatcatttatatttattgtaattactaaagactatagatataccattgttactgttttctgtatttcttctacttttgctcctcttcccttttctttcttactttatattattggaatcattttagtgttctaatttagcttatgtatggatctttgatcccctttgaaaagaacttttggtggatattctaggactcatgctatgcattttcggtgtacatagggttaattttgcactgctccaagtgaaaggtggagatgtaaagcaaaaggcgaaaggtagaaacataaagtaaaaggtagatttcgtggttctctcccacccatctgtgtaagacacgtgtgttgtatctgcctatcccaagaaacccaatgaccgctgttagcaatcataggcattttcaagaaatcagagaaaaccactcgttaatttgcatttctactgtagttctctccaagatgtgaaaaatgctatgtcttctggtgttctttttttcttttttgaccctgaagcgttttgtagggttgtagggttgtaggccccccatcagctccgccacagggcacagctgcttggggaggctgaacaaggggagtttgactgcgcttatcccacaccttcccggggcgggtgttgggaagcactgagacaaccacttgggagtgggaaagcacagactgagccctggcaaagctggagctggttgggggccccaggtatgcaacaggactggggtcatggggttcttaggctcttgaacatccaggtaccttgggagtcatggaaaagcagagaacagagttgggggcctgtgggccagggacagcatctagccaggtgccaggggtaaaggaaagccctggcttgtccattggggaagattgtccttagcttggcagatgcaggcttggtggcagttgtggctaggagcccagagagaccttctagggagattaggctgtggctctgtaggcaaaggccttcttcatggctcaccatagcagatcttggtgaaaagagacagcctagggttgtaaacagtttattgtcatggcagaaagtggatgtataaaactctacctttgcagggaggaatgtgtggaaaaagaagtttattgggatgtcctctgggcctctagcgacctcattagcttagagaactctgttttgggtctttgtgacagtggtcatgtctcttttcctattgtcttgatctaagatgttaggggtgcctcatctacatgtggaagggcttggggcattgcctctacatgactgatggccacaaatctctgtatgggtgtgtgtggggctgtggctacctgacaagtgcctggtgagagggacagaggaagctcctactgtccttcagggtttcttagggcttctgcttctcaaatgctgaagtcacaggtgtgtgccaccatgccttgcttctttttcttcccctttcttttcactttttaacatttcaaataaggctcttgagttgcacctacacaattatccataactctttcattgtttcctctaggttgttttttgcttattcattacacaagtaacattttactcacagaacgatctaaggtagtagtttcttttcactggtttgtgagatgtatattggacccttaggaaggccatcccttagattgttaaacaatctacataaagctttttaaaaggtatttaagatgatgtcagtttatgaacacttacagagaaccaaatcgtaaacttttatttcaaattaaaaacaaagctcttaaacatattagcttgttcaattttttaaaaaagatttattatatgtaagtacactgtagctgtcttcagacactcaagaaagggcatccaatctcattacggatggttgtgagtcaccatgtggttgttagatttgaactcaggaccttcggaagagtagtcagggctcttaacctgctgagccatctctccagccccagcttgttcaaattttaaacaatttaaaaccttttaaaagtatgttgagaagagccaggcagagtgacacatgccttgaaatcccagcagtagagacactgatataaatataaatataatagtattatagtattatatattacattactgtattataattatttatatatttatatggataaatatatcacatatttatataaaatatgaagtaatcataatcactagattatattattatatagtatattactacaataataattataaaagtaatatagtactaagtaagacaggtttctaggtaaacagtgtaaatatatgtgtcacttagaggaaacagatgtttcttgtcctccacgttgacctgttgtctaggctctgtgatgtgtggttctgggcaatcatggtttagaacagcgatacacacctcatgtctttgccttcagttgttttctcttgacggtacatgtaagagtttcctgtctgagaatatgggaacctttgtttacaggaggactgacaattgggggcctggtctttgggacatttctcctgaacctccttcttttattatatttttaattcttctggaaattgcaaggctgactgctacttcaacgaaaaggtccaattgtcttagcttattgtctgctgccttgaactggaactccaacagtgggatagcatttgctgccttcaactctctcagtcggccacaacaaattccaccttcttacctatacacaaaaggaatttggggttagtgttcatgttgtaaaaggaaaatgtttaaaagccatcttctttctatcccttccccctccctagagcgttcagcattgagtcaaaagtaaagtgttttattgaaagaaaaacaacaagcaaaaggaaatcacctgttttgttttgttgttttgttttgtttcttcatttgctcaaggagcagaaagactagtcatcactgtaaaatcgtaagtccagtttcccttacaggttctgcctgttcttggacagtcctggcctcaagatccatttacagaagcaaaggttatctgttaaatgacaaaggtatccacaaaagaaaaacagccaagaaaagagggtgggtcaaaagggcagccgtctggaggcgtgagctcaggtggcacttccttccggtcatactttcattttctttgaggcatgatgtacatgatagtacactgaagtttgatgttgagaaaattaataggccactctttccccaaagtaatctgctcatttgtacacatggttgtaatttccattgccttctcatgcagaaccttcctctgcccagggccgtgctacagagcaggatggtccctattttgcttttgcctttggacacatctggagcggtggtattaattaactaattaatattcactccaagtttaatgagtgcaaaagagtcttccacagaaccgtcccaacccagctgtgttgctggagccacatactttttatgtgtatatagataggtataggtctctgcctcttcctactcctgtgagtgttaacgccacatgctctgctctgagctatcatcagtcatattaggagtgttctacttactaagtatttgtttaataaatcttccccaaaggacacgtaggtggtgcccccctccttttggctgtgcagagactgcacagtgagtaatcttgtcgctatgtcatttgacacatatacatgtgttagcatcactgctttaaacggtccttgattggcagaagagttgtcagctagtgttcctcacagaccagccccatgagaaggtgagatcatgtcaagtggtgagagatttgtattgcacatattagatatgataaaattggtgctggtgttcttagcttaagggtcttccaagaaaagggactgtggtctggtggttctccacactgtccctagcacctgtcagaccagcacagtgagttcttctccatagtgagtgttcagttgatagtggacacaccactgttgctgagtcttagtgatactcacgagttgctattggggggtgggggggaggcgcaggggcttgcaaaccgggagaaccagatgtaagagatccttatttggtataatacttacactatgtcctccattttatttatttatcacggcagcccttgatttttaagagtcttgcctcaccaataagcaggtttcacataagagttttctagattacctcgaagcttccacttaaagttctgtaaagaaagctacttttggcttaaaggctaagtcagattttatggacctgctttaaccttcccctgacaatttgcaaccattattactgggttttaagtggttaggcattttctcacactacatattggcaaatcgtgtctgtgttctcttttgtccccgtggctgctatttatggttctcttactgtctgccaagctgtgagctgttaattcatgctttcaacacacctgtctccaaagccttgagtccaatctgcatttctaatccagtgtagggagaaaaagctgacctggatatttcgtacttgtgtctggagtgtagctgacatgtggtgaatcagcctacagtgggcagagggaactaggggagagaactctgcaaggagccagatggaattctttttagaggaaagaaaaaagtatcatagccatagagggacattttaaggataaacgggggcagttttgagagtagaaggaatcaacttgtatttaaaattcagtgagcattgactgtgtgccttctgtatacagttaagaccagttttggtgtggctgccatgacaccagagggggttggtggtattggtggggtggatgcttagtaatgaggtcagagcgactgataaggcaaaagtaaaagaagcaaaactaagtatagagaaggggtaggcattcaaaccccagaggaccttgatttaagtccccatttatagagagtaccatcttgagagaccttgcaaagggctttgtgctgcgttcaaatgttattgtttctcttgtacactggatgccctcagcatcccgttaacttgccaatcatgtctctcagctatgctcatctcagcccgtggatagatagcctaccagctttcttctgtctggaacttgcctactgatgctggaccagtcataccatcccagttcccactgactactacttgcctctgcagtcacccatggtagtacttagcacagatctatctttgtaatgtgtttttaatctctgcagttagctgataacgcacttaacaggccacatcatatactgttttttatcttcggttgcgagcaattgttatttttgtttatgtcaacatccctctccagtgaagagtaggctggggtagccacgtggcatttgcacaatgaatgcctgcacagctgttggttatgtacttgttggtgaacatgttatggtagtgtatattggagatgctaagcatgcctacttacgtgcatatgtttaaaggtggaataagtactgtacttgctgtgtattttttaaatattagctcaacaatgcagaaactgaagcctgccaattaaaacgcttctacagctatcaagatttctaaggaaagaaatggcttaggaagtcttcattcaattttgtgaattaatttggaaaaaatagcaatatttaagaaaaatgtaaagcacttaaataagtacattcatttaaaagtctcacgtgggatactgaagatctgtatccgtcctgtgtaaggattgtgctaactgatgtcaaacatggtttcttatgatataaccaggatgctattgagacctgggtcgtataccattaccttatattttatgttatgtggcctcacagtggtctgggggttgctgtgagaacctcctttctgcattttgtacacatcatccaggagagaaattgctaacacttttcttcagcctcataaaaaaagtaaccatggtggctcaagttcactccgctccactctgatttccctctcccatcctgcagtgagcggctcgtaatggatttggtgcctctgcttgtctacctgatgctgttgcattttcagatagtgcatgcatgaattaaatatgggattattttgctgggcgcggtggcgcacgcctttaatcccagcactggggaggcagaggcagctggatttctgagtttgaggccagcctggtctacatagtgagttccaggacagccaggactacacagagaaaccctgtctcgaaacaccctcccctccaaaaaaaagtatgggattatttttatcatttaaaaacattcacactggtgatgcctgttaggttgttgttaacctgcttttctgaggatctgagttatttttttaactgcacttgagtttttatgaatgtgatgttttatttatttacttaattattgatgagagaatactttgtacatttctttgatcatacctgaggactttctgtcaagagttgccccctttgatgtggtggttggtggcatgcgatgtacagagtaccttataactggttaggccacactgggtattactttcctagcccacgaggacataggagcatgggacacggttactggtgaatcactctgcagttattttggttacttttctattactgtgataaaacaccatgaccaaaacaacccataaaagaaagtatttaatttgagttatagtttcagaaggtcagactctgtgatggagtgaagggatatctaagagctctcatcttgatacaccagcccgttggcagagaaacttagcagctggaatggctgaagctcaagccctcccctagtgacacacttccaccaagaccacaccaccttcaacaggaccacaccttctaatccttcctgtacagttccaccaactggggaccaagcagtcaagttatgtgcctatggggatcatttccttccaaacaccacagcaggttcatgcaaaaagtttttcagggacctatgtagcctatgtccactgtgattgctatgatactattaaccaaattattttctttattccaacttagcaacaattttcttttccctctcctctcctnnnnnnnnnnnnnnnnnnnnnnnnnnnnnnnnnnnnnnnnnnnnnnnnnnnnnnnnnnnnnnnnnnnnnnnnnnnnnnnnnnnnnnnnnnnnnnnnnnnnnnnnnnnnnnnnnnnnnnnnnnnnnnnnnnnnnnnnnnnnnnnnncctccccttcccttccgtggaacccaagatgtcctaaacttgtagtcatcttatctctccttcccagctgcttggattccaggtgtgcactcactaccatgccatactcaaaatacagaaaccttcacgatgagttaagcaatgtttctcccaaaacggatttgaacaaattagatggctaaccttctatgctgtgaagcgctagagcccacctaacatgttatgatcttttcttgttaacattatgtagtgattttatgtcactgtgatcaaatccctgactgaggagaggagatgtggctcacagctcaaggagccagtccttccagatggggaaggcattgctagagcagcttggcagacagagggacagaaatgtggggtggattgtaacccataagaccttcctctaatgctctatagcagtgaggatttatagtttaaaggttcatagcctccaccaacagaacagctgtgacccgtgcggggaatatgtctatgcaaatcataataaatatattctcttcatttatacacagtgtcaaagttataattttccaatggattggttattttcaataattaattttcaggtaatttcaaatttacagttgttgctaaatggacatagagttgacagattctgggtttcctcatggttaatattttactgtattcatactatggtctgtgctctctctgtagcatatgcttgtgatcttgaactccttatctttgccttgtgagagcaagttgcaaatctattgtccagttaccttgaatcacttgaccgtgcactttgcccaacaataacgatctccaacataaccagtgagagcactaaaacttagcaaacaaactgccattcaattcataatatcggcattgtaaactcaacaataggtcttttttccttctgttccaggatcctgtccaggtgtatacattgcatataatgctcatggctctttgaactcttgattaaaaacagtttctcagcttcccttgtctttggaacccttgacagttttaaagagcacagggctttaattatccagagataaggttctttctaatgtttcctcgtgagtcatcttagttaacacagtttcaggactcagaaagaatgctgtgttcatctgaagacactgtatccgagctggaagatgcatgcatagcatacctgtccactattgtggatgtgaaacctcggtcgcctgcacgacaaccttacccacaaccacctgcaatgtcttctcttttgtaacaagtttggattttgtatgaagagttttgagaattctgccagcatcagcttcttatcaaaactcaatccaccagcctcagtgatgattgcacctgaatcaactcccgctggcgtggtagccattcttcctacgctggctggcgttctgttagaactcaggtgcttctcttagccttgctctcttccctttgaagttttttccagctctcttaactgttgggaatttcaggtatgatgttcctgattctagatctaagccctctgcaaaaccagttccatttagcatgtggaaagcagggcctgacttggactgctcgtcactctgctgtctgtgctcacacagttgacagggaagctgtgtctctaagcaggaaggtgcttagtcctctcacccgcccttctgtggtggaccccgacctgctagattcctactgtgttatgggaagagaagacagcttagaactggaaccaacaggaaaacctttctccacgagtggaggatagagtttggaaaacattgttttcctgtctacctcagagttggaataagttcattaactttaggcacattagcctttcctttgtaggtgaggaggcaaaatccagataaaatatcagagcttcctggcttgtaacactgcgacgagttaaaattgacaagggagagaaacaggctgggtttcctgtatgtgcagaccgccacatttctccaggcagcttcctttctgtccagataaggcttgagtggacacttgcgatcctgactcttaattatgcactctgctttaagcttcctgtttccatggcactgttactgcctttctgagataccacagtggtctatgatcagatttccatcaagggtttttgtgatcagaggccattttgctcctctgggcgactttctgtgtctgtaatcttagatcgattttggcgtttacttttgagatggtcatttaaacatcaaaccacattttctttattgcagttgctgctatgtactcatactaggtttaatagagttcagtctaattcactcttggttaaaagtatttctttttttttgaggcatgaaatctatattcttctttggcttcatgaactctgccagcttgactgaatgttccctttatgggatacaatttagataatctttaattttttttaaaattaagaaaattcctatgtatgtatatatgtatatatgtttgcctgagtttataggaaccacataccatgtctgaagaggccagggggtgttgaatcttctggaataggcaaaacaggtaaaacacctgatgggggtgctgagaactgaacccagagatattcattctataagagtaggaaacactcttacctcttaagctatctcttccaccacacagttatatattcttaaatagtttcaccacaggcctgtgggcttgtctgtgggatgttttcttggttgattgatgtgcgaggccccagcttactctgggtagtgctttccacgaggaggtgagcctgggcttcatgggaaatgtagatgatcatgccagtaaacagtagtcattcctccattgtcagttcctgccttcaggttcttgccttgtgttcctgccttggtttccctagagatagactgaatcctgcaaggcaagtcaactttgcctccccaactggttttggtcatggtgtttatcccagcaatagcaaagtatttggggcaaggaacaacaatcatttctccaatttttaaaaaattattaattctatttgttgagactataatataattgcaccactcctcccttcccttccttctcttcatgccccccataccccccttggctctctttcaaatgcatgccctcttttttcatcagttgttgttacatgcatagatgtatatacatacacagtcctaagtatataaatacagcctacctagtctgtataatgtcacttgtatgcttgctttcagggctgagcattagacaaccagttggtgtgctcttccctgggtaacgatgtttgtggcaaaattacttgaggtggcgtgtacctctcattccagttcatttaaccaatttaatttttgagcacattccaaatattcacagcatgcacccactttccactcactattttcacacatttattcaagcctgcaaaggtggaataaccctgggtccgtgaactagataaccttttgggagaatgatgacacagtcctggccctgtgcctgtcactcagtgaccctggtgctggcactctttgctgagggtcagtgtcttatctgtgatgcagatgttggtgacggtggatggagtgaactttaagccttgtctttgtgatctatgtgcatgctgtggggcaggagggggcgtggcggcagagatgagcaggatgttcctcagtgctggcacttagctgcctgatccagtttcatgaatgacttcttggggagcagacggatttccgttataaaacagctacatttattttgtattgtttcagtcttcatgctgctgatctctttattaccttgcgtattaagagagggtaattataacaacatgccctaaaataataaccatgagaaaaattaagagaaacgataaatgatatttaatatgctaatataggtggagtacttcatattttgtaagagttaaaaacagcaattatctctaagaataaagcttctaacatgatttattgatgcattaaaacaaaaccacttgtgttattagcatacttatcctcaggcaatttcaggtagtttatataatcatctcttctaaagtgttttaaacgctgttaaaatgttcaagattctttcatatggaagacaatatctaagactctatggtctatattcaaagcattcatgttcatccctgatgagccttatgtggtttaaactgtggtgtaagcaccatgcatttcgattaacacaacatatagatacttggctagttcaggaaaataaagaaaatgtaaaaatagaaacttaagcttctgtgattaaaaaaaattaaaaatagtacttagaattttaactaacttgggaattgcagcaaaaagatcatatatttttattaacttcttttcaaaagatatgtgtatctgcatttaaaaatatactacagaagagcttattgataacgaagaggaacatttccactcactcactaaactttttatacatagaacgctgaaggggtcgtataaccaacacatcgctttcacaaatatccactacctcgtgtgcaatttgcatttggttgtatttattttctctttctgcatctgtattcctggatgtaaaagtttaaatatataagtgtggtagcctgtgtatgatgtaggctcattcatttgcagagactgttttatccttagcttctacagtgactgttctcctatgcgaacagtcttctcctttataagcactgtctctgcaaacaaacaaacaaacccaactctctccttaagaggaataagttatagttatgtttggagacagtttgagtgacatggaccaatgctcatgttccattgtggaaagcagtttcatcaagttttatcatttaacaaaacaaagccccatcaaggcaagtttaaaatatattgataggtacatctgagagttgtttacaataagatgggtgaagctttcctataggccccagatattatctgataatattcttagcctttagattgacggatgctaagtagtctgctaagtcaataggtattaaaaggtttttatctattagccacaggatgttagctctgacagagaggaaggcaaggaatggggctgaagatagcctgagatagggtaaatagcctctggacctgcaacattccaacctcctcacttcactgcacttttaatgagtcagtctttcctgacacagcttctttccaggaattctcaacatcgccactttcccacatgcaaactgagtaattctatatgtaacagccagagagtactagagatttttccatttgactaaagaagcctaacaattgatttcgtcaaattttctgcaacactctgtcatagaggcagcctctttaagttcttctaatatctcatctgtaagttacctctaaatcaaaaaataatgtgtttctgcaggcagtgcttacattatataacacataataattgataacacctaatatattgacattctgtccttagagcaactttgtttatggttcttcaccattttttgcattatcctatgtaaatggttttatctgtatttgtaagtctgtatttgtttgttatttataggatatcaggatatagtactgttcatagaactgaaattataccttccataccatttgtcctagagttaatgagggggaagcaggaagagagaaacagacatagacagacagacagacagagaattcatatagtatcaagcatccatgcgatgtgtgtataggctcatgtttgtgttatgcatatataggtatgtttgtataggtatgcgtacatatgggtgccagaagttgacacttggtattttatttagtgactcttcaccttaatttttgagacaagttctcttactgaatttggaccttacctactggctaggctggctgggcctagcaagttccagggatctgcctgctaccccatccccagggctgggattacagacattgtgtgtcctaccaggatttttttcctgtgagtactgaagatttaaattcaggtcttcatgcttgtatggtagacgttttccaactgagccatcttcctagcctctcacttagtgagtttttttttttttttttaacttttaaatttagcttctgagataagatctcactgtgtaaccctggctagcctggaacgaactttatagactaggctggccttaactcacagagatctgcttgactcttgtcacctgagttctgggattaccatgtattaccatgtctggctaaagttttaattttttaacatagtttctatttattcttgagctttatacatgtataaatgaaatatagttgtgttcaccccttcatgttcgtcatcctccagcttcccatgcatgcccccaactttacaccctctacgcctaattggtgcgatccatacatgcatgagtggggcatccactgttgcatggggacggtcccattcccgtcactacactcttcatggccaacctttattaagggtctggtgggctgagtaatgctcaagtgtttgacatgcattaataattaattaattgtttctcatgattatatgtaaagatggaattattatctgttgagagattttaaaaatagagtaccaccactcaggctgtagtgatacagctatgctttgaacctaggtcttctggtttcaggggtgttattgtaacagctctatagttttaagggcaatacaaaatctctcaaaacctccttgacatttcctgccatgttccatggttttgttttttgcctgatctatgctaattgatttcccttccttcctgttttttttattatttgaaattttttgagaatttcctatatgagtactatacttacttcattcccaacaccttccttttctctccttaaaattcctcccatgtccactaatttattacaactgctgcaattcttagaggcttgagttcccccatttgtgttggcatcattatagaggctttgtttatgcaaccatactgtagtgatttcatggattccacagcatccctctgacttcctttgttaagaagatttttctttatcactggaaatcaatcttggtttttattttattgtcacggtataatcattgttctataagactcaagtttaaccttttgatgttgcttaactccttatatttatttctattgtttgggtttcctgttccttccatcctgtatccattttctaggcacccaaagcaaagaagtttacaaatgaaagcatttaactgggggcttgcttatagtttcagagggttagtccatgttatcacagggtgtgtgtgtgtgtgtgtgtgtgtgtgtgtgtgtgtgtgtgtgggagcatgattaggcggccaggcaggcagtcatgactatagatcagcagctggaagctttacatcccgatgcacagagaggaggcagaaagggactgagactgggctgggtgtgggcttttggaactccagtgccacacctcctccaataaggccacacctcctgaccctacccaaacagttccactaactaaaacccaaacattcgaatatatgagctgttctcattcaaacacccacaccttctttcatggattaattatgtcttttagagtacatcatttcttagaaaagtaaatgttgtagatctttaaaatttctacctttttgtttgtttgtttgttttgaaatccttcatttcccattaagtggtcgttttgttactgggaagattctgaacctaccgacatcagtcatttttcaccttgcaccctttggtatccttttgtttcttttctcccaaatgacaacattctggcaagggttcactttcctgtgtgtgtcttcttggcggctgaggctacatgatgttgggaaaaagggatttttgttttgttttctggtgctggtgatgaaacctgtgtctgtggttatgccaggcaagaactgttccccagcagcagctggcttgtccctgtgctgggcatatgtgagcttttttggggtctgaggacttagaaagctcgagtgtggtcaacattctattgttgatttctttgacaatgccttctgtcagtagtatcttgtttcttttatctgaaaatagagcccttagtagttcgataaagcttcttgttctttttagtttaatttttgtcttttatatttaaaaacttttaggaaatttgtttgtatacatacaagtcactcactttaatgtatggcttttctaaattttgccaaatgtgatcagtagtataattgtcaccaacattaaaatggttattttgatcaaattgatggatgaatggacaaacaagtacacgctttctctctctctctctccctctctctctctctctctctctctctcacacacacacacacacacacacacacaccaccatcccactatataaagggaagcatttaatggggggggcttgcttatagtttcagagggttagtccgtgttcatctttaaatggaaagatgctgagacacaatactactacatgagtgaattgggaggtcactgtgaagtggactgttacaggaagacaaccatcctgtggtttcatttctgcaaggcagtggagtagttaatttcatagacatgaacagtggtcagagccaaggggcgttagcagagtgctatggtttatcgggtagggaagtttcggttttgcaagactcaagagttctggagatgggtggtggtgacagctgcttgtcagtgtgagtgtccttcatgtcacttaactgtcaaatgagaaatgattacagtaacaaattctatgcacgtcatctcagtttcagagagatgcaggtccagttacagatctttcttccctctgattctttctcatattttaaaaatcagttaaggcttattttttgatgatgttgcctgagacatttttgctgcgaagttgcagcatactagtgcttgctcaccgtaggaagggaagctgtgagggcccaaagtcgtaattgcacggaagtcccacctggtgaatgggtttcagttggggttgctacataggactacggttgtgaggggggtgggggctacttaaaggaacagaggcaattccaaagcagctgcatcactgaaacgcctaccccaaagagggtgagaactcaaaatagctgcagcctggagctcgcagcacagcttgcaggcagagtaagaggtttgagaatctcctctcagagacttggcaggtcatcctccatcctcagcagtggtttctcaggacccccaccctgcccctagctgagaatgtttcagttcagatgaaacatctatacaggccatatacgtagtctccaatatattttactctgcaagtctattggtttcttataaaatgccattaaacatagtctgtgcttaatctcatgtgtttgttgtttgcttggagacagggtttctccatgtagccctggctgtccgggtctacttaatctgtagaccaggctggccgtgaactcagagatctgcctgcgtctgcctcctgaatgctgggattaaaggcgtgtgccaccacctgtcagctttaatctgatgtgtttgaatagttttctggttgttactttttcaaagactattgccactatgatacagttgtcttgtcaccttgaatttctgaggttagtaattgttttgaagttcttttatttttttttctgtatctttaggaaagacactttattggcttatttttattattttatatgtatgggtgtattgcctgcatatatgtctatgggccatatatgtacagaaggcattggattccctggaattaaagttacagataattgtgagccaacgtgtgggtgctaggaattgaaccaagacttttggaagagcagccggtgttcttaaccactgcgccatctctccagctcctttttgctagtttataaatgtttgttttacatcctgttctaaatatttgcttcttatgttttctgttgacattggggtacccaaaagttttggggagacatggtcacaaaaaaaaaaaaagactcttgaccattaaaagaaagtgtgaaaatcagaatagttttgaattaaaaaaaaaaaagcagtcttggtaataagagagttcgcacgatcctgtttgctgtattccttacaccagtacaatgcatttgccaaggctgatactgatgtattgttagtgactgaggtccatgcttatttcagagttctcattctctttctgttcctaacttctgtccgatgaccttttattaaaagttctgaaaagcggccaggcatttacttcatagactgtttctgagttagggtcaggctgaaagctttccttctgggtaggcggtgggggctgtggtgtgggaagaaagaccatgctagccctgtggctgctgaccttactcacctggctgaggcagcctttgccaggtttcctggaactgtctgctctctgggagaagtcagtgtgagagagtgcagacagtagtctctggtctttgctcattgcttccccctcatccctcattaccgtttgctcctggtgctcttcttgcagtttaggtttgaggtataactagggtaatcccaggaatggaaagggaagggtgtggggcagcggtacctaggcagctttctgttcccttcaccctttcccagggtccctgtgcttaacccacggctgcaggaaaggcctgtgcttggtcctgtgttgtcattaagcacagtgcctgatgggaataaaaaaggaaagggatgaaaacttggagtgttgatacccgtcattttctgtttgatcatgctctttgaggaatctgcaacacatggagatagtcttcatttcttttcttttctttcttttctttttgttggcatcttagtttctggaagttatattctgtatcgaactagcatttttctgctccaagccttaaatattgtctagagaaaaattatttaattgctcctggaaaggtagagcatcctaaggttgcccctcttcctcgtggcctcatcattcccttttctgttgctgtcagcttccctactggtttgcctcattctcagatatatttgggtcatctcatttacatcaacagatctctccattttcatttataagtagttcagaattgagtaaggaggcaagagttgagatacacgaccttcagttctgggtgactccacacatggggtatacatatttacatgaagacacagaagcacatgtatcacacaaacacacacacacatacacacacacacacacacacacacacactcacacacactgtgtatggtagtatgcagaaacaacaggagaggttgttttgagtccttgcatttagagttctatgcctttgagagcctcccagtttgggggtcctagtgatagaacaccaagccctgctgtagttttgttgttgtgcttatttcttatctgtggattgttgttgtttgtttgatatagaatataattgcaagctctattgctatggagaagatttagttattttgcatttttgcttatttatttactttgtggtttgggggattacacccaagacccttgtaaactagggaagtctgtggccactgagctacacccccgtcctgtggaccgctaattcagtttttgcaccaggttatccatgtgccagatggtctcatcaaacccaccaggacacatgctacagtgctaaagaggaggatttattagtcatggctcttcgggtgtttttctttcaggaagtaattcctcagataccgagaaacaataaactgtggagtccgaggatgagtcagggtctggtataaacttcatttcttgagagggaggaacgagaaccctctagactggttataaaaccagagcgagcctgtaagatcatcctgtaccttagttttactcttgagtcacagtgaggcaaatggcttgaccaaaatgtcggaactgacttctgacaaagaagaaataaaatgagcattttacacttcattttttaataatcttaaaaattgttacttccaggaatgtaaattcatttgattatcttaccaaacacttcaattgtctacacctgaacattttcaagggtataataccacaaaattgtaacagaaacaaccttcttttctgcattacatttggaatacagaagacataattatgaaagtgatgggaatatcaccttagatgtaacttctcataatttatccattggtcactgtggagaaaaacactatgctgtgaaaattattttaatttaaagatgattctgatctagtatcttccaaagtataattctgattgtcaagagggaagagttgacatagaaagcacttgaaagtttacttctgaacacgtcagccgaacgatggatggctgtcttcctttccggggtttctagctcctggattttgtctcaggagaaagtcatgggctctgttaaaagggtagcctgacaagtgaatttaagagacatgctttgatcattactaggaacagaaggaatatacagtattttagaagtcaggatcagtgggttccaacttgcttgtgaaattgggctactatttttaaaagtacgagttgtgcccagaaacgcatctggctagaacgagccacttttgttggagaaatggtctgtactgttgctgtttctcctctgcctttttgactgacctttttcaaagaaatactagctggtagaggtagcttccccttcccaccccccacacccccgccccagttgactcttgtctttgtctctctttctagctgatggaaagctgacttagacccttttgttggcaagtttccaaatgcatttgtagcatcagcattccacaagggtttctgttgacagccacagctacaccttgagtcccctgccccaccttttgtttattgtttgagaattccatgcacgtatataatgttcgatcaggttcatatccttttttgtcctttaactcctcccctgtcccgccccttactatcttctcccatttctaatgtgttgtcctccccctcctccactgggtccactgagcgctaacagcatgtgcataggaccattcactggagcctgagtcatgtctcaggagctgcatccttaatgaaaaccgtctttcttcagcagccatcagttgccaatagcttttcagctaagggtgggacttactgactacctctgcactccatggtgggaatccttgtctggtgtgatcttgtgttggtgctgtgcatattagtcacagctacagtgagcccattggtgcgatcttcttgtgtctggaagacattatcttgctgatgtcatccactaattctggcttttacagtctttctgtcccatcttccttgatgacctcagaggctatctgggaggagagggtgtgttatttagtggctgagcattctgtaatctcttgtcctctgcacattgatcagttgtgggtctctgtgccaatcaccatgtactgcgtaaagaagttgctctgactggggttgagagatgcacttagcaataggtataataatgaggctctaagagtgacttttgaacaatgttcatttatcaatataatagtagtaggttctccctatggcctgtgacctagcaagactcagcttattggcagtgttaacaatgctagacatgagttttatctcatggagcagaccttaaatctaatcataaagctgttgtttacttcataacgtttgtgccattactaccccagtggacacatcttgccaggcagatcatgcttgtaactcacagggttcacagctgggtaaaaccaatcatgacttttctccctggtagaacgcatagcaccttctagaggtatgaaagctccttagtagtgctaaagcttcccaagtggtgatagcttaattcgttcatgttctaccactcaagtacacggtgtctctagcagtggggttgtacaatcgagttctgaagggtcatccagagcagtaacattagcttgtaaccttactgcttaggggtccataaaaccttactgaccaacaaacaattcctgagagttgtgcattcttggcctcagatgtatcatagtttagtactttccctgaaaaccaaccaaccaaccaaacaaccaaccaagcagagaaacagtataaactggtttttcctcttctcattcatgtgaggaggatcgctgagtgtttgagaaggactgtttggactttgtaaatatggtgatttggagatagaaagcagtagctggttcagaaggctcctgaatgaggcacttctcactcaagcattcttcctagtgcaggtcctatccaggaggacgaagactggagtccgggggatgcttctaactctttgagtaggaagattggaaagtaaccctcgtttgctgtgctaaagggatgttaaggttagcagtccctcctgtctagggatattgaggcaaaagttgccttgatttctctggaaaacacgaagaaccagcattaaaaacaacaaatgaaacctgtcaaatcccagtagtcctgaggtagagtccaacgaatctctgaatttgaggacagcctggtctacacagtgggaacccatctcaaaaccaccactaccaccatcacacaaaaaaactaagttaaaaaaagaatcttgcaaaaaaagttgcccctggatctcggcccataccattagtatgggttatttaaaacccatactaatatgctgtggtaccattgcaggatatatgcatactcctatgttgacactttattggaagacaaaccctaaaatttagaaaaatgttccttcttgtttttatttagcagatatattactagttagtgtctccaaagttagccacaaattcttgttagactaaagaagaaaaaatcaagacgcgtgcccttactgcactgaagcagcaccagagtctttgaaggcagcacaggagggagagtgttctcatgaataatttctgagggaatgacattagtgctctgaagtcacataatcactttataaaacctacaggatgcgtcgtaactcagtcattgttgtttatgctgttatctttcccttattctccaggagagtctttgagtagagcttgagtttcccttccttgtgctgcaaagcagagctgtctggaccacagaccacatagaccacatcgctgacactcgattctgtctgtctcccctgggttcatttggacctggaggacccccggagggggagggatgcatccttgcttctcagaaccttctcaacattggcgtggaacttcacactctgaaattgtctttggaccagttatacagtaaaatcattattaaagcacttccctcaagacaaaggaaggagctttttgcttgtgtgtgagaagtgaattttgaaatctctggaatttctgaacacttaactagctcatgtcaaatgacctattagacaccttgttggaaaaaattgtgtgtgtatttttgtatgtatgtatatatgtatgtatatgtatgtatatgcatatatacatatatatctgtgtgtttatattttctccaacaaggtgtttaatagattacaaacaaacatgcacacacacaaacacacttccagcaagatgtttaataggtcacacacacacacacacacacacacacacatatatatatatatatatatatatacatatacatatacatacatacacacatatatgtatgtgtatatatatatttatgtatatatttgtatacacacatacatatatggatagatatctctctctatgtgtgtgtgtgtgtacacagagacatatatgtctccttgtctttctgcttccctttccctatccctactttctctgtcttttctgggcttcatacatagttgtgtgatagcatcctctggttttagccaacgattctttgcctaatgtcctctcacttcccctataaggcctctggccgcttagtgtgtttgaaggctccatggtctgtgttgtcactcatcatcaacatgtttgacatgtgttgtttctttccctgtacaactgagctgttcctttcccatttttaccccgtattgtcttgcatgtgcatggtatttcccaaatgtctgccagtgagagtgctttggggagccctggccagcatttatgtcctagttccactccatgaaaccatttcatgtttggagttgtcccaggagattgcttagtgaggtagcgctgatggccaccagacagtatccagtgaggacactgtactggtcaggcaggaaagctgtgtacatctcaagtgatgacactgcactggtcaggcaggaaagctgtgtacatctcaaatgtgagttaatgttttggtgatagttgatactttattagaatgttggccttgtttctggtttgcatatcatcttagtgactgtgcatactaaatcctagactgggaaaatactctgctatacaggaataatgttctggggagtggggaagaggtctctttgtgaagggatatggttttagcatttgaaaggtaagtgttagactattaaagggcagctgcagagatacagatgacacagacagaaaccagaaagaaatagaggcttgatctgaccttaagaggcaccatgtttaatcacagtgaggaggcactttgtcacccatgtgtgcagatgactaaaatacctacaagaagaagatgagatgcagcccttacaagggcagaatgactcatctagtctgcaagggaggatgggaaatgtagttttccaacagtaacctattagtaagtatcaaacatttatgattatatgtttaattaatactataaatacatttggaaggttttcccaacttttttctccctgatgcattcatacctttgtttccccagtttgtgaagatcagaaaacatggttttctatgtcagactatttctggttttgtaattactaaatcaaatgtgactgaattgtcttaggcttaggtcttcaaggactagatctgacttgatgagggattgacactgaggaggtggagcggtgataacaccattgataggaaggagacgccctatcgtgttggatagtgttcaattagtgtcttgggcagggaggaaccaaaactcttcttttcttttctgttcaatagtctgtttagatttgagttgtggttttctcttctgtaaaagagaatgctcaccttgtaggcctgaggtttgtaaaatgtcagatgaatgtgggtgggactggtaaaccagcaagtgcctggtagtccaccaaaaggggaagagggtgtgagctgagcaggttgtgggaagggggagaaagaaccgatgatgatgatgatgatgatcaggacatcagaaggttctagaaagttgctaatacaacttccctggtccatttgggatgaggtattcctggacacgcataagagatgagtgaaggatgctgttaaactaagaagtgacattacaagggcagaagttggaaacagcccagcctggtggtttggagcacccttcaggctttccaaggcccaggagccctgcgattccttatttctgacagccctatggttagatccaaactagaactgggacagccttcaggcatgctgggtcataatttttctagaacaaaaacacaagtatatgatttgcttgaagccatatttccaaagtggcaaaccaaaccaaaccaaaccaaaccaaaccaaaccaaaccagggttttactgctattccagctccttcaacaaaaagcttgttttgctaagtgtgcttagaaaaaaaaatgttgtgaaaatgggatttttatttattttcatttaattatttttatgtcttcagcactgttcctagttttgatccttgcagagttttgccactctctgttcttgacacaacacagcacattggtttgggatgctgaaaggctaagcctgtgctgacttaactggcaggctctgagagcctcctaatctttccagtggcagagaactaggtgagtcagcagatttttgtggggttctcagtacaacacagttactttgtttaatgtaatctgctgcttgtgattttttgtggggttcccagtacagcacagttactttgtttaatgtaatctgctgcttgttttaaagttataaggcataattatggtggtgtttcccttctgttatgatgagtctaatgtcttttgaaaagatacttttctgttactatttttttttttttttgtagtacactgatggtattagcagtcattggcagctgggaagtaattctctctgtaacttagataacattttgaataaagagagaaaatgttccagggccgtaacaagagcttaggtgtgttttctagctaattaaatagaccaaagtcaattacatacagcttaacgggtgttcagatggatgccaggcgtggtgataactgtgaacctagtcttttgggatgaaagtaacagattccacctgacagtagctggactaggcaaatagaaagcatgcaggtcagtggttcctgctgtgatggagtagctctgtgaagccaggagagagtcaggctgtttctgcctttttgttccgtggaccacgggatgttggttttgctgtcaaacgtgatttttttcagaatctcattatggatcccattatgctactgctccaaacatcatggtcttctataacacaagatcatgaagagatattgaagccaagaaaaaaaaaaaacaacaacaaaaaaacaacatgagggtaagcagaagacaagtgaccaagtgaccattgtgttctgtagaataagatctgagtccctaggtccaaacacagcaggaaagttataggaagatttgaagggcagtatgggaggtcaagaaggaacttggggaagagagctgtgaggtgggggcagacagggagtggcccttagacctgtgcacagcgaaaggcctgcggggtatgtggcaggcaccctgagaaggcggtcagtgcggatacaacctcatctgacagccaagcctgctatgctgttgggcggcagccagcacggggatgcgatttaaggccttaagaaggccaggctggctacacctgcgcaaggggcctgtgcaagggctgagggtctgcaaggggctcctttcctttctcttcctgctctgcccctttgaaggccactctcgagcttcactttacattgattttgagttcatgcgtgtttctgaagttcgtagtttctattcatagatccagatagtatttattttattttattttattttttaagtaaaacgtagtcttcaaggatgtgtggagtctttcttcccagttccttaatatgatgatatcatgctgtttaatgagcggtgattggcttagaaagctggtgatttatatttgctttgttttgaatgctgtttaataaaccacacagagttatttttggcacagtgagagcagtcacggagctcatttttcaggatgaaaggcgattaatgaaaagaaatagtaattatggagctaggtcttctaaccaaattgtcctgggttgttctgtgctgtagacacaagaaagtgaaattagagacttggtgttggaaaaagaattgagagacttaaagaacagcatttatgagcatacagaaagacaactaggaatgtatgcatacatacatacatacatgcatacacacatacatacatatatgttgatacaacatccccagggctggagtgatcatctcagtgaatgatgggtttgtgttgcttctggttgttgacatttaacctgcagaatgaaaaaagatgatatttcaactcttctttgggttagtgtgatattttatgatagcatatgtgcatatgcagatggctacatacataggatttattttaaattagttattataccataattacatccaatatactttgttatatttctagtattactacattaataagtggtgagataataaaatataactatcttactgtattatttattctcatgtagccaaactgtacatctgcatttctgtctatgccttcatctatgtagccattttatgcagataaccatgactgtatttattgcgtggttggcagttgtcctgagacatttggtttcagttctaaggaattcttttggcattctacatacagatgaaatgagctgctttagagaaccccctcattccatgcccccaggctgttcatgcctgggctagcacggtgctttcgagctgcagcatgtatcagagctgcgtggaggcttggtgagaagcatgtctgggccctaccctcagagatggcgactggaggggtggggtagggcctcagaatttgcactgtaacaagtgttttggtgaagttggggcagcttataggacgcttatacattgtaaagcattggattaaatgaagcacttgtctgaaacaatattgcattcaggggccctttgaggatcttggttaaatacagattctgactaggcttggatctgagcatgagactctgcgtttttttttttttttttttttttttttttaatgtctctcaggtgacgtcagtgctcttgggtccattgactatactttgaagaaccccttattagagatgatgaggcctgagaaattgaaacatccagatattttgagccctgtacggctcagatgtcctggaagcagttttattttgataaatctgtacaagggaacaatttaaaaattgtctttggcttttcaaaacaagattcttcggagtaaaatagcctcttcttacacgtatcccatcgtcatccggaacagtctgcggcttgtctcgtagttgaacttctgcttactctgtaagatgttttgcccttcagaaaatgcatccttggttcgttctaatactgtgctgtaaatggagatgaccttcacattcttttatttaattgagctctgcagtttacttcctggttgggctgtattactcatcaatattctcaacaagggactttgaggggacaaggccattgtacaatcaagcactttctggccatgccactgagattctgtccatgaaagtatataataaatagggcaatattaatattaaacaaacacacaggcatttgtgtcctttgcctgtggtaattcaggattgcattaagaaaatgaattgcccattatgagaaaatgcaggtttccttattaacagtgatgtgaatattttattgttttctctgttgactcataagaaaactcttttgttttaagcttgctctctgtttaattttcatcttcctggagtttcactgcttcactgatgcagtttttctaccatgaactaattagtctcatagactcaaaagtaagtcctatacccactaggagactgaagatgaaaatctcaaaccagaaaagctgagtattaatagtgctctaatctttggtacattgtttttctcatatacagggaaagaagcgtgcacacgcctgcctggatgcctgtcactgtacacgtcatttagctaggttgtgtagttctacagggaactggcctcaaggagggaaataattaactcactagtttacagctcccaagtggtcaaatcagtattcggacgtatacagggaagcctgtctccaaggcccgtagcttcctggtatgcccacaggtgtcctgatgcacataacaactcctttggaatagtgctcttagactgtagacatctgatccaacaagaggaggttttaaatggggaaaggaagaaggaaattccttggtcattcaacaactctagttcctgagccagcagccaccaagaactgtgttccttagatctagtgacaataaaaactctgtgggtggtagcatcccagagactatgttgtaggcatgtaaagaacatatccacactctctgccttcagtcctgcccttcagattgtgtttgaggcgttaaagatgaagctctttggccatttttttctttgctggctctgtcctgaatgctttggggaagggttaaggtcctggcagtcaggagggtcagagccagctcgggtttggtattgtgctcagtgcatcacgtgtgctgatacagagtggttccgctctctagtagacagtgattttgctgatattgcaaatcccgattcattcccattgctatgaaggaagcctgcattctgttttctactctttgctgtccctagtcatcctttattgtaagacagatacatggtgccttggctcttacactgtcaggtgcttctggggggtttcagtccatgtggatgatgaattccagtacagaaccgtataataatcccatcaagaaattgttgacgttgtttttcagtgttctgtgaagttgtgttttcattaatacacatacaaatacggtaatgctatccgctgacctgcacacaaccgtacaccttcactgatagctcaggagaaaaccagacactattcctggatggacacatttgtgattgtgaggtaccagtggtattggtgtatcagaagaaaatgtgtaagggctatgaacatgtgtgagcaattcacaagccagtaatgttgggagagcgcagtgctggaaagaaaagggatataccactcagtttctagttcaactttctgatgtgttgaggccttttttccatttataaaataactgtccaaatttgaacgcatttggaggattgattgaggtaaatcatgaatgcacttggtgactgtagtggaattaaaggattatcatgtcatagggaggtcttgggcttccctagacctcacatttcatttcagggccaattttgaaaatttaaggtgatcctaccaattgcaggcttggtaagatattgtccacagggagaacgaaggtcaaaggcctgtttcccacaactccacttttgttagcggttcagtgggggggaggagtgaccagagatgcctagaccccattttagactgaggggcacgatccagagaaaggtgtctgtgaaagcacagaggtgctcagatacagagagttctgaagctccgttggaggtcttgatttttgtgacctgtcaaaagactgcggcggagttagagatatagtcatagatttagtccctgcggtaacgaggcaaggctgacactgacaaggctgcacaggtgtgactggagtcatgtgtgtcatgtcataagtggtctccatgtgtgtcatgccataagtggtctccatggtgcttcttccgtatacaagcatgaagagtttgaaaggaatccttactcatacatatgctagtctccagtggttcattgacagttacagtgaattaatatacactctctcatacttggaaaaatatcagctcactcatagtggtgggatcttagactcctgattacaaaggcatttttgtatataaatatataccacatgttttttttttttattcttgagacattttaatcatgtgtatttaatgtatacaacgtgttggtatggggtccatagagagagctgaaaggtgtctacagggacacagatgagcatccatcactcaatgcaggcaagtcacctttgctttgacttgttgacctgcacagttaagatctgactttgtatgagccccatacccagcgcaggacttgcgtatctgctataaacagcacaagacctttcatgttttgagtgtgtgaaatgtgggggcatagatcttattcagataaaggcttcattttctgaattccacaagctgtatagattctgtcttcagcagctgaagtgaactaacgatgaagtaatacaaaatcctgtaaatgtgtagctaagaggggcatctctgatgtttcttaagtccacttgggatttccaaacacttctgtgcctaactgatgacatcgtagccttcactgatacgactcttcagtgagctgcaggtagatgtaactggcagagtcctttaataacgctgttcagtcttcaggaagcttctgggggcctttagaaagcaagatccaccgttagcacaaacagtctttgccagtgactatgtactataggactagccattgcctaagggcttcttcatctccttaaacaatacagcaagactgtatttcaaaagtaaaatcattgaaggggttaaaaaaacattagaaaataaaaagacaagtgaaaatgtctaggcatcagactatttcaggtaaggagaagagtgtattgttaaatgtttgaagagcatatgcgctgtgcatgtctctaggagccaataaagaggggtaaatttatactacagtaaaaaacaatgatgtaggaagctttggtgtaaagcatggtaacaaactaaaataggacccaaatggtaatgggcaggcgtgtgtgtgtgtgcgcgcgcgtgtgtgtgcgtgtgtgtgtgtgtgtgtgtgtgtgtgtgcgtgtgcgtgtgcgtgtgtgcgtgtgcgtgtgcgcgctcgcatgcatgtgtgcacgcacacagatgccacagtgtgcatgtggagatcagaggaaaccttgctggagtcagttccctccttccatcacgtgggtctcggggactgaacttgggaagtcagccttggttgtgggcttttatacttgctctctcaacaaggaaaagacttacagatcaagcaaacaacaaaaatcttttttttttttttaaaataatggcagagtctcagaaagttgaaaggaagcctgcagagaagttttctgaccattcctaggaggtttctgaatgatttgtccaaaggaaaatctgctttggaagaaagaagctgtctccatgatattgtgagctcttgtgttttccgattgctcgcaagccttccccacttatgtgttttcctgtgacagaatgatgcccagtgtggactcaaatgcctgctgacctgcgggcattcacttcctgtcataaaaatacagtgagggtgtgaatatattgaagagttgccaaacatctgtgggtctgctatgaagtctgcatgtattgtttcggtgttcaccagaatttgccatgtagtaatcagggctcagaagtagtaaacacttttttcaacatgtcaagcccaaagtaggtggagtcatttatatcagattatatcaggagtagccaggtctaaattttgcctaggcacacattttaacttcattgagctatatgttatatttctgtaaaataggactgataattacttcaaagattttttttttgttttaaaagaataaacattgtaaagtgattattagcacgtgataacttcataatgattggttccctttctccgtcttgacttcccagtaattatttttcttcacaaaacacacacacacacacacacacacacacacacttactgactcttcccacctcctgtttgtctaagcttgtacctccaggttgcttacaaaatgttgttgtcattagctttaaaatctgaataatctctacgatgctagccaggctatatccatttggggtgaattctttttacttgtatgtagtcggatttctgttccagtgtggtctggagtggaatgcgtgttctttctcataattagattcagttttttcatctattactaatcaattgtgattggctttgaagaccatccaagtactgtcctattttccactatatttgctatttttagttgaccattacttcagagaatcggcttctctctcttcagcaacctgaacgacctgaagtggggtttgtatatcacaaatccctttattcctagtcacttaccttgcttctgcacttgcctggcttcccaggcctgtttgcttcactctctctctagagccctcaggtattggttttgcttttgtttgggctttgggagagatgagaagaggttggtgtgctttacagagattttaaagatgaaaggtctgctggggatttgttcctcaaaggtagatacaacccttctagtacgtctcttccttaaaatcttcacctagaaggtcccatactcatatccatttgtaatacttgtgtgctggttggttttggtcaacttaacacaaatcatgacgtagctgggaagtgggaaatcttaactgagaaaactcctctgtaaggttggcctgcaagcaagcctttggggatatacttgattaatgattgatatgggagggactggcttatggcacgggtggggcggtgcggggggggggggagcagtgccattcctggggaggtggtcctgtgtatatgaaaacgcaggctgaagaagccttaaggagcaagccagtaagcagtgttcctccatggcctctgaagaagctcgtgtgtgtgtgtgtgtgtgtgtgtgtgtgtgtgtgagagagagagagagagagagagagagagagatcgatccatacaattgtatcaatatgtagatggttgcatatctaccagcacaggctcccaagtatctctaagtgctagggaatgctgctgtccaataggattaaccgtttctgctcatacaacccactgagaataattaaatattttaagcaattagaacagcgttatatatcctgtacatgtttttaagtaacctccttttctagatcttaaatgtctttgaatgcagagatcatttcgtgttttatgtacgcgtcccatgcttttttctttactactgtcctgggatgattatgtcatgcttaaaatacaaatacacattgttcaaactcactgaaaaataatgcctctgctttgtagccaagtccagtatttttcaaagcttacatccttattatatttactttcaactgtagtattcgaatgtattttatagatgtttgatcttttgaaggtggtgtttcagcctttgattaaaaaaaaaaaaaaaaacgtcattaggcgtgtacttcctggtagaggcaatcatcaaagctctccagcatgccttcctttcctctctgatacttgcaggtgtgctagcccattacacatctgtgtgctcccctccccctcctccctttctccttctttttcttctctctccgcttccttttccttccattccaccaccattgggaaagtcttttgtgcacttttcttcagcctatcattagaaacatttttttttcctctaatggactgtgacagaaggaaatagagttggagtaactgcggcatgggctttatttggaatgtaatatgttctcagaaaaagaaaagaaaaacaccagagatgattcacaaacccttcagagaacaaacacaaatgaagactctctatcaccccgtcgccagggatgcctgtgaggagtggagccctttgccctctcgttcaggatttgggattaacttttccagcctagtttatgtaactatctgtcttacaatttaaatatttgcctctctgtactagtgaagttgttgagggaaaaaaaatgcttaggagttgggtgagcctacccaagtgctctttgagggggaatgctgatatcatagggacaagagagtagccagcaagtgggaaacttggttgggaaaaacaagttctgtgctccgctgtggtcgctgtctgttaagtgatgtgtctttgttgattggagtttcagctcttgctgtgattactgactgagaaggcccagaattactaggaagatgcgcaggcattactaatgtgtctcagaaaggatgcacaggcattactaatgtgtctcagaaaggatcacactggaatgaactgggaactcgaagctctgaagagtagtccagtttctcagaggcttatggattaggaaacgggggcaattcccccccccccccactttgtcctgagagaccctagtgtaacaagcatgatatttccccttgtgtgcgccgctctcctgggccaggcctgcaacatggagtgttcttgtttctccagtctgggtgaattccttcacttgtgcgtgagataggattccgttcagcactgtgtcctattactccgccttgcctgttgttctttaatcttgtggagttgtgttaaagaagcctcgttgtcactgtccctccagggccctgtgcactccacatccctctcagagcctcgctcaaacgtcgggtatgggaaatgaaggctcatcctttcctttcttgttggcttaggcattcacttaggacggaaacagttcggctcaagcttttaaacggcttcagtgctcggcttgtctggaatgccatgccgccgtttctcgttcttccttgcttcccatgagaaagaagccgtgtggggagctgacccccaaagcagaaattatgaaactggaagggattggggttcagtactacacacgttgattatggaaacaaaatggctgtgttgattatcagagtggtccaaagcacacagcctccatgaggattcagatgcttagtgagtgagcacactggtataataacacgattgcatgtagaaaaagactgtaagttatgacatgtactttacatcttgcttgtacaattccatttccatccagtgtttccttcctttgttttcttatggtgtagggaatcatgcttgatcagtgaagtctcattagaactactaagtgtccttagagtttaaacggtctgttctgttttctttgtttcttgtgtattttgttttgggacatggtctctctctatagtcctagctgtcctggaattctgtatgtagccagggtagccccgtacttacagagatctgcctgccttctgagtacttggaggttaaaggtctgtgccatcgtacccagccaagaagtttaaatgttcttaaagagttacttttttttaaagtgattgctggtggcctcaaataaggtctgctttatacttcatccatgtgaatgttaccgtaaaactctacaaacatctaattagaataacgtagtcatttataatcaacgctacgaagagctgttataagaagtgtcagttctcatttattttcttctctttctttttaaacctttagattcatagccaaaccatgtgccatagccctcaacatccaagccaatggaccacaaactgcccagccaaatgccattctggaaaaggttttcactgctataacaaaggtatgtgtctgccgggtccttatgtttctccaccaccacaaagcagccatcccatcctttctctcctgggttctgacaggcaactttgtttcccattggacagtaagtccttggagagattgtacctgctataattggcccaaagtgtaaacaatagataaagggtgtgtgtggcctcttggttgccgattttacaagctagaccatggaaaggtcttgattagatagaggtctgtccaatccagtgcctttgtcagtctcaggcgacatgaagcatgcagataagggctgggcggggactacccggcagagcttacagtgtggtgtggacctatgtgagaactgggacctgatggcatgtagtgcctgccagccgtatgtcccagaggccgtgatagactaaacatggaagacagtgaaaggtcaaaggaaggaattaggtcagcagagtcagaccagaagggatagactcacagcggagaatgaacgaagagatgggacattcagtctccagggtgtctaaatgaagagcaggaagaagagaaaagagaggaagggggagacaagtgaccgacacatacttaagcacagagaggaggaagaaaacaccaggggcccttgaactgaagcaggaagaaaaggagacaaaccaatgcagagcccatccagctgcttcttagtccttcttctctctttgctcacccttggctggatgagaaaccaggaaacaggagaaatggaacattgctctctgtgtttctgtatcagatggttcctttgtcctctttcaagtattcagtgctgctgctgaagctgtaatttgacagtcttacacaaatgatgtttccttctggtgtttgtggggctggcgttagtactcagactctcggcttgcagctctgagtacagatgcccaggcagctctctttgttttgttgcttgccttcatgtctgctaaaagtctacaggcattttctctggcctctttaaaatgatacttttccatgaagtttaccttcctgaagtgaaatttcactcctattaggttccttagtttttctcccaacattaaagatctaatccaggccattacaaatgctggagaagagccacattcccagccctgctgagccatgttgtttgttctgtagtgtctgtaggcaggagatattgatggaacaagtacacagcctcaaaaatgcctggggaggctgtatgactaagtacaaacatagcttgctggctgtcagattcccctttcctccagctactgttggacacactgtgccttggcactgggggcaaagttcagacaggcctctctcccaactacaggctcatcgcccacacatgatggatagatggcctctaaaagcatctcagtctctgctacaagattgcaagtaggcaagagtcaccttagctgagtcacccatgaatgaagcacagaggtagcagcccagccccataccagaaaacctcagcgagaaacaaagcctatctcacatctcacatttctctgctccacccttgtttcccatgacccttctggggatctgaaggcagtagttataagtaggtaggggacagaggaaatgggataggtggatcctgggggggggggcaggagatggaaaggggacaataaatgcctatgtgggacttctgtatgagcccagactcttggcatgcttgcacatggtcattgcttctgttagatttgacttgcaagaacacattacatttgaaaaatggtgtagacttttaaaatataagccatagagcattaacctccctttagaatgtgaccccctgctctgtgtgacagtactgctcatcttctctgctcaggtcactcttacctctgacatcagctgatggatataagtcatgacattcttcatcagtttcttctcttgtcataacatctgtctctcttttttctctctctccttcctctgctctacagataaaatctgtcatataaaatactgtggagaacctacctcccaccttaaagggaaatctatcacattctaaacaccatagaaacatgaggaaataattaggaccctggtaggacctgagacagacctgagtctgtaagttggcacgctaccttttccttactaaagtttggccttcagcaattttttttttaacctttggagaccttagaaatctccaaataataaactcacaggctttcatgaggattaactaaatcaacaacaacacagcatgcatgcacacgcgcgtgcacacacacacacacacacacacacacacagagcatttagtgaatgatacagcatctatttcagcctgtttccacactctcattgcatcactcttctgaggagtgcacacgctgctacattgtatcttcacagattcagattctgaagtttgggaatggagccaaaagacctagagttattaatggctcttagtccatttaaatacaccaagtgattatttttccccaatgattatttttgagtgtctgtcttttaactggttttatccccttatctcattatatttttaatttgaatttcctatttaaattggttctaaagctatgagggtaaaatatgtagcagttatgaagcgacattttatgttgttgattaccttttctgagggagacacaaaaaaatgtctcttgacctcagatgggcaccagtgtccaacagaagtactattttaccaaagattagcatggtgttaccagtgatcttattggtcttccagcagagagcataggagaggagtttctcacaagagtctgtgtgatacaccaatatctgaatcaccatctagttccacagactgtggtgacagctgcatgcaaagtgcataatggagtcccaatttcacttaaccctttacttcctgtgtactctagtacctccccagatcccttgcagatgggaaaggagtgatggctctgccaaggggggggggcgctactgatcccccttttctccagtcacagctggagtcaggagctagaaaagtggctcagtggttgagtgcttgctgctcttccagaggaccagcgttcagttcccagcactcatggcaagtgagtcataaacacctataactccagtcctagggatctgatatccttctgttctatgtgggcatcttcaggcacttgctcaagtacatacaaacacatgtgtgagctctctcttcacctctctttttcccactccctctctcccttctcctcctcctccccgcacagataataaattaattcttgtataaaaattgtagacagattctctaaaatttgtcctcattttttttttccatcttaaggagattgttgtcatatattttagctaaccagaagattatacaagattactgggaaagtttgtgagttttgaatatatttaaactgtaaaactaaagaaatgaagaaatgtgagggatggtgtcagaacagaatgttgaagttgtgagttcttgaagtttaaaaaggataactaacttgaactgaggagaagctgatgggaagtctctggttgcagaatcgcttagtagttgggggtggtagatcagctaatgctggcaaatcagagggcaggagaagcctatttaatagtacaaaagcaaactccaagaaagattatattgttgacaagtgttgggtggggaacacaaagaagggggaggaaggagtgataattttacatactgctcctgtgggcttgagccagtgagtagataagtcatttaaattaaaaggaagaggcaacctttctttttaaatattcacgtatacagaaacctttataagtcattttatcatataggcaccagtgaaaaggatagtaaaggttttctatgcttatggagcttgcgttttggtagtacacaattacgtcatcgtaaacctttaaaaggatgacaattgagtgagacaccatcacacaacaacaacaaaattgcagtgcaaaattaccagaataaatggctttttatatccaagtgataaaacagataagtcagttaaatgattataagaaaggatgatatatatatatatatatatatatatatatatatatatatatatatatataaatataaatataaaataagacccaagaagaaggaggaaaacatttaaatactcttggagtgcattgagacaagttgattgaagatgttaattaagaattggtatgctgggcgtgatggcgcacgcctttaatcccagcactcgggaggcagaggcaggcggatttctgagttcgaggccagcctggtctacaaagtgagttccaggacagccagggctacacagagaaactctgtctcgaaaaaccaaaaaaaaaaaaaaaaaaaaaaagctcacaggccacagaaacagaagtgcagtggggacagggtccttcctgccttcatctgcacccaggaggtggggctgttccgaagccctttatgcactggtcttgccaggagagagctggtttcccaagagtgccaacacaggcttacagactcacaggaggaagaagctccagccagagacagcaagaacatctaacaccagagattaccagatggtgaaaggcaaatgcagaatcttaacctacagaaactaagattatttggcatcatcagaacccattactcctaccacagcaagttctggacatcccaacacactggaaaagcaagatttggatttaaaatcatatctcatgatgctgatagaggattttaagaaggacaaaaataactcctttaaagaaatacaggagaacacaggtaaacaggtagaagcccttaaagaggaaacacaaaaatcccttaaagaattacagaaaaaccacaatcaaacagatgaaggaattgaacaaaaccatctaggatcgaaaaatggaatcacaaagggagacaatgcctagagattgaaaacctaggaaagagttcaggagtcttagatacatgcataaccaacagaatacaagagataaaagagagaatcacgagtgcagaagataccatagaaaacattgacacaacaatcaaggaaaatacaaaatgcaaaaagatcctaacccaaaacagccaggaaatctaggacacaataagaagaccaaacctaaggataataggtatagaagagagtgaagattcccaacttgaagggacagtaaatatcttcaacaaaattatacaagaaaacttccctaacctaaagagatccccatgaatgtacgagaagcctacagaactccaaatagacatgaccagaaaagaaattcctcccatcacataattattaaaacaccaaatacgtaaaacaaagaaagaatattaaaagcagtaagggaaaaaggtcaagtaacatataaaggcataccgataagaattacaccaaacttcttgccagagactatgaaagccagaagaccctgggcaaatgtcataaagaccctaagaaaacacaaatgccagcccagacaactatacccagaaaaactctcaattaccataggtggagaaaccaaggtattccataacaaaacgaaatttacacaatatctttccactaatctagaccttcaaaggataataaaaggataataaactccaacacaaggaggaaaactacacccaagaaaaagcaaaaaaaaaaaaaaaaaaaccttctttcaaaaagaagataaccacatgaactatgttccacctctaacaacaaaaataacaggaagcaacaattacttttctttaataactcttaatatcaattgactcaattccctaataaaaagacatagagtaacagactggttacataaacaggacccaacattttgctgcatacaggaaaaccacctcagtgacaaagacaggcactacctcagagtaaacggctggcaaagaattttccaagcaaatagtcccaagaaacaagctggagtaaacattctaatattgaataaaattgacttttaatgtaaagttatcaaaaaagataaggaggaacacttcatacccgttaaagttaaaatctaccaaaatgaattctcaattctgaatatctatgcgccaaatgcaatggcacccaaattcataaaagaaactttactaaagctcaaagcacacattacaccacatgcaataatagtgggagacttcaacaccccactctcatcaatgaacagatcatggaaacagaaactaaacacagacacagtgaaactagcagaagttctgaaacaaatggatttaacagatatctatagaacattgtatcctaaaacaaaaggatataccttctactcagcacctcatggtaccttctccaaaactgaccatatcattggtcacaaaacaggcctcaacagatacaagaatatttaaataatcccatgcatcctatcagatcaccatggactaagactgatcttcagtaacaacataaataatagaaagcccacatacacgtggaagctaaacaacactctactcactgataacttagtcaaggaagaaataaagaaagactttttagagtttaatgaaaatgaagccacaacatacccaaagttatgggacacaaagcatttctaagaggaaaacttatagccctgagtgcctccaaaaagaaaacagagagagcttacactagcagcttgacagcacacctgaaagctctagagcaaaaagaagcaaattcacccaagaggagtagatgccaggaaataatcaaattcagggctgaaatcaaccaaatagaaacaaaaagaactatacaaagaatcaaccaaaccagcagctggttctttgagaaaagcaacaggatagataaacccttacccaggataactagagggcacagagacagtgtcttaattaacaaaatcagaagtgaaaagggagacatgacaacagaaactgaggaaatccaaaaaatcatcagatcctactgtacaagcctatactcaacaaaactggaaaacctggatgaaatggacaattttctggacagataccaggtactaaagttaaatcaggatcagattaacaatctaaacagtcctatatcccctaaagaaatatagtcattaatagtctcccaaccaaaaaaagcccaggagcagatgggtttagtgcagagttctatcagatcttcaaagaagacctaataccaatactcctcaaactattccacaaaatagaaatggaaggtacgctacccaattctttctatgaagccacaattattctgatacctaaaacacacaaagacccaacaaattaagagaacttcagaccaatttccctcatgagtattgatgcaaagatactcaataaaattctcccataccaaattcataaaccaaatcaagtagggttcatcccagggatgcatgatggttcatgtatggaaatccatcaatgtaatccactataaaaaacaaacacaaagtaaaaaaaaaaaatatgatcatctcattagatgctgagaaagcatttgacaaaattcaacacccattcatgataaaagtcttgggaagatcaggaattcaaggcccatacctaaacatagtaaaagcagtatacagcaaaccagtcgccaacatcaaactaaatggagaggagcttgaagcaatcccactaaaatcagggactagacaaggctgtctactctctcactacctgttcaatatagtacttgaagttctggccagagcaattagacaacaaaagaagatcaaaggaatacaaattggaaaggaagaaatcaaaatttcaatatttgaagttgaaatgattgtatatataagtgagcctaaaaattataccagagaacaactaaacctgataaacaacttcagcaaagtagctggatataaaattaactcaaacaaattagtggtcttcctctacacaaagaatgaacaggtgagaaagaaattagggaaacagcacccttcacaatagtcacaaataatataaaataccttggtgtgactcttaagtaaggaagtgaaagatctgtatgataaggacttcaagtttctgaagaaagaaattgaaggatatctcagaagatggaaagatctcccatgctcatggattggtaggattaatatagtaaaaatggctatcttgctgaaaatagtctacagattcaatgcagtccccatcaaattttcaactcagttcttcactgaattattaagagcaatttgcaaattcatctggaataacaaaaaacctaggagagttaaaaactattctgaacaataaaagaacctctggtggaatcaccatccctgacctcaagctatactacagcgcatttgtaataaaaactgcatggtattgttataatcataggcaggtagatcaatggaatagagtttaagactcagaaatgaacccaaacacctaaggccacttgatctttgacaacggagccaaaaccatccagtggaaaaaagacagcattttctacaaatggttttggctcaactgggacttatgtagaagaatgcaaatcaatccatttttatctccttgtacaaagctcaagtctaagtggatcaaagacctccacataaaaccagagacactgaaatttatagaggagaaagtggggaagagcctcaaacatatggactcaggggaaaaattcctgaacagaaccccaatggcttgtgctataagatcaagaatctacaaatgggacctcataaaattgcaaaccttttataaggcaaaggacactgccaataaggcacaaaggccaccagtagattgtgaaaatatctttgccaatcttaaatctgatagagggctagcatccaatgtatacaaagaactcaagaagttagactccaaagaaccaaataaccctaataataataacccaaataataataaaaatggggtactgagcacatggtccccagtgaaggagctagagaaagtacccaaggaactgaaagggtttacagccccataggaagaacaacaatatgaaccaaccagtacctcccgagctcccagggactaaaccaccaaccaaagaatacacatggtgggactcatagcttcaactgcttatgtagcagagggttggtcatcaatggtaggagagccccttggtcctgtgaaggctctaatctccagtataggggaattccacggccaggaagtgggattgggtgggttggtgatcgggggaagggggttggcgtagggtgttttcggaggggaaaccaggaaaggggataaaatacaaaatgtaaataaagaaaatatctaattaaaaaagaattggtacgatctcattactgataccaaaatgtttatttggacttatcttcgtttgtgatataaacaacctaattcttgtcatcaaagttcttgtcacatagaactataaatacctcagtgtaacacttaacacagccgtggatgatagaccagggtgaggtctcaatggggaggagatgaactatggtgttgggacctagggtaaccatttagaatgttagagtattactgcccacagaattccactatatattcaaaatacacaaaggttttgaatctatcaaaaccccaaaagtatgaaagtgtatgtataaccataatttctagggaaattacaggaaagattgaattcagatgtatcttttagcaaatagctgcattgggttttccatttgtttgtttgtttgtttaagtgaagagtattgtaagccaattttaaaagaaatgatttagtgccaaaaataactctactatataatagaagaaaatgttaaatcagtctgaaaaaaaaaatccttcaactatgttaacaagtcacaggggttaaagccaggtagtagaactgagttgacctcaccttaaaatgaagtctgaatggttttttttatatcttttaaaaaaaaataatctatttaatgtatgtaagtacacttcatatgattacaaatggttgtgaaccaccatgctgttgctaggaattgaacccaggacctctaaaagagcaatcagtgatcttaaccactgagccatctctccagcccctgaatgattttaaacacataaacaagatgtctctctcaagacaaagggaaagtcaaagctatgctgagaatctaccttttgtgtatcggaatgaaaagatgaagatattctgttgggttgagaagactcctggacgtgtttattctttcttttgaggtataaattaataaagttagtaaaatttcaatataaaaagttacagaagcacagaccccttaaatctacaattcccagtctaaggaataggtcctaccatttactgtaacatgcagaacttagtgctgtagtatctcagaagtttggatgctaccagagtgtcattagcagaacaggctaggaagttggagtttatttttacacttcacaacagagatgctgtgttctgagccgacgtggaacccatccaagacaaattataaaggggaaaaccccaggtccagagcaaagtccacagtctatagtaatttgtgtgtctgggggaaggtaaaagagtattccattgtgtttatgtaacataaccctggcaacaaaaatgatttaatggtggtgttttcctgtcaaaggaaggaggactaagttaacagggttaatgttgatgcttcactgttttcaatttgtgaaccttggagttctccccaccccctgccacacacacacacacacacacacacacacacacacacactactagtgaacccagaaataaaaaagatctttctcttgtcccccaaggccctgcctccttcctgagcgtgttttgtttgtttattttattggttttaggttgttgttttgtttgtttgttttgtttttgcctgtttatggttgctgctagagatggtgttatttttcttcaacggtgtagccattggaggtgctagttaggatagaggaattgggagggaaaataaagaagacagtagagaatggtggggtgaatataatcacaatatattatatatattgtatgagactgtcaaaaatagtgataaaaatattcatttcaacaggatggtaatataaccaatatatattataggcagtgactccccttgcctctctcatattttcaattaagaaagacataaaaggagatttatattctcttgttactactgaaaggaacccagacacatgcccagctgaacgcctggaattgtgtttgtagagcatttcgtaactgcatgtcatttgctttgctttcggggtatgtatgtgtctatctcctgtctcaagtagttcaggccaccatggcagacggctagagacaagggacttaagcaacaggcatttatttacctttcacagttctaaagtctggaagtgtgcaatctgggtgccaggagtatacatttcttaggtgtttggaggggaaggagagagcaagggaaggagtagaggacaaggttggggcacaggcagtggaggctggggcagcaatcagatcccactagaagagctctgcccttgtgacctggtctcttctcaaaggcttcactccacactccgcactctggtgaaagatgagctgctgtgggagatgcaggccccctttgctgctgagatgcttttccaccctgtatgtgcgttctgttgcagcctggtcagaggctcttctctctccttcctgggttttcccccctctgatcattaaagccaacaataagtaagaggatggagctctcttggctggttttattcagtaggttcctctcttgtgattgtcagcaagaggttcttgacagataaccgaccctcagtttaacatatatttttacagtctttgccacagtcccctgtatgttgataaaccgtgcttgtttatatggataaagagaccaagcctctgagaagctaagtggggcgagcaactgggtctgtgcctatggccaagacaatcgtgtcttttccatcatacaagttcccgtaggtaatatggagtgttagtaggactagatgcatgctgaagtgaaaggaatgacaaaggatgccaaggagaggaatatgtggaaggaagaggagagatgtttgtggtactacaagtgacaccttagcaggtgcattttgggattttctgtgagttgggtttttttttttttttgtctttgtttttgttttttttttttttttgtgttttcaccattacctgtttattagatatgttgataaacttttctccctaagacagtgaaccacttgatggatgtctctgtaaattctgcccttgaagaccaatggagctgactcagccagctggatggttcaccctttcttggttgctggttgcttcataagaagtatttgctgataagaaaaagaatgcaggcgttggggcaagattcttgtttgtctatcttgtttcataatgagttatccaggagcgatctttgttcctgcctggagtggatagactagattcgcagtcacagatattgaaatgccagctgtagaaaatagagggaaaatccaaccgtaggtaaggtcagccctgtacatggagtaagtaaaaacgggtgaaaatggtttctctggtgccttgcttcacagcatcctgatgaaaagagattagaagggctctccaagcagctggactgggatgttcggagcattcaacgctggtttcgacaaagacgcaaccaggagaaacccagcactctgaccaggttctgtgagagcatgtaagtccatgttgcctcccctcccctgccctcccccaagtttttaaaggaaacctgcctcattctttatgccaacccagacgtggaacacaacaaatattggcagatactgacacccttatgaagcatgacacctggtgggaaaatggaccaggaaaacctgagggagggaacagtagtttgtaagggtttgggatttccagtgtggatccaataaataaagttaacttcctaatgtaacttcaaggagacagattcgaaggcctgtcatggtgttttctaccagccatcttggaaatccagcattcaaaggcacagaatgcttccacagtttgaattgaataggcagaattttatcaagaccaatttcctactaataaaaactaagatttttaggataatgctaatcaaggggtaataacaaagccctatattcctagagatttaagaaatagctatattctatttctggatgcattttaatgaggcattgcctgacagtaagggatataatgaaagtctcttctgtttgcaaattttgaatttcatggcttatagactgcatgctaataaagctgttaaaagtaataaaaggcagtggcaggcagagggctctctgggtaatctgaattgagacgctgggcactcgtgtaaaagctgggatccagaatgcatctgtaatcctggcataggggaggcagatcttggagtgcagtggccaagtcgtctagacaaatgggtgagttccagggtcttccaacaggaagaccctatttcaaaaaactagggtgagaagtgatggaagacgtcactgtccagacatcaacttctgtcctccatgtgcaggaacaagcgcacagaccatacgaagactgtcacacacatgcacatgcacacgcatgcacacgcacacgcaccctatctttagatggtgatactggacacacttagggaaatcaggggaagatcttgtcattatgtacatacccagctgaaggtgagacaagccctgtgtgctcttcgtcttaggaatgtggccatggctgtctgtccagccctttctctaaggagcttaggcctgacacttattatttcaacagtaacatcaatgaaagcagcccttagccatggccctttctattttgaactcaagttgcattcgccatttcaggtttatctttctattagtcaaaagaaagtattttgacattgcatgatgaagactgagggagtgaatgagatgcagagccatagcataagtccctgcagctgggtagatgtgaagagatgggatcatcaggagggtaggatatttataaaatcttgggtgtgtgtgtgtgtgtgtgtgtgtgtgtgtgtgtgtgtgtgtgtggcagctaaggagatacaatctgtgaaacacttcttatccataagctcagtactggttcctggcaggatttatgcatccagggctccaatcaccagctggaatggcttcctgatttggtcttaccctgtctccaaagacgccgagctctatcactaagccatgagtctcagcaagagtcaggttggactgtggcccgtgctctctcttcctgggccagctctggtagcacagtgcagcctcctctacaactggtcttataatagttttttttatttttaaacacaaatgtgtacaggcatcagtcacccagggatcttgttaagatacagtttgattccctacgtgtgcataggcagctgggattctgcagcttcaacaggctcacagtggcccttgatgctgcaggcccacagactacattttaagtagtgatcaccactagactcattgtgtgtctctttccttaaattcacttagtctttacctgtgtacccagggagttgtcatgttacctttacttagaaatgtttctaaatgagggctagaggtgtggtagtgtgcaggcacaatggagaaggggaagtgtatggtatagagctcttgtgcctgtgtcagacagataagacctgaatatgtatgcataggtccacgtgctatggacagtcgggagctaaagatctaaacagaaagatcagctcttgaaggtctataagcctttctgggatgaccactgggtcactgctaacactaggtccatgtgtataactcagttttgatgtgctcttactggacactactcttgacttctgggttggtagtagatctctatttccagggactgttcgcctgtttactcaagagtttctcctgtggattctaatgcttgtcttctccagattagtctcaggcttctttctttccttaccctcccttagtctctccagaaatgatttcttctcaagaactgcttcccaagccatgtgtgtccagtgcagatatttctaccaaggattcgttctgctctctgcagcatcttgtgttgctactctaactcccaaaacatcattttaaaatattccttccacacagcctgtcactttaaaacttggatgatttttctacaactggagcttgagtactagacttcttatcttgacagccagagtctggccttagccatgctggaggtcagttcttccacggggttgggcttttactgccagggctaactcacaagtcatgtgtaatacttttagcctagaacgcccagtaattctggttgcactctgtctgtcccctaccaattcctcaattcctaggcacagacaaaattcccaagcctggcttatgagtctggactgagcagtatggcctgactcacgggactggacggagcatgactcctttcaaatcctcagagcacttactgcaattgttgatgtttgaaatggaatcttctcctgctttgtgtgataacaactattcttaatctcttcattgtatcatgactgccaaggagtacaggatcacacacattcttcccagcttttcccataacacaaagactctaccaaatatttgtatactgatcatggcttaaaatggcattgttttggaaggagttgctggtttctcagttaccacatgtgtccacaaccaaagaatgctagttacataccagcctagtgtaaatacttttcaggaaaattttctgactctgggaagttggatgaaaatttcaaagacaaactctaagatctggatgtatagtataagcctatagatccagttagtcctgaggctgatgtgagagcattcatagcccaggcaatacagtgagatccccatctcaaccaaaacaaaaaattcaaaggaaacaatgacatggtggagaacatagaatactatgagggataaagtagaattacatgattatttttaatctgttaaaaaaaaaaaaacccagatctagaagaatagtgaaaccagtgaaggtatcctgtttgtttgtttttgttgttagcaactcagcacaaactagagtcactggacgatggaatctcaaggaattgcttcaatcagacagactgtgggcatgtctgtagggcattttattggttaatggttgattgggggagggtccagcccactgtgggcagtgccacccttggacaggtagtcctgagttatgtacaaaagcaggtggatccatccacggagatcaaatcactaaggaacattcattcacggccattgtgctggatagttttatgtcaatttgataccacatagagtgatctgagaggagggaatcccaattgagaaaatgcctccttaagatctgagtgtgggcaagcctgtagtattttttaaaattaatgattgatggaagggcccagcccattgtggctgatggccctgggttttataagaaagcaggctgagcaagccatgacgagcaagccagtaagcagcactcttccatagcttctgcgttagctgctgtctctagattgctgcattctgagttcctgacttgatttcctttggtgataaactgtgatgtggaatttaagccaaacaaagcctttcctccccaggttgctttggtcatggtcatcacagcagcccttactaagtcaatctctgatttagttcctgcctccaagttttcgtcttgactttccctggtgttgaattgtgattgggaagggtaagcaatattaaccccttcctgtccaaattgctttggtcagtattttagcttagtaacagaaagcaaattaaaacaaatgggtatcataaacatggggtattgctgtaatagacatgactgctcttgggaggaagctattctgtgtgaccttggaagataatgcagagaaatgcaaatcataacaatccagcttgttaagtttcacagagaagtttgaaaatcagttcctcacggactcttattttgccgcccaagtgctgtgtttaaattaagaatctggttgtggtcagttgtgactaaagaactatgatttacaacagaccaatagcactgagagtgaaacctttgctttagtgaaacatttgtgctggttagctgggatctatgattaacaagagattaacattactgaggtgaaatttggcaaatatttcctcagaaccattacacagaagctatggtccagtggggagccaaggctgcatgtcaagttggtattggaacttgggaatgtgtccccacatgtctcccgcgtgacactggttttgaaggaatgaaggagtcagagggagtagctgaggcttggcaccatgcagggtttgaatccctgcggagaggccaagaggcctttggtgaacttaaagcctcaattgcagtggagacccaggaatttaaaggctaataataaagaaaggctaaaacttggtaccctaagaagccaggagaccactgatgagtgtataacctcaactgcaatagagagtatcgttttggagattctgggatgatgagatgattgccagggataaccgccctgtagaacgagccagcctgagcctacaagacaagtcagtgtgctgaaaattgcaaatctggagaaattgaggtagctctaaggcagtgagaccccagaagatcttgagtgagtcctaaacacctgaactctttacacgtttgactttggttgttctttgatctgattgtaattgtgccctttctcttcccttttagaactagaaagtataacttgtttttgcaggagcccatagttaagagactggatactttaattaagataacttggacttataaagtgttaaaaaatgtagactatgggatttaaaaagctggattgtgttttacattgtaatattagcataagatatgagggacgaatgacaaaggaaaagttgtgggtttgtgtgttgagttgaccaggaatcagttgtgttggttagtttttttcaacatggcacaaactagagtctcctaggaagaagtaacgtcagttgaggaattgccctctcagattgtcttgtagtcaggtgtgtgggacattgtattagttactggttgtgggacattgtattagttactggttgtgggacattgtattagttactggttgtgggacattgtattagttactggctggtttggaagggtccaaccaactgaggtcagtgccactgctggctgaacagtacgtggcaagaactactgtgccctccacttcccttctggtctccaagtgcctgcctgtctgcccttcatgatggaatggaaagaatgagccaaacaaacccgttattttggtttttttgttttttttgctcacgttgcttttgttcagtattttgtgtgagcaatagaaatattttactatcatctagtggactttttaaatggatgtgtaggtcttagtccagggtgtttggacatgttaattttagaattcgtgtcccaagcacagtaacattttcattcatctctcttccctagtgtgtctccttgcaaaaaaaccaaaaacaacaacaacaacaaaacaaaaaaaaaggttgtctgctattcagaagaactaagatcacattagaaagctagagaacacagatttgctgtgtgtgtgtatttttttctgttatattaccttctatttaagacaatatggactccctccagatgccatgaagtacatttaccagcacatgtcgggggttaaatatcttttataccttttatttaagcaggatgtaattgattgaaagggtgaacttgctgtgtgataaccttaaaatggagtgtgaaaaataatcctgcatcaaagattagtaataacaattactctaactgaacttttcccctcacagctttgaagaacagaaccttaggttctagaaactgacacttgaggttcccattaggaattctatctcagaactgatatggattaaaatcattccaaatgcccctgtttctggataccactctggagtggcagagccttgcttctacaaagaagccctgcggttgtctcaatatgtgattccactggatttgggagaacttgccagtgacaatgagggcctaatcagttgccttcacgccatcagtttgcccactgtgagtgaaattgctgctttatttggataaatgaacagtgctgtctggggacctgaaagaggaaatggaaccagtaattggggtggaggaacagtagtcagattgcacaggaaacaggtagtcaatctcttcaattctttaatttgagatcattcaagtacatcatgttctaagtgcctttaccaaattttcataaccacatatttgtttgctaacaaacacacacctcaacaaaatatatgtgaactatttccatatctctctcaatctgggaagaagcaaattttaccaagggtgggggttggggggacagagttgcttttttatcctatcatgcagtgaacatcctgaaactggcatttttttactttgttatatagggtcttgtgaagctaatgctggctttgaataatgaatgtagttatttttattttttgtggctagtggtagtgttgctgtgtataaaggtgtgtatatgtatagaccccagagaatactttgccaatgaagagagggtctttttcattgacctagagctcattgaataggttagacagggtctgcctttttctgcttccccactgttagaattacaaccatgaactatcatgctcagctttttttacatggatgctagacatccaaactcaggatctcaaggattttgccaactgaagtgtctagccagcccattcaatacaggttttgtttggtcagttggttcatttagttgggttttggacacaggggttcttcttttttgttaaagagaaggaatgagaaattgttatggtctataacaatgacatcttcatcttctttctttcagtatgggatgtgtagtcagcagtgtttcaatactgatcctgagtctaaacaaaatatgataaggcatagaattgagctggtttttttgcttttatggtggtggaagtgactgttcacagatatgaaacagtcgctgggcagctcagtcccatcatccaaagcacacgaacacccaatatttctcagtgcatattttatactactcttcaacactgttgttgtaaatactttataacatataggttgtattcaggtcagttttagtgttggggcagaagtgggcagactcttacgtacatagctagaatgtaaatacttaagagcatgatagattttgttgtaataacatctctgccattgtggctcaagagtagctggagacgatacaaatggaaaaagctggcccttccaagaacatgtcttttactgagattgaaatgtgaatatatcattttcatattatgaaatactaggtttttaaaccctttcagccattacaaaatgtaaaactcttctaagctcttggactatactgaaacaagacagctggtgtatctagcccagtagcccattgtttgctgtgctctgccttagggttgtaaaactatactggtattttgtttggcattctccagacaggtaatgtggttccccaatgtacggcacttcccagaggctccctaccataggaacatcaggacctatctggaataggatgccagttaccagtattcctggctcatggtgtcttgagggtacttagctgtgtttagcccaacctaacaactgttgaagctgtgattgtttccctactctcatggtggaagatatgaagacctatagggtggcctattggcagtgtacccttctacttagactctcattttaagccttgctccttctttatatcctagccctgtggtctgcggtacagcactcgggctttcttcttagtccatcacattctccttgtcatctggctgtggctctcactcagtggctaattgcagcaaaacaaacttctgttaaaaatactgaacaaggcatgcaccttggtcagctggcagcatgttcagtgtgtttgtgctctgcttatatttggtccactggtttccctttagactttaaattagtaacagtcttttttgataaaaattttcaaatagttgtgtccaacatggaaatggatgaagacaaagaagaggaataatcaaatttattaaagctaatattcataatgaatgtttgcctgccagccattttgtccttttgtttttatcttttaaaatatataaatttatgtctgatttagattagtcctgcagtcaggacaatcgattttggtcatgaagcacttgtaaaagcatagatagcattcattaaaaattaggagaagttactcaaaagcctattgtccagaaataagtatttatcatttaatgcctccatagtatcatagttcatacatgtacctccacaaatgtacatgtacaagcagtgctgtgtttgtgtgggtttgatagattggtacctacagatagatggtaagggaaaagggagagggatgggctgtctgcgggccaactctccatccttacttcttcctctgcatctgcatgctgtacttgtgttaccattaaccatgcttgagttagtgtctctgtggaacttgccttgtcagactgcctgaagaagactgtggcaaccccatgctctttgtcatcgggatctgtgaatcatctacctctgagtgtgctatggtcagttgtgtgttgatatggtgcgcttgtctctacaaatggtacacaatgtaaagtcgcatgacagaacaaaataacataaggcataataacatcttatcaacaatatgttgaaaaaaatgtagacactgaataaaaataccagcgcagtttctcacatgttaactgattaagaaataatcaactactgtaataactatgacactttttcttggaaaagtccttgagttctcttgttgatgttggcattttggtatgcctgaactgctgttaaggaaataccacagattgagtgggttgaacagaaattattttcgtagtcttggaggccagaagtctgaggtcaagatcctctgaggctggtttcttctaaatcttcccttggcctctactttgaggaatttgtgtcttttcaaaaggatacaaattaaaccaagcagggtcctacctgtctgggtccttttagccttccctttctccttaaatgctatctacagagtgatgcacaccagaagcttgagcgtcaacgacaaatggaggaggcccactggtcagagtgaaacagcgtaggaaaggtcacagactaggagctactgggaggtgaccaaaggaggataactgagatcagaaggccaattccaacatctggtggatatgatgtgtgtgtgtggctgggttcatttgggcttgtgtgcgtgtgtctttttgagccactctgctctgcacagtgcaaattgctgcccccatgtagtgtatttggcagaggaagtcatatacaagcagataggaaattcatgtcagtgctcacatgggaagacatcgtatctcacagaccccacagagaagctgatggaatgagccatggagccaggcagtctgaatccatgccttctcttaaataaaaccctgtgggatgtttaggaaaagtgcttggcaaccctgagcctatttatgtataaaatgtgtgttttaatagtggctaccccagacagctgagttcatctgtaaagaggtatgctgtccctgatgagtgtagtgagtgtgagttcctttagtgttacctgttttctggcatcagtaaagctgagagaacgtgtgaagtagcaaatagctggcactcttttccacagcctgccctcggcagtgggctccttcagcaccagggctacctcacttaaaagaggtgaaactccaaagtttctgcaaggcaaaagacaccgtcaataagacaaaaagaccaccaacagattgggaaaggatctttacctatcctaaatcagataggggactaatatccaacatatataaagaactcaagaaggtggacttcagaaaatcaaataaccccattaaaaaatggggctcagaactgaacaaagaattctcacctgaggaataccgaatggcagagaagcacttgaaaaaatgttcaacatccttaatcatcagggaaatgcaaatcaaaacaaccctgagattccacctcacaccagtcagaatggctaagatcaaaaattcaggtgacagcagatgctggcgaggatgtggagaaagaggaacactcctccattgttggtgggagtgcaggcttgtacaaccactctggaaatcagtctggcggttcctcagaaaactggacatagtactaccggaggatccagcaatacctctcctgggcatatatccagaagatgccccaacaggtaagaaggacacatgctccactatgttcatagcagccttatttataatagccagaagctggaaagaacctagatgcccctcaacagaggaatggatacagaaaatgtggtacatttacacaatggagtactactcagctattaaaaagaatgaatnnnnnnnnnnnnnnnnnnnnataaaaataccagcgcagtttctcacatgttaactgattaagaaataatcaactactgtaataactatgacactttttcttggaaaagtccttgagttctcttgttgatgttggcattttggtatgcctgaactgctgttaaggaaataccacagattgagtgggttgaacagaaattattttcgtagtcttggaggccagaagtctgaggtcaagatcctctgaggctggtttcttctaaatcttcccttggcctctactttgaggaatttgtgtcttttcaaaaggatacaaattaaaccaagcagggtcctacctgtctgggtccttttagccttcgctttctccttaaatgctatctacagagtgatgcacaccagaagcttgagcgtcaacgacaaatggaggaggcccactggtcagagtgaaacagcgtaggaaaggtcacagactgggagctactgggaggtgaccaaaggaggataactgagatcagaaggccaattccaacatctggtggatatgacatgtgtgtgcggctgggttcatttgggcttgtgcgcgtgtgtctttctgagccactctgctctgcacagtgcaaattgctgcccccatgtagtgtattgggcagaggaagtcatatacaagcagataggaaattcatgtcagcgttcacatgggaagacattgtatctcacaggccccacagagaagctgatggaatgagccatggagccaggcagtctgaatccatgccttctcttaaataaaaccctgtgggatgtttaggaaaagtgcttggcaaccctgagcctatttatgtataaaatgtgtgttttaatagtggctaccccagacagctgagttcatctgtaaagaggtatgctgtccctgatgagtgtagtgagtgtgagttcctttagtgttacctgttttctggcatcagtaaagctgagagaacgtgtgaagtagcaaatagctggcactcttttccacagcctgccctcggcagtgggctccttcagcaccacagctacctcacttaaaagaggtagcactggtgatgttgcttgtgaagaaagatgcaaggagattcgaggacagcaggctttcggcttacaaagaatctcttgtattctgtgcaatccaaggaggcagaatccacatgattctgcagaactgtcgactgtggcattcacactcactctctctctctctctctctctctctctctctctctctcacacacacacacacacacacacacacacgcacacacacatgagaaagaagaaaaaagatacactaccagtgtgagagcagaatctcggccccattggctttctgctatgcaaggatgtgacagaagtggatgagcaatggtgtcctacttcagcagggagcgatgcctgctgtgtgcgcagaagccagggcttttgaagcaccacatgagaaatgtcagaacatgcagtgaatctctttgaaccacagaggtttaaaatctgcccaagtgattctgagaagatacagtttgactctaccaggagggagggagggaggagaaaagcctggtgcccagtggctttcgcctaggtaaagcctcctctgctatggcagggcagtctgagcagctttagcaggtcagcatggcgcctggagacaggtgctcgctgtttagtgtgatcattatcagttctaagggcttaagggagcaatgttcttgaacgagttcgagggtagaagtcagatgcaagtggttcttgttctccctcaatttgtgctaccttggtgaataagttcactctaccagatgctgctggtaccaaagggcaacagtaacctgctcgtcagaggatgctgctgggaacaaatgggatcgtgtatagtgtgcatgtcgctgtatctctgttgctttccactgggatcacaaagctgagcaagcaaaaatttctgagatgccaggcttcacggaggcaatggattctacttcctagcagagccgttcagcatctcggctaggccgccattacctggagaacttcagaagcacctccgcccagtgcctcactgttgcttcagttgtagctgctctgaatttcctgtcctaatttgccatcaatctgttttaagccagacctggtggcactttctttgtaaaatgtggacagtgctacttttcagactttattttatttgatgtgtatgggtgttttgcctacatgtacatctgttttccatgtgtttgcctggtgctgggggtggggtgagggagcagacgcgaacactggacgcccaggagctggagtcacagagggttgcaagctgctctgacccaccgagccatctctccagtcctgtaccactaacttggaatccccacctttaggaggctgagtcaggagggcagtgaatttaagggcggtgtgactggctacacagtaaatgtgaagagagcctgggctacgttggaacactgcctcaaagcagcaacaaaaccaaaaaccaaaacaagaagagaggaccgactgtgttttgagaaaggaggctctctgtggctccttctcagctttgctttcccttcctttcctccccctccccaggggcaaatgttgagtttttcagtgtttagttgccttctggcgtcattatcctcgtgatgaccttgtagcaaccccattcctcttcaagggtcagcctggcatccttaaagacccttcagccatgctggtgtgtctggttgtctttggagttggcaagtagaccattaatcctggggtttgagcacagtccctagtcacttaaggagtgaatgtgggggtagtgggtggaggatgggcacttcgatgggagtaagagggcacacagctagttctcaaataggaggatttgagcagaatccagatgattttaggggagacaggttatgttattcatgggcccttccaaatttaagtgtgaataaaaatttaactaaaagagaatcaggtggaccacttccactttaaatgcaaactgaactgttggccaggtctacaaagctattgtgatttgaaagcattaaatgtgttaaaatcttaaagttggctgcttatctgtgtatggtatcttagcaactcttgtttgatggaaggttgtttactgctccttagactcaactgtaggagagttaggggtactgttcagtagatctactgtgccggaggctattggtgcaggtgcacacatgctggcttgcgtcatcattgtctggttagagttaacagaattcacattgaaaagcacaagtctcagccctgttacctaattcatgaaggttctgctagtcacaggtgtaaggaaatcacatgcttttgggtttagcgtcatctggcaattgcttactgacgttgtgggcactttaatggtcgtccagttcttgtatcttgggaagaggagagaagagatattcatggagcagggtgaagattctgcggtaagtttcctaaacataaaacatcacccttgtgtgagatgttagatgttttattaaaaaagtccctcctccccatgaagacactgggagggaagtggcccgatgccagatagctcccaagtaccgtagcttgcacttgtacccagctctctaaattgtttctactctatagtgttaggggtggctcaagagttctgtatggaattgtgatcagagcaggcacagggaggagtggtggcgttagatgttgtttgctctcagcagattctttcctctcatgcccacgtgatgagcctctacagcgcttatgtctagcaaccccccaggaagttagctctgtagggcaggtggctgatgtccttctcattctttgcagctatctctgctattaaattgccctctgctattagattgcctgcatcctgggtcctggggttgtgtgttatttaccttttcatctccacgacgcactcagcgcgatgcctggcacttggtaaggttccagtcaatatctctagcgtgagacagatatttgggctccaggaactgctttgaacctttggggactaacaaattgactttaattggagaaatcttaagagtttgtctttcagatggttccagggaaggctgactggggaagaagagggagggcgttctgtctgaggagtgagtgtgaggatggtggcagtggtggatggagggctgagaaagcaccggaaggtgcagaggcgactttggggagcagaaatcaggatgtgctcgattgtgcaactctagtgagcacggggatggatgagcaaggacagacaaaaggcagccgggccctggttgacctgctcagcccgtgtcctctcagttccgagggccacctgctcttctgtttcagtgtccccacttggcccgctgtcatagaagtgccatggttactgagtgtggctcacttaaggacagagtcggtgtggtgttatctcatagcaacccatgaaatattttcttaataaaacattttgctcattaaacaaatctctctctagtagacatgcatcagtagggattttgagtaggtatcttcctggcctcgtgtgatctttcagcttcttctgaagtaaaatggggctagattaatacatggaattgacattatgttcctccatatcccagaatttacacactatagacactgaaaatcaaacattgaaaggtcaagaaaataaaacttaagttaaattgtcatcctactattagctgtacctattatgccttgtacatccagaagtctagtgttctatctatttgggcaagagagccaggctattgtgtcatgttttacaagaaaaaaaaatctatcagaatatgggaccaatgatgatgagtgttgtacggctaacccggtcctctacagtgaaagtcaagcaacaacaacaaaaaataaagataaattaaaagtatccaaatcaacaataatagcaccaccaaacccaaggcccatggtcatgcaagcatgggtgcttgcaagcttccaaggtccagtgaagacctgagaacaggaatctcctagaaagtccagaatagagtctcacccactccattttcccagtggtgatagagggccaattacacagcatgggcttggtgcgtgataccaaatccctcttttccagtgttcagagttgtggccagacatggggcatagcgatttagatcagagtcacaggagcgttcaactgttcctgtgcacaggctgaggcctcatgctatatgtacagattgaactagcaaatgagattcaagagcaccatatttaaaaatcagcgaggagcgatttctgtatatgcacagtataatggcttcgggtggggtagcagaatcagttttgaagcatgcagcctgacacacaagtcaattgactaacataatttctgtcattacaaggaccagtttgtgcccagggagccctgtgccatacaggtgactatcatgcaaaaagatttagccaggccttcctgtgatatctgtgtcctttactggtccaggtacttggagcaccagtgagtctgggatgccatactctctcaggatccctcagtgagctgcctttctgctgtcccttctcagtggctgggtagaggtgacactaggactaggtgaacagctagaatggggaatagtagaaatactttggtttatatcaaatccagggcagtggcccaaggagtggacactgcaggaggatggaatttaagtgagaaatactcagtctatacaggaaggggcctgggccatactgtgtggatccagagaggaagggctgagagctgaggtagcacttgttaatgaggtcacaggggtctcaagaaacagccaaatgcaagtcttctgatgctgttattcagttgtccttttcatcccacagtcttgtcttcctttgggtatggagggtcatgcttctccggacctcaggtattacagtgttggcctggatgtgtgaggccccaggttccatccacgtgccacgtgagctggatgtcgtggcacatacccaggacccctgtgctccagacgtggaggcttgaggatcaaggccaaccctgtgtagcaggttcaaggacagcctgggcgacataaaaccctgaagagctctattttcccttctgtcagagtttttagtcatggaaatagttccaagttgaaccattttcagttctaaaataggacatggagttagatgcatcatttccattcgattgattcagcaagaaaatactgtctcctcagtaattgaggcatgtacatgaattctggctgagtgcatcatacacagaatcagaaagcctcccctgtatggctttcggtgctctttctccagtccttaggggccagtgagcgctttctgggtacttgctttatgttggcctctgggtcacttgctagaccgaagaacaggatctcttctcttgataacagtggtactacctcctcagtctacccccagatattagctcttcagctgtaacacaggactgataatctcagaaacctagaagaactgctgtaaggatttaataaaataatttgtagacagcacctagctcaacccctagcaagagctcaaggaaaaataattacttttcggttccaatttccagtattaaaaatcaagaaagtgaatcaaatacctatctctagtcaaacaccattcccggcttgcctctgccctagagtacacactactgccctgtgctttatctggccttcgttcctgtcagatccccgggtgcctgtagatggaactttcttgtaggttttgttttaacgtgtagtgtgtttattctttgagaattgcatacagtcacacatgtgttttgcttttgatcagagttaccatcccattctcctgcctaacttctggatccactccctacctccatggcccccactttatgaccctctctttccttgtaacccactaagtttggtagcttcgaagtgatggtagctttctgtctaaagaggtaaataaaatgtggtggagatggtgatggtgccgttgctgccgccgccgctgctgcctcctcctccttctcttcctcttcctcttgttgttccttctcctcttcttcttcttcctccttctcctcctcctctttttctttctttcttttttttttttttttttaaagcctggttgttgagataagaaaaaaaaaaaaaaaacatgatttttctggcttactgacttcttaagtggtatgtaattggaagcctcaattctttgtctgaacagcaaagcgtgacctttgtggccacacagaaaggtttctttcttgggcacaaagatcagagcacatatggtcagtacctggaagggacagagtatcttctctctctttgtgtctctaacacttatgtacctgctcaccattagcttcttcaaacttaatgtgggttaaaatggtaccttaaatttaaaatgaagctgtatagttgttctaattaaatgttattgcaagtccttagtaaatgtcagctcttactgagagttatgaggagtaaatactatggagattatcacctgaaacaaaatgggttttattagggagactttcttcttgaactagtttcagcttttgcttaggatttcctggggctttctcgcaatgcagttgttacaaactgttcaggatatcgggaggaccaacgaatgcagagtacctgatccactcttgtttgttactgtgttaatagggcttgtgtttccagggaaggtggtataatctcatctctgccccttggccttatgcccctgctgtccccccattccatcctagtgagcccctcttcctccttactttaacaagcacctgtatcaagactcagagcagcctcatgttacaaactgtggtgagttactgagtactactttctgctgggcacagtcctagatgtccagataagatcagacctgcaagcagatcatcatgacctgtgtgatctcacctggcccatgaaggaggcatgtcattttccaggaataagtaacatttcttttgtgtaccatgcttagaattgataatagcagctcactgttcttgcttaacgtttcctttttgtcttttagactacaaattccttcagggaatcacctcacattactctttttgaatacctggtcatgcttgcatgcaactggtgcacagcaaatgtttccataatgcaaaataagtcagcatgagtgttagggtcgatagtcatcaagataatatgtatttcattgttcacttattctgaacacctactacctgtacagcagtccggaacgaacttgtgttatattttagaggagaaggagggcttaataagtaaataaaatttataggatatcaaccagtggaaggaaaataaagctagagatagggcacatgtgggtcaggggtgcatatgagtattcagggatggtggtggagtatttccagagagtaaaatttaggccaaggcctgagggatgttaggaaaccccattccaggaggaagaactattgcaaatgcccagtgaagagtatactgggcagtgtgagctcagctgaggtcaggcagagtggccaggttgtacatgccttgttcattgctgaaacactttgatatttgcctgtaggtcaggagccactggggactgtcgatccaaggaaggctgcagtgtagtgaacattttcacagcctcttgctggcttgtgttcaccttgaactggaggtgtaagggtgggattggacatcaggtggatgggtcgctaaggttacagtagcggaagtgatgcaaagagatggtataaaaacctacaaatacaagttttgcttttggtttctaaaacattcaaggataaaaggaaggcggtgttgcgagtatcctgtcttcaccacccagatccgccgatctgcgtgtggatgtttgtcttacctttagattgtttcagggggttcctttcaatccgttgatgcacattggcagactctacttcagcctgaatctcagaatccggtgctacatgagcagaatgctggcatggcggggacctagtgtgtcaccccactgagatctcttacatctcctccacgtcctttatatttgcatctatttctagagatgacccaaaaatatttgctagagataatctggacgagcgtggttgtttactgtgagggacaataaggacttccgaatggccactgggtttaaccacaataaacagatgaaaagagttgtcaggtgctgagctatagaataatcagagagggatgtaagctcagcctttcattttgatctttttaagtttgggaaatatttgggagatgtatgggggcggggagggctgccagcgacagctggatggatgcatagatgatttgggggagatttggcctataaaaagaaatcctgcagtcttcaggaggtaggtagcattttatatcctaagacatagtgagatcaatagcaagagagtaaaggatttaggacagatgtaagaactagccccaagaccctgtccagttgagtcaaaacaccaccaaaggagactaaaggagaacctgtggctcgagaggaaggtgtgaaggatcgtctgtgtccagcagtactgatgttgggtcacacctcacaagtctgtggtgtctgtcaagagcagttcatttgaagagggcattgagaaccacccactatcacagggcttaagagaaaagaggagaaagtataacagtgagtgcccagggacttccttacagaagggagattctgaaaaagaggggggtaattgcaggatcgatatggggttaaaaatccattcattctttgagaaagagtctcctcacctaccttgctctggctagactgggctcttgaattctacttcttctgcagctgcctctctagtgttgaaaccaaccatgccgagctaagccatataggttaacaaagggaaaatgatggtgtgagtgtatgctgatgagaataatacagcaaaggaaggggggactgaagggagagtaagagagctgagttacctggtaggcaagcagggcagtgcagccatggtaacaggaaggcaggctgcagggagataagcagtcacctcagtttctcctgattgcttcttttgtcccagggagatggcagagaggctcatcttggagactgaaagggagcaagaattttgaggatgaattggaaagtggaattctcctttgtagatgtatttattagttgctttgtatggggtgtatgtgtccctgtggagggggcagggagtaacagtaaattgccatctctaggaataaggggtgttgtcacttatgggttactctctctcaatccaaaaggaccaagggttgaatttgttttatgttcagtaacttttagtcccaggaatcaaatcagatactaatttaaaaaataataacaaatttttaaaagacttagggttaggagggacctttccattataatttgtggggcacagtgagcggaaggctggacggaggctgtgcgtttctggagtggatactgatatggctttgatgttacacatttattggatcagtttggaactggtgccaggcagtagaccgtctttgtcatttccacagccattatatgggtgtagggcggaaaggggcttcggtgggcctgtactaataagaaactgaggctcaggtaactgcacatgattgcctttgagaaaacactttcatgttaatgaagcatctttttgctcagtgttgagaaactgcaagggtcgtagctacattggaggctattttgttctatactcccggagaatcaagtcccatgcgctgatgattctcaagtctcgatgacttctcatgggctttggctgacagcatgcattagatatttttgtttcacttacgcttttaagcctaaaagacacatcctgtaaaccaggtggcttccaaatctgcatataaataagagagggaaaacaacaaaagcagtggaggatgtttttatcttggcagattattctgcttggtatccttattaggtattttagatccagaattctcaccttgaagataagattttcattaggaagataaaaaaaaaaaaatcaaatggagaaactgtaaaggtgtatttatataaaatcctacgagattagcattttttggggccaggaaattaatcctagctttccaatcagcaatgcaaataaaaattaccctgagattattaaatgttaataagtgtcttcagttaacagtaagtcattcaatggcttggctcaaaccatagatttatatgtaataaaattttcatctcaaaggaaagaaacaggtctattgttatttttagctttttatgataaaatgggatagttatttttagctttttatggtaaaaattttgatgtgctccaacaaagaatgatacgataaatttcagagttaccacacaactgcagcaatattctgtggagagatattctgctctcttcttaggaaaataattgctgggagatactgcagtccagctgctaaaaacatttgtccttgataaatggcacaccgtcccagaaagccacatggaagggaactcattcctgaaagaatgaagttgtcttctgagtcccacacctgtaaccatggcgtccatgagacctgccccgcccccacacctgtaaccatggtgtccatgagacctgccccgcccccacacctgtaaccatggcgtccatgagacctgccccgcccccacacctgtaaccatggtgtccatgagacctgccccgcccccacacctgtaaccatagcgtccatgagacctgccccgcccccacacctgtaaccatggtgcccatgagacctgccccgcccccagtattctctttttgggaatatgggatttgagtttgaaataaaatatagaatatgtttgaggatgtttggtggccctgcccactggtccttcagaccgcctgtctggttctgtccttctgtgtgttgctggtaatgaaggactggtcatagctctccatgtactctgtcccatgccccatacctgttgattcccttatgtttgactgttgctattcttttgaccaagacacctgtcctgactcaagatatatctgataaaaatagactagggctttgcttcagtctgaaaatctttgttttctatttttccatcagaccttgacctatattgacatagtatccttttcccatatctgtcttgttttgtgatttgtgtatttctcttcttagttttgaaatgacagagtgggctttaaagtctgaagtatttcaaatgcatcatctccatataccttcaattgatttatgctaattttattatgcttttcattctgtcttttttttctttttttttttttttaacttgacaacatcagtgttaacctgaaaagcacagggacaatattatttcagacttttatgcacattctctgttctctctctctctctctctctctctctctctctctctctctctctctcgatattccatttgaaatcacacagctttgtctgaagatctttgaggtttactagagatgaaatatcctagcttttgttgtctgcaatgaattttcctttttatccttcaaagacatttttttcctgagtacagaataaaatgtgggttgtgttagctattagcagacagatgcaccattccgctgttgccgtgttgacatggttgctagggagaagttgatggccagtctgtcagtccttggagcacaataccattttacctgctgtgggttgcatgcagtttcattcagtctttgtctttttgcatttccagtatgctaggattagatatattttataaatatattcttcccaagagtctccagaattctcaaatctgtaggttgctacttctgtcaatttttgaaacatgtaaaccattactctttcaaatattgtctctttcctgcctcctctgcccctcttagtcactgctgagtgtcttttagatcacattactgtcctcatggatcttaacttcctttcctgtcccctttgattattttgtgactttatgttagatgacctctgacctttttagaatcatgagttgtctgttaaatgtttcctatttttaatcccttttatttttggctctttactaggctattttggttttttatatgctttcttaaaatcctgcttttaaaaaagaatcatttcttattctctgaaaaaatttttttcttggtcttttgtttctttatacagagtaaacatggttattttataatctgatctgttgattatatttgatagtatctatgcttgtgggtcttttctaactcatgggccctccttttcccctatagtatttaaaatgctatgtattggtcttaatatacatacatatgtacacatatattccatattatacacacacacattggattgagctgaataggaagatgatattgttccaaagtgatgaaatgttctgcccagcattttctgccactgtcagtccagggcagcatatttccaggccaagaaaagtgaacttcagccgtggccacagcagtgagcctctgattacaggcttattgctttcctttcatgtttgtcatgtctctttgctgtgtttctcactgttgatcagaaccagagccatgtgcagcagctatgccacagactgaacattatattctcttgtatgtcctatgccaaaggaattaacctattactttttaattcagcctcatgcaagttctcagggcactggtagaatgtagccatcttctttgtcaggatataccaagaatggcctaatgttggattcctggtagaaacattgcctccctgtgtagctcatgcatgaaggtagttttcacttttttttttttactggcattctggccctccttccaaactcactccagaatggcctatcaagctatgcgtacagaattctgacattcctcctataaaccagttccaaaggcttagggacacacagtcaagtctatcacagcagtggtctaacttcttcaaacatatcttctgcattgtttgcctttcccattagtgtaactgaatacctgacaagaaacaattgtcagaggaagggtttgctggggcttacagttaaatgggaccattccatttaactgaagggttgacagcagagggcaagcagaaacaggaagcccacacatcacatgacatctatagtcaggatgcagaggataggatgtgaggccagctataaaaactcaagggcaccttttcctctggtgaggctctacctcctaatggttccacaacctttctaagttggggaccaattattcaaacatttgagcctatggggcatttcacattcagaccacagtgcctactttttttttttttttttaccgttctgctcatgtcccatgaaactttagagattcttcagtaaggtgtatgactcatactcatcttgtagatgtgattctctagggttccatcataagatgggagctgtctcctataataccttccacactgggtatgttatgtgtcctgatacttctcttttccccccaagtaatgctaaagaagaaacactaccctctacttaggttctggacagcaatttcctttagattaattaactgagaacttcttactctctccccccctctctctgtgtgtgtgtgttttatgtgcatatgtgtgtcagaagataatctgtcatcaccctaagctttgccatgtgttttctttgagaaagggtctgccactggcttgaagctttccagttaggctacactaacagggttatccttgtctctccctctaagactctgagattgcaagcatgtacttcctcatttggcattttcatctggagttttgggattgagcttaggtctgcaagcttgcaaggcaaacattttatcaactgggccatcccaagagaccaggacttcctttttcagaattttaaaaatgaagtttagcaagagttggtctaaatagcctcgttagctctgtcaaaaaataaagcattaataagagtttaaatctagtgagtgttatgtctagtgtcaggggaaaaaagaaaacattatatggagtatcagagaaagcttcaactctttatggacaaagacttgggaagccaggacttttgtaaattcatgttttatacacccttttaatactgctgtaaagttaagcaaggtcagtttgggcttgagttgaccaggttcaacagtagcaatttcataaaactgtacctgacagctttaggttcttggcttcattgtgaagccaccatctttgctcaggatattggacagtcaccataaagagagttcttaacagctctggcctatcagaggcctgggatgtagagatttctatacattgttatctgaggcatatttagaggtaactgccaatgcaattgctactttacacagaccagaaaacaacactggcaatacttgctctcacaaacaacagatgtaattgaaccagatttggttggctctgagaatgccagttgtgtgcatgccagcttgatatctttggcaacgttatgctgagaaaaaggtctttcatcatcgtagatgatgagagtcttcagtaagattttgaatgtacgagcatgcatctgtgacagaacaggcgagaacaggcggcatgcagaaggtgtccagacaggaagaaggaactgacacacaagcatagccaccaggaaagtgacttggaaattagctagtcaagaaaactgtgaaagagaaaaatgttctctgctgattccagaacaggcagacttggaagggggagcccatctgcggctggatctagcctggttatggcccttgcttgcttcttcaggttctagagtttgaggagagggttgcagtttagagagagagagtgggagggtggcctcccagagtctttaatgaagtcagccatgcctcttgcaaagagttccaacatatcggcccttcacatcagcagaacgtttaaactttgaaggaggaagggggccatgaagcaggacctgtgtaggggactgacgtgctcggacatcgttgctggttatgaggctacaaggtcagtttatttgtatgatttcatttactctccatcctaatgcatctttgtttgctgtccatggtatagaactcatagtctttcaggaaagtaagcagggatcggtgatggatgagttcctgggtcttaggaagattctgcatttggtaattgttttaatgcgtatttgatggtctcctgccatcataaccacataaacacttattgatgcttattgtgtatccagctcatcataacagttgatattcataccaccattacatcatactgggtggccagttaaacctagtttagaaaatctacacattgtacctaagttctaaaatgagagtcagagtctgtgtaagtgtaagtggttgtacatcctcgactctcactgcacagaactgcagacaggtgcagctttaaaagtggattggaatggcatgggatttgtctcagtcagggtttctattcctgcacaaacatcatgaacaagaagcaagttggggaggaaagggtttatttggcttacatttccatactgctgttgatcaccaaaggatgcaggactggaactcaagcaggtcagaaagcaggaggtgatgcacaagccatggagggatgttctttactggcttgcttccctggcttgctcagcctgctctcttatagaaccaagactaccagcccagggatggcaccacccacaaggggcctttcccccttgatcactaattgagaaaatgcctgacagttggatctcatggaggcatttcctcaactgaagctcctttctctgtgataaccccagctgtgtcaagttgacacaaaactagccagtacaggattcctaagcatttgggggggggggggggggttcgagacagggtttctctgtagccctagctgtcctggaactcactttgtagaccaggctgtcctcgaactcagaaatccacctgcctttgcctctgcctcccaagtgctgggattaaaggcgggcaccaccacacccggctcctaagcattttcttaagtaagctttgacagtctctacagaaaaacaggtgcctgtcattcttctcttgttgctgagtcatagatataagggatatgactggtgagcctcagtgaggctggaagtgtgtgtgtgtgtgtgtgtaatgtgtgcatctgggtatatgcacatagtcttatttgcacaagcttatggaggccagagatcaacgttggtgtccttttacatcagtccccccatttttttttaacttaaatagctgggcagctcattaattcaactagactcactgaccagtgagcttcagggatccacctgtttttcctccttaccaccagcactggataggcgtgcactgcaatgccttactgaaaggagcatgccagtggaggctggctctgcaggtttatagcctggccccacttctcatagtctttcatagtctgtcccctcctcctcccctccctcttcatctcctcagttcctctctccctcttcccctccccccttcttatgtgtggcagaaatgtgatatctctgtgtcctgcttctgccgccatgccttctctgccatcatgaattctgaccctctggaaccataagcaaaagtaaagtcattcttccttctgttgcatttgatcgtggtatttcatcagagcagagaaattcactaatatggtagggtaccaagtcatgtgtgatcttgacagtactgtttaaaagaaaatgcgttcatacacgtggagttaccgtttcatcgaagttgggttgttcttgtctttctttgctacggaggacttgggattcacttctttttttctaccttacctgttgacgtgacgaatgaaaagacccagtagaaatgttgtgtgttagtggtgagggggttgcttaatattggttttatggaataaaatgttgttaaaagcagtagttgtaattcaacttttttcctgtgaggtggtcaaaggaaatagacaatagcaaataaatatccatggatttgtggctattaccactgccaattttgatattctttttcataagagaaggctggcagcaagagctggcaggatttactgcctgtcctagacacttctctctattctgtagtaagaaaccattggttcttccactcaaagtggatgttttctttcttgtggtttgtgttctttgactcgtgccagaaaatgcctggctctaaatctcagaaatcctgagctgccggcctccctgggtaactgtgttcttttcccaggtgttatttaatttaattaataaatacatttaataaaaggagaggggttatagcaaagaatgcgaatgacagagaggcctagggtatgttaatacatgcataagaatttcacagtgaagccagttaatctggattattaataaccactttttaaaacaatggtaaaattataaagagatgactcactgaactgattatctgcccccatccaacacccatcaatagcaatgggagttgagagcctgcaggatgctatactattcagtggggtccaggtgatgaagttaagaccattctatttattgtggcactaacttcattcattgagaacctgttgtgtgctgagtaataggtataagagatgatgtataagagatgatgctgatggaggaagcactgcgtccaccccgtgtaactgatgtcctggcttcttctttgcttactgtatttctgtctttcctccagaagcatgaactaatggttgaacaccttgagttctgttagacctgcgctacctcactctgcttgctaaattcataacactagcccagccaagttggcctcaggaaaactacttggcgccaagtataggttgggcaggaggcaggtcattcaggaaacaggccatccgcctgcctggggcttagcaactctgcctgggttttaactatcactgctgtagtttcagtaattggtatgattatacgctagccttggggtgtgaggaaacaggaaaagtgttgaggtacataggtggaatgcggctcctgggcctgccagagggctggaatcagctcataaaggcgcagtgctagcccaccagggaggtaagtaggctgagctcagaaatcctgagctgcaggcttccctggggaactgtgttctttttccaggtgttatttaatttaatttttaaagattcaaattttggacagttagggcaagacgcaaactgtgatataccttgacttcaaccccacttaacacagttgagcccagaccaggtcacataaagggagaaacagaagtggttttttgtagtaactaacatttattggtcagtcctcccaactacgattaggcttctaggaaatgttactaagaacgtctgtgtgaggaaggttttcttggttactgcttgtacgttaagggatggccgttcaaggctgtggctttcctgctgcctcttgcccaaagatagttaccgttatcagattgcaacaatggaacagaacaaacaaaccaaaaccaacttgtgcttttctggaagcagtttgggaaagtaagcttcagttatgatgtttatgaggttggagtgaacactataacattacttaaagaatttgaactgagacctttccattcggacctaaagaggcacagcgtggtgataattcgataatattattagcatctgttgtcattaaaagttcctttccctagatttgggcaaagtcctgctcgaagggacgtatttccgattatagtcacgagtgcaacacgaagatagccatctccactttttaaaagtggacagactttggacagtatgttcacactgttgtgtagtcagccacatggtccatctccagagttccagaacactttatcctgaagaacttaaactctgcccattgggcctgactcctggtttcctattctcagtgccacccttctttctgtctctgtggctgttcaaggtgcctgctataagcagaagcatgtagtatttatctccaggataagtatgtggataaggactttattctaaaccaagcattttacttaatttgtcagcggattagaaggagcaagttatccccgtttgaaggaagggaagacaggaagaggaggtggggttaccggttggcagtggaggagctggggtttgagtaggtctggtcctgggtgctgtttttgcccctcatcacacagtagtggcagcaaattgaaacgtgaaaagatgctcatgccacaggcaaactggaatgcaatttaaaaagggttcatgccttctggtttgttctaacacttcccccacctcacttaatttattatacatctttctaggtcgaggcgtataggaagatgtacctcattctgattaatgactccatgttttggaaatctaatttgttaaccacctcttctttcctaacagtagggaagaaagcttcaagggacatttttgtatgtgtacatttgacttgttttgtttttttcaggataatgtttaaatggaatttctggttaaagggtacacattttctgtttggtcttggagctaaaagctgacacacaaccctccagtcaagaccttgccagaggaaaccccatgtgctcagtaatcaagcctggctctggatcatcagtgatcagatcattagaaagccctagagaggtttcagctgggcatggctggcctcaagagcccaaataatcagccaaatgtttaacccgccacatctggccaaatggccaagaacttgagtgttgcgatgtcttttctctggccaaggagaggaagtcgtggcagtgaaaatgaagagagttcttttgtatgaaggctatgatttaatttgttatttttgacattattagcttggttcaattactaattttaatacacttttataagtaatattaatagagaaaaattataaaaatggaatatgatttaaactagcagatgtaatatatacatatgaataattatgtattaatgcatagacatattgcacatgtatataattccagtatatgttagaaatacgttgttcctttaaatgcagaccacttggtggtaatgttttaaagtgaaattgcaataagtacaaatttgagaaggtaaaatagaaaaacggaagaatattttggtgtagttaaaacattttcggtgtaagattctaccatttttaccacagttctggagtctcagtgcatatactctgcttgactgtatttgaaagtttcgtgttagtagtggatgctagattaagcttcctatatccattaatttttttgtttctaattttcataatgcctcacttggtcctcgtgtttgaggcatggaaatcaagacttagagaatctgagaaacttatccccaaacaagggacgtgtataaccatgaggagcgatcatgatcgagtgatgatcctgatcatccacgctcccccctggatgcctcttgctgctttctggacgtggctgctgcatgctagtggccacctcttaacatgagagtttagccatacagtcgtgcaagcatcttacccttggtgggctctggtgaaggcccgtgaaaccggcagttctcacacctcatgggcagtgttattaatttgccaaaacattcattgagaaaaatgtggtttccacagtagacctttcccagctgacgcttaaatagtatcattttaactacaagctattaaagtgtcctcagtcaaagatttgctttccctggaaacggcgtcccctggtttaatttcatcgttacaaagatggatgagagcagattctagagaccttttgcaagtttggaatgcgtgaatgatgaaagttacaacaaaggagtggcagtcccctggagcttttagacaaggctgccgtgggtggagaaataaacatactttatgaacaaacaggttctgcacacagaggccctaaggctgggatttaaatgttgaaagaagggtatccgatgagaaaatatcaagattaaggtattaaaacttacaaaaggaaagctaccagttcttgacggccttaaactaggtgtcacaaaatatatggcagttctggtaagtttcgattcaggagggggaagatacgagaataaaatcgatgtcctaagttaccactgagtattttattgggttctagctttacaaaggccatggccctcaaacgaacagtgttagtacgagggggatgtggtggaggaagtgtcacttcagataggccaggaaagaaatgttctcaccagcagaatgcggaacataggtagggagtatattactgccgaggtcagagcacagagggcagagaggccctccatcaggacagtgtgagaaagcctgttgttgggtggagttcagacatggggaagagagaactggttagaaagccgaccaagctgcgtagagctctgaatcttgtaacagaagcttaatcaggatgcagtgtttgtggtagagcgtgggagcaggatttgatggcgtgacacttcacggtcagcctgattgcagcgtgcagcatgaaagtgtggtttgaggctggtgtctgcagaaacgttgcaggtgaaatgttggctacagtagggtggaggcatttcaggcatgctagagttctttgttcatgaccccttcttttttttttttaaagcagagtggagtagatgctccttagctttgtgctactaggagtagaagggtattatgacaaaaaattgaacagcttcaggaaacttggggtatcatgtgtacttgttcctattgaggctttagcaaatgaagagagagtagtgtaagtcaatccctatctattatcttattgttctgaaagccagaaggtctgctttcactgggataagctcagggtgtccgtgggttacactgcttctgtggccagagggttctagctgctataggctgccagcactccttgtttttttttttttttttttaatcattgttttcttttttttccattttttattaggtatatagctcatttacatttccaatgctataccaaaagtcccccatacccacccaccccccctgccctacccacccactccccctttttggccctggcgtnnnnnnnnnnnnnnnnnnnnnnnnnnnnnnnnnnnnnnnnnnnnnnnnnnnnnnnnnnnnnnnnnnnnnnnnnnnnnnnnnnnnnnnnnnnnnnnnnnnnnnnnnnnnnnnnnnnnnnnnnnnnnnnnnnnnnnnnnnnnnnnnnnnnnnnnnnnnnnnnnnnnnnnnnnnnnnnnnnnnnnnnnnnnnnnnnnnnnnnnnnnnnnnnnnnnnnnnnnnnnnnnnnnnnnnnnntgactcccaactttctggccttcctgccttctcttcagtgacccctgtgattatattgggcccaccaagaatatccaagatactccctcacctcaaagatcatagcagccatgtaaggttacccactgccccctgtttttaaaacagcatctctcattggcctagaactcaccaaggagactgggtgggcagcccagttagctccagggatctgcctagctctagtgtgttaactgcataccaccatgtccagccgttgttttctgagttctgcagagcgaactcaagggtaggaggtgagcatttatcacctgaggcatctattcccttgcactctctcctttcatcatccaatcgtgttcttacaagccccactgagtgaagttcaggcttgtctattcagtgcgaggatgaagaagtaaggtattaaagctaatagaagaataaaagctacagaagagtcaaaggacaacagagggtgacagaaatgtgtttcttccgtatgtttatgcaaataagcaagacatgacagcacaacttttttttttcctgtccgtttgtcaacaatcctgtgttttaaaagttaaaaacagacatgatatgcagaaagcatttttatttagtcaatcactactaaattaactgaacttcttctctgagctttacaagtcctttatcatttgaaaagaaaaattttttttcattgggagtatgctcccattttcctcacatgtgaagaatatcaacctccgaagtagattataagccttttagatgaaaataaaaattataatcttataaaaggataccatatataaaactttatagaatattttctccaaaattttcatttagaacctcataaaattttttctacactgattatatgtgtgtgtgtgtgcatgtattcaaaattttgctcagaatatccactggatcattgaattcctatctaatcctctgccgtagcctccgtcattaccctcagcccggtgttagtctgtttggcagcaagtgcttggatcggtaagactccaagcacgttcgatgaagagatgtctcttcatcatgctcacccgctactgctctgtgctatttttattttacttcagaactctttaaaatcctgtaagatcccatgcccctgggcttatgttagtgtatgattctttcattttagctacacataacatcctgaatagtcccccttaagaatgaaaaaggatgctttgttcatacactgccattgtacttagaaaagttattttaaggtagtatttataaagatttcctgaatcttttattgttaaacatcttatgtaaatcattcgatgcttgcttgaggtatttggtgagtcattcatcaactagtactaggtaggacgacaagatgaataataagattcattcattcattcattcattcatttaaaaagagcctatagtctgttctgcgccaggcctgtcttcttcctgtgggcgctgcagtgaacagagagtgtgttccgtctccgtgaagcttatgttctcagacctcacactgaagcatagagaccagagtgtagatccggacgccatcactcagttcctctgtgagcccaggcaaggcacttcgcatgtctgactcacagtgttgctttttcacaagacagagagaacagtacacactcagagtggaacatggatgaaagccgtgtgccgtagaatgtggcatggagttgtggttctgtttatcattttgtgacaaaatgctacctcctggaaatacagtggaggagggagcatgctagtgttctcatgtggaaaactgagacatcataataagcatttatatcctctgtgtatttcctgtttaaccctttcctacccacacaccattctggtcctccaatgatctgatgtccttcacactcccaacagctaccccaagtctagattcatgtgctctctggtctctaccctcacagtgcaatgtggacgggcccctgcgctcttctgcattcccctgcctgtttctgcttcagcttctcaactccactgttctccttttcttctttatgtcagtcctatatcccagcttcaaagctcaacccatgtcctggtatcaccatggttacgctgctatttcttctcatgtggatttcttcaaaagttcctctctgaactctcgtaggtctcctaacaagcgctgtttattttagctactacccactatttacaatttctcttccttcgttttacacattgaaatgtttgtcttttcgccagctaagctgctacgctctgtaaattgcatgagattttgtggactgattgacagtgggcctaaggaatgtatcgccttccgatgagacctagagagctgcctcgtgctgtctgggggctctggggatgcaagtgcagctgactcttaggtttagtgaagctgatggatgcaaatgactgctacctttgctggagcttaatgccctgtcctgtagagagggaagctctgtcactagcaagccattccaccttgcttttagggaggtttgcagaacccgagcttgggctcacaccaggaacagcatcccaggagagacgagcagctgatggtttgcatgcaatgctttggtaattccctgccctgctcctgacgggcagagtctgagatacttgggagagtatgtgcagggtatagagaggggcttttgtgttagtttgggttatggcccacactttcttctcatgtggttcctgctagggaaactttagaccagcactaggctgagcgctgagacactttgggaaacattaatgtcaatcagctgctcattaagatacaaatgccaacactatttgccttcgaatgattgcgttgtttcttttaaaagatgtttaccttttcgtatttgttgatagtctcctatgtgtgtataatgaattttagccctttcaccttcctcccatttccctctctcccccattctccctcccactggaaccattctttttcccaaagggtctgtcttttactaccatgttgcttttgtatgtagaacccactgtgagcatgggtagcaagttacttccccaagcatgaacaattcatcagaagccacaccactgaagaaagtgacaaattctcccccagtgaccattcacttcctgtagtccctcagggaggcctgtgggggactcatgagtctctccccttagagggtatagaataggttaagtggaagcagtctgttgtcatgggtctttttttttttttttaaacttgacttcctgacctatttccagaatgttctgttcacgtgactatgaaaggatagcctggcagaacagctttggagggaaaatggtgttacaagagagactgctcaaatactccaaaggctcggttccttgcctgcaagcacggaaatactgttttagggccctgctcctttgttagcccacacaattttaaattgaaaacatgggttatgaagttagtataatcatctgtttgctctgaagaaaacatgagtgtgagattcttttatcatagcaaaagtactaagtagatgtcttggtcccttgggaatgcaaggtttttctcgtctccttcctaattctggaattctagtggttgagcactgaggcaatgtctgacatatctctgactcactttcataccattgctaactaagcttagactttctcaactgccacataccaaagccaggtgacaggatgccttcctatataaagacattctgggaccagcccttgggagttctggagacaaggttgcatgtaacccagattggcttcaaacttgctttgtcgttgactatgattttgaaattagcctcctgctttacttcctgagggctgggatcgtaggcttgcatcatcctggctggtttatgcagtgctaaggattgagcccagggccttctgctttttaggcaagcactctaccaactgaactacatccccagcccttatgtgcccactttagaagatgaaacaatatcaattgtgtgttaattacattaattgaaggcttatataggaatgcttactcatttactgccacgaagtaacatgttcacattcctcattggcgtctgtctttgactgcagtggagtcacttcataacatccagaagaaaccagcagactttgttctttttacccccattgcagttgtgtttggcatctacttttgaagttgttcctctaactcagtggttctcaacctccctaatccttcctaattcctgtgatcctttaacacagttcctcatgttgtgctgatgcccaaccataaaattgttttgttgctacttcctaactgtcattttgctagtgttataaatcataatgcaaatatctgtgttttctgaggatcttaggtgacccctgtgaaagtatcttccaacccccaaaggggtcatgacccacagatggagaagcactgctctaaagtttatcccgtgcccagccatcctttacctctttagtgcattttatttttgtttcttccaatagatgtatactggcaatctctaaaactctcccttactgcattccttactaaaagagatcttaagaggctgtttgtaatcatgtctgatatgaacagttacacggtcatgatgctagaatagtcaagccttttgtttgcttttttgttaaatgcctctgctttcttaaaagagctgatggcatcagctgacctttctaagcatcacaaactaacattgattgaggaggtcaagtggcttcattaagagaatacttctttgttcaaaaataaagcacccaagagagaacattgtcaataagagactgtgtaagaacttgagtgcatgacaaactcttccttttggaaaggaagaaagaaacccctagctactcatagtatagtgattaacaaagggtcttcttttttctccctccatctgtactagaaatgtacttttttttttctcatccgaaattcattccttttgtagctgaaacctggcaaagtcaagtggtttattaaaaagaatggggaattttaatgggctgatgatgcccctttatatctgtaaactatatagataatctgtggcattctgagaatcacagacaatacagctataggatcaatgaaaaacacagctcttaatttctcagccactaaagaaagaactcatgaccatctctgcaagattcttatcaatcttatgttccccaatagagcaatagcctttaatttccctgtaaagttatattaagtgccacactcatgacattgaacagttatacacaagctggatcttttgtggggagaatccattaggcttggggagaggagatgtgtggagaagactttcactgggacctggtcatgataatctacttcccttgagattctttgctgcctcagatacaagagaaacccgggcctgaagaggccacggagattgaagtgtgcaggttgtaacagaggcacttgacatttgtaaagcgctgtaatttccaaggcttctttgtaagcactattaaattccaaatcacagcacctctctggtacagaatcaggaattagagagacttcctccttctctgcgtatttctttctacttcccttctccttttcaacatgtagggaaacagggactctgcaagactgagcaaattgggtgagaagtcactgtgtagaaaaatggaaaaatgagaaccaggctgcttgtttgagacgaagagaaatactcagaggtacactggtgcttctctctcatttcctagccacacaagcctgcctctcatttcccttcattctcatgccctcctggacatggaagacagttacagatgcagtttaagagttggtagcctaaggatgcttcctgtgagtcattgctttatacagaagggcaataaattcttggcctttccatattttccctcaggagcttttatgcttccccaaaatgagagtgtagttggaaacagttaagaacaaagaaaatgtcactgtatttaaaaataatcattgccagagtgaatccaactgtgaacttctggagttcattatcttgtcttaagtgatttctgacagtacacaggttagtgactgtccttgccctaaaacatatctttatagattaaaaaagaagataattctacaaagagctagcttgtggatgctcatgtggtattagtacactgttagagacctatataaaggcttcggtgcacttgaagattcagtgttgaggaccctctgttcatttctggaagacagactattagcaattgtctcaagtttcaattctgatatctgattaatgggtcttaggtgagttaattggtgttgctgatatatcagttggatccccagtacaagccagaagtagagttcatacatagacatgaactttctaggaggttaagattctggtagcactgtttgggtgagagggtattgaacctacaacctagggcatcagaggaaaccaacaccactgcactacattccagcccgaaagttggcactttacaagagcatcagatgtatttgtgtacttgatatgaacgttaatttttcttggggaagtgaggtgaatgttatttccttaaaaggagttttgaaagaaggaaattatctagccaaccagtccttctagagtgtacatcttgacttgacatagagataagtcattggatcttaagttctccttaagaacctgcttaaggttcgagtatcattaggactcaagagcttggcattgaaaacaggcacagatttttccctctttccctccaggtgtctgttatctgcaaaggcatatcttcactcccttataaattaatttaacaagggtttaattgctagtaatgttttaataagcagtgtggctcaggacattgacatttttatagacaataaccttgttttcaaagtttttcatatctattagttggatttttcagacagttataaaaatgccagtcttggataagctctgtactcaacttcacctgggagaagtctgatcatacctgatcatacgagatgaatttgcctgattgtagatatagatcagagcttaaatccttgagctaccatatccaatgtaacctatgcacaaaaggctgcacatttaagcgtcctccctgtcttggctagttgtatgtcaagttgacacaagctagagtcattggggaagaaagactcagaaatgagaaaatgcctaaataacatttgcctttaggcaactctatcatgcattttcttggtcagtgattcctgtggagaatcccagccccttgtgggttgttgcatccctggccagtggccctagggtgtacaagaaggcaagctaagaagaccatggcgagtgagccaataagcagcactctttcatggcctctgcataggttgttgccatgactccctagatgattgatttataagctgtaagatgaaataaactctatcctccccaagttgattttggtcacagtgtttaatcacagcaatagaaactttaactaagacaccctcttagccacctcaccataaacactataaatattataaatgacactgtgcctgcctggccctgggtgaactcaccaacttctcattctgagcacctgaaaaagtgttcaacatcattaatcatcagggaaatgcaaatcaaaacaaccctgagattccacctcacaccagtcagaatggctaagataaaaaattcaggtgacagcagatgctggcaaggatgtggagaaagaggaacactcctccattgctggtgggattgcaagctggtacaagcactctggaattcagtctggtggttcctcagaaaattggacatagtattaccggaagatccagcaatacctctcctgggcatatacccagaagatgttccaacttgtaataaggacacatgctccactatgttcatagcagccttatttataatagctagaagctggaacgaacccagatgtccctcaacagaggaatggatacagaaaatgtggtacatttgcacaatggagtactactcagctattaaaaacattgaatttatgaaattcttaggcaaatggatggacctggaggatattatcctgagtgaggtaacccaatcacaaaagaactcacatgatatgcactcactgataagtggatattagcccagaaacttagaatactcaagatacagtttgcaaaacacatgaaagtcaagaagaaggaagaccaaaatgtggattccttcttggaatggaaacaaaatacccatggaaggagttacagagacaaaattcaaagctgagactgaaggaaggaccatccaaagactgccccacccggggatccatcccataaacaaccaccaaacccagacactattgcatatgccagcaaaattttgctgacagaaccctgatatagctatctcttgggaggctatgccagtgcctgacaaatacagaagtgtatgctcacagtcatctattggatgaaacacagggcccccaatgaaggagctagagaaagtacccaaggagctgaaggggtctgcaaccctataggaggaacaacaatatgaactaagcagtaaccctcagagcttgtgtctctagctgcatatgaagcagaggatggcctagtcggccatcaatgggaggagaagcccttggtcttgtgaagattatatgccccagtacaggggaatgccagggccaggtaggaggagtgggtgggttggggagcagggcagggggagggtatagaggacttttggagaggaaactaggaaaaggaatagcatttgaaatgtaattgaagaaaatacgtaatataaaataaaagggaattgttatacctttctcagagcaagggaaaggccccaagcttgctccagatcccttgcatacctctccagaagtaggaaaatctttgtcctaccatctaacatgatgttttcgttctctggaacctcaaaggcagcatgattgcatctaccgatgtgtcatccagagtttggtcatctgtaaatctgtttcatcttgcctgctaatgggaatttatttaaaagtcatccgtccaggttttttggtatctagcaggatggcttgtactcactaactcttggtatggaattaaattgatctggtggctttgtaatgatcatgtatgagtagttgtcatatccactttctactttgctatagcatcgggcagttaactaccacccatctctgccaatattgtgcgaaataccttcagtgtttctgttagcatcgtcctcagacagactctgtaggctcatgtcgattaacttccagacaaacctggaatgattgctgaggagtttgcagttcttctgtcagcttcctcacagtccccgccacccagcaccagttacacatcagcctacatcctatgattcaacgaggcaaattggctggatgcgctctccttcacaaaggtgcataaaaatatcctagtcagctgacagagcaggtggatttcttttcccacccagaatttcatggaagaaaaaaaaaaaaagataagtaaaaagagtgacagcaacagcaacaaaaccctctgcaataccccacagaagcttgcagccaactccaggaaataattttgcaccagcctcaatgtgattatgactctcgatgcaaagacctgtttttttccatgatgctgaatcgtggtttcagttgtattagctggtagtcttatgtgctcatctgctggttgcttgtggacctctctccttcctgaagacagtggccagggatgggttcctgttagtttcctaacctgagccatccccacagcccttctgtcttgtgtttatagagtaagaaattgacacttacttcttaagtagactccaatttcttggccttaacttcctacattaaattcccaattttaattcacagatttctgtttgcatgcatgtttgagcttgaaagtatagaaataggacattttaaatgacttccagagaagggaacataaatgaaataatacttactatctttctaaaccacagaatgacaagcaattgaaaaataaatgccaagttggcaaagttatacaggttctggagatgatgtgtatgctgtgtacgtgttttgatggtgatgctggtgatgaaggaggtgggagttgccagtatcaagggttttgtccaacacgagtgctgaacgtcatttttctttttctcgtttttaaacttcaagggaactgacttgcattcttttattcagatcaaaaactctaggaaaattaagaaacagacttatttaaaaatatatctctaagtgcagctaaattatacatgagacatgtgccttctatagaatttagaacttcagtgtcaacaccagatttctacgtgtgaaagttgttactacctgattgctagaaggaacaacttcaattcagtgtttggaattttagtgaattaaaggcacccagaacgatttacctatgtggacagatgttctataaggaacatcaaagaaccacggtaagcatccagtgttattatacagtgttagtattcaggatttaagctcataattcacacatgttgtttactactagggaagagataagtgtctgaagcagtgtgattgacagctacgcattcacctgaattccttaaccttaggagctgacatcaaggactgggaaactctgatctaatggagttcagagtgatgctaatgtgtttgcatagagggatggaggttgggcttgaccttggtgatcactgtttggggcttagacagtactttactttcagccagacctctctgtcttaaataggtactcaccaatttttttttctatatagccatattttaggaaaatttttggcataatgaagtttacagattatcataaaacaaattacaggtatgccattctataaattgctgttttatgaatatatagttttccccaaactagttttatcgtcatatccatctttagttgcagtgaaccatgactgtgaccttccattctattgaaggaaaaagaaactcaagagttctttcattctttctcagctgtttcttcttggactttgcctatgaatgtcctggtgaggtttgtaaaaccatgtttgttaattatggttcattctgagaaacagaaagtgaaatgtgtccaaagcatacactgagactggagagagctaaggatttgaaaagcctccttctcagaagcgattcccattctatcacagttgcctatggcagacctgattgtaattttagctttcacgaaggggcatttgttaaaaacaaagcagagatgcagatgctggcattgtgctcctctctcgattcccaaatgatggccgtcaggacagtgaagccgttagagcctagagcaaggagtcttgtggtcagagctgcaggtaggactaggaaaaggagaagagacagatgagcaagtcagtagagtagttgtgtgtgctttagtccacaggctgtagccaaatccatctctagagcttaatttcaggatgttattgatttagagtctgagatcagaagttaaactaaaagacttttgatgtatcagtatagtagaaaaatgaggagtgttagtatataagattgaaaacaaaaatacaaggaaaagcccttaggtttcaaaagtaaaacacaccacacacacacacacacacaaataagagcaaaacaaattccattttgtataatagtttttaagacaaaagccacacattttacataattctattttttcctaagggaatgagaaaaaaataactcagttatttttgaagcatatagtaataattatactgtacttgtaactgagaatatacattcagatgtatcaatcaatagatacatcagattgctagagatcttagaaccttggagcataaacaaattcatgttcacaaatatgtatataatatacacatcctttggacttacaagaccctgtgaaatcccgttagtagtaaatcaaaagaacttcatttttaatttgtaaaatatatatagtttcccccaaactagtttacaggaactgtatatcatcatatccatctttagttgcagtgaaccatggctgtgaccttccattctattgaaggaaaaagaaactcaagagttctttcattctttctcagctgtttcttcttggactttgcctatgaatgtcctggtgaggcaaagcttaaagcacttggcaagatagaatcattacagaaacaacacaaaaggaatcaaaaagaaattaagaactcaaagcacaggagatgtttgactctagattgcccgtctgcaccagagagctgtgtgggtggctggaaggtcactgttctccattaaggtcagatccaggaaacctctctttgttttccttatttctccagtgctaagaattgaacccaaagtatttctgattatcgaaaaatctcctaatttgaacaagaagaaatgaagttttgcctttttctgaatactgggaattgaatccctaagtctttttatctattggaaaactttcctatttgcatacagagaatcaaagttattctagggccagtgtttccttgtgtcagttcagcgactacagacatccaaacagtttgattttatgtgcatctgtcccacaaattgtggggttctctgtaaccaccacagcccatgggaagcaagaaagcagtttgactccacagcactaagtcacaggtctgaccctgagtgtcatattttaggcatatttaagaacagtacagtttggcggacacttttgtggtgctaattaactcatgcatcaatctcctggaaggacaaagtcagctaaatgaggatcacatgtaagtaactacagggaaagtcctgataagcccaagtcacaccagacataaagatgggtggtgtagattgacaccgaaaaacaacttggtgataagggtctgggggagggcccaatgtgggcgccaactacgcagttagcacaaaggtcaccaggataaaatgcacatccgctcccagccttctgggcagattgtaggttatgccttcctcctcttgaatgaacagccctgtgtgtaaaagtcccgggtccccttagtgcttatctgtgagcacagggtcctctatgcttcctattcaaaaatctggtacctctctgaaattctttcacagccttctcaaaccatattcaactagtccaaactttctcttcttcctggtcttacctctctttcattattttcgaccacagacatctatttggggggcaggggaataccaattccttctgggtttttgtcaatgtgttttcatattttataatatccttataaatccctataaaacacgtcatgctttattcccatactgaattgtttcccttcattacatacaatgaatctctaagaatataagctttctacctcacattttatagtgttttagcttctttaaaactgagacactctttctagataagcaaaaaaaaaaagagacaaataacgtaaggaaaaagaagatagaaagaaaactctgttagggacaaatattctgtaagggagtcacatcactctctaagaaagcaaagccaagccttgtgttttacatgatagaagccaatctcaatatggttcctctgagtttcaaagttaacccaacttctcctccagctgaaaagctggaagcactctgctataagttgtagttacttaagagtatattatagaaaaagaacattacaaaggcctaattctacactgctataataaagtttgttgttgaaaactttattgggtctgggtatagctctggatgtatgtttgagctgggagctggccaaccaattaaatgtacagcctatgagctacaaatgaagtttatattttttaattgtttcaatttaagtgattataggtatacactatataacacctttgatttttatctttttcatccattgatcttaaaatatttactaattgacttttccaaataagtcttccagggcttactctaggaataaggttttggaccccattctctttcttgattttaggagttattcttactcttttgttcaattctttttctctttctaataaaaaaagtggtgtttttagtacaagtatctgattttatttttatttttaattttacctcagtagaggtaaaagatttagtgcaaaaatattaaaaagtcaaccagttgtccttgcaatatattttaaaggcaaagaagaaagcactgaatctttccaaatttgaaggagccagttctggtttattccaaatgggacatttcctaattattggcttctgttgaaaaacactttggtgactcctttgctctatgtgtttgttctgaatttcaaacatgtgataggaaatcccagttgtctacttgactacatctgaaagcaactaaaatccagcttcttggactgattagctatcagatcttggctttttcatcagtacacagccattgttggaaaggcacattgttgaaccacagcctttaatccactcttaaatatccccttttgagatatatagattcactctatcagttctgctcttctaaagaaccccagctaatacagaacattcaagagagagccagagtcatgatgtgattcctccagtgggacagctgtggacatccaaaatcaggagacctgcatccagcaacaagagccagaataggagacctgcatccagcaagaacagccagaatgggcagagagccaggagcagaggcagtgcagtttgcctgcttgattgtttattttagcctacttgttaagacataatttacatagcatgaaatccatctgttttgagagtgcaatacaatgacttttggcaaattgacagtgtcataccaacatcaccatccagttttggaacacaactcagaaaatataaattgtccccatttgctgttactctgtgtcatttttgactgctagttccaggcaaccagtgacttatattttctccatggatttatcattcctgagaattgcatatagtcagagtcattcaatacgtggcttgtgtgctgacttctttcactcatcttgatgctttgggagtcatcgtgtatcttgtagcttctgtcagaacttgtttcaaaggccacgcctcctttgtttatctattcttcgtggttgacgttagctattattccattgttgaataatagaggacacaagaaaacacaggctttaacatcagaccttgtagacttgagcttggttcccagctctcatgttacttcagtcatgcatgcttgtcccctctgccacatttcctcatttgtctaagagaaaacaacaacttacagagctgttcctgcgtggccaagtggaatcatctatgagaataaactcagtactggctctgtctatacttgtttgatttttgatctaagaatgcaattttaaatacccaaacaaagacaacaggaacagacatgctaaaatggaagggatctcgtggggcttcaaccctcagccaaaacagaacaaaaactacaggcaactaaggaatgctgagagcaaaagaagtaatatttctcagaaaagagttccctaaaacttcttcaaagtccttctcttaggaatcaactctagttgtgattatctgactgtggattcacactcatttcctatatcattgctcccttctttatacatcttcagatatataaaagaaagaaagaagatatgatcagtagggaagctatacccataaaagctcaacaacctggctgtctaaccaagacctgagcaattgtaacacagtggatatcctaaggtagataggagaaatcttgcctgtgacaagagagggggaattagggcccatggatgaggcctgtggtggtgtcctatatcaagtagtcagcctagaaacagattcagcaggttgtatttatatgtttatttatctatatgtatatattacaacagtggttgaagaagaggaagctgtgaatttgggagggaaccagagaatggtcagacaaggggcataaagaagagatgttgcaaaatatttgatctctgaacactgataactgtgtttgaaaacctatttatagttgtggtgtgactcagcccttagcacaaatctttaattccaaataatgaaggtaaagttagtttgtagaaggaagctcctatgtttgaaagtgatgtctaattgagtgggaggcaaagtgatcagagtaagactttacagaataggatatgcccaactcttcccaagaacagagatgagagaaaggctacttgagggagagcaacacggcggggggcgggtggggagagagggcagttttatcagaacagttgttcagagacaggttgtagaaaaagaactatacacagatgaagacagaataagccagagagtgagaaggagccagaatattagaacagattgccagatttagtttgaggccaagcagaaaaaagtgagaggctgagagagaagccagattgaatcagtcagctttgagaggagtttgagccggaacagctgagttgtgtcagccagccagaactagaaagaactaggaaggggtgagcttactcagcagcaagtctcagaggctgaaaatattctaggcctagataagagtgtacagaggctagaagcttccagggcccaggccttggatagcagatgtgggcagtagaccatgaaataattatgttagggaaataaaagttacttctacatagagggagaaggaaaattatgtaattatattttaactaatttttaaaacagcaatacaaaagaataggtttttaatgtttttaatatagagttaagcataaacattgaggggagggacccagaccgtgatggatatgaggagaggggggcaagggggagagagaactgagagatgtaagaactagactattagggctggtgaggtgacttgcaaaaactttggtaatacaagtggtattttttaataatgattttttttcataacacatttatatgcctttatgtccttattcaaaaggaaatgtgttagaataatatatcaggtttcagatggcatgaggagcctaccctctgcccgcatctccatcaattccttcttcactactctaggatttggagcatggacttttccagttagtaacagcctcctttccctgtgctaggaaccaccattttcctgcttgttgtccagctctgttactgccagggccttcagcagatttggatgctgggaactcatagcctattctctgagtttcatacctacctcactgcccagtccctttcccagcttagccacaggagggacaggctatggtgctattgtgaccttaccaacattttcacatcttagacagaaagactagttcatcaaggcaggtaagagacattaaagcaggatgaccttgaaatagaaatcactttttggtataagctagaagtacagatagaagatgtaaattgtaaagacttagatttggagtgatagtccatcaaaaattaagtctttcaattgtcagacccctaaaagaaggactgtaaatattcttacatgtgatattcttgtcatttagtaaatctttaataatatccacctggtcatttgcacaatcaccaacaaaatgtctttgatttgatctccccaatgatctttttttttttttttcctgaaaactgggcaggcattcattagttcattagaaaacaggagtgtgttttacctgtgaagccttgggcatcaccaaatccttatgttcatctttacatcctcagtagcccgtgcactcacatgctattcttgctgaaaacaccacaggtcctggaaactcactctcactgatttttatcctgatcagtcctggagctgtttgtaaaatgaatacaatgtagtagcaattgcaagtggttttgtaacattgcatggtaagtgcgcctataacaactacaaacaaggagaaacaaagtcaagagatctggatacataaatttaaataagaagggaacagaatccctcattccagtgacctgttactcaaccacataggaaggcaggcttcctctgtctcctgtgtctctctctacctgtgatatgatgtatttgcctgggaaccatatttattctgatgagggagcatatgtagccattgtcattgagacatggttagtcatgaaagttaatttcatgcatgccacatgacaactgctaacaaaagtgaacatatatagttattatttagcatgtgccatatgtcccatgtctgtccatcgacttctgactctttcctcatgttctcccctttccagtttgtagaagtactcttactgtcttcattttcagatcagtaggtacatttgcaaggccactggtcggagactgtgtcccatccatgtgtatgaacacagctgctaaagagctggtacttggcagatttaagatataaaattctccctcagagcccaaagatccaattagtcattagacacttaaaggatatattagtcttaaatcaatgttttaagggaaaaaaagacttagtaggtagagaccagaaagaagttcaggaagattataaaaagttggtttggataaaggagaaggcatgaggttatggttgaaaagaggaggaaaagtatcattaactacaatgaaatgtgtatagtcacccaaaagaggcaatcccaggctgtctcttaatcgtaccgcgccccttctgattgcatgcctttctccaactgtcttgtgccttctccgtgcacggaagtgtgctctaattctgaagagtttgagagaagcctctggaggctgtgctgggtctgtgtccttgccaactgtgtcctgatgccaaagcgtctgctgccatcacagggtccgaatcgagggttaaatggtggcgtctaagtgtctgtatgcttccttcaaagtgtgagatccaggttgtggttcagtcaactctactggtggatgcccttcctttcctccttgggctacaaaatgaggaaagaggtggctagcctcaatcctgcttcctttgctctgggagtctctcttgctttatttaaaagagaaaaagaaaaaatatccaacctctgccagtttagctctatataagtaaagacaccgagataatttttggcttaactatttttaaggaggactcatctcttaagaatttataaatattattagttgtatatgtatcgcttattaccaaaacagtagtataacaatgaatttaatgtttcccttctttattctttgtttttactaatataatctcagaatttatcccttgattactgttaaatactttatattgtcccttaaaaacaatagctttaattggacaatgaaatttatggaaatcaggtatatccaagtttatacggcctatttttatcctaaaattaaattctttgggttctctcattttgtatctttgtggttgaaattgacctgagttactttttaaaaaaaaaaaatcaataatatattttatttagctgtagatacatttttcaggatacagtaactattgtaaatgagactcttatgatttgtgtgcatttatcttacatacagaacagcacaccacttaataaatgtcatgtatggaatagccgtttaagaactgttggatatgagaatatattttcagttcctttaccaatgaaaactgccatggctggctatggctttctttggccaagggtgcccattaaagactgtgtggaaatgtgtgcccctgaggatggcttgtttttatttgatttgttgtgctgacatgctctgttttcttacctgaatacaaaagggttctgtatttcatttttactctagaattcaaaactttttgtctgaatgtggcattgaattggtattgtttagaacataattttactcttggatttctaaagtacttttttcaagtgtgtctttggtgattacttctatcgactattcattaatagctccttagaaacgattataattaggttactttcctgaaccccggctccacagccttttttcctcttgatctcttgggattgtttaccatctgtttcagtgactgaatttcttctctgtgtattatctctttttttaattagttaatttttttaattacttaacctttttcatacttttttcatatttttttatttttttcatatttttttcatattttgatcctagtctttcccctcaccttcccacctacacaactccatgtccttcttcctctctgacctcatctctctcctcatgcacaaaataattctaggcttcagttttcagaatccatacaactcttcttcagttttcttcatctaaaatctccttttactccagccgtttttaagaattggtttatacttttgtctttctacttattgttttagaagccctggctttttttttttttttaatcaccttgagaatgccaaatattttccaaaacatgacttcaaatccctgtaggaaatatccttggagagagtgttctgtggttgtgctctttgcttgctacactcagaccagttgttagattcatgccagtattcagctgttctttttgcttctggattgcaaatgatctcttcagatctgctcacagagaagatgcccttggtcctgccctctgtccttttgtttcttagtaaacgttgtctttgaggtctctgacttaatagcaagttgacatttgtaggctatggcctgttttcagtggactcgaagattttcaaataagctatctccaatgccttgttctctgttgctttgggtatgagctatggaagagctccaacccccaggatgcaacattttcaaaaatcatcttgtctcaaaatcttttctgcatctgaaaccaccatgcaaaagtatttcgtcttctttctagttgttataggaagcagcaatcagtacctgaaattgggggattttcctgctgcttcaaaaagcacaggttaggtttctgggaaaggtggctaagagtataaaaaagggagatctacaggaggtggcggggaggaggcagggagggaggatgacgttcctgcttctttgaaggcccatggtttatttaatgttacctttgttcacataaaagatatgtgcgtgcatgagtgtgtgcgtgtgtgcttgtgtgtgtgcctttgtgtatatgtattgtgaagtgtgtgcgtgtgtgcttgtgtgtgtgcctttgtgtatatgtattgtattgtgtagtgtgcaagtgtgtgtgtgtgtgtgtatgtgtgtgtgtaggggaggagaggaaaaactcaggtaccatgtcaggaatgctctctctttaagacatggtttctcctaaggttggggctaaccaattaggctagaccagacttgaccatcaagctacaagggttctgattttcagttttgttgggaggtttattgaattgttcttgccctacaaggactgggcatacaaatacaggacactgtgcccattttttttttcatgggttctgggttttaaacacacatcttcacattttaatcaagttctttcttagctgaggtatcaccctaactttgctaccccccccctttaaatccaattttattcttttactattataagaatccttccctggtcttagaaggagactaaagtcatgtcttcctgtttgtggttatatgcacctttccttacctctccctagagatattttagtgaaagcctggggacactaaacaggcttgcagcaagtatttaaaaatggtaacttatatgaaactccataaataattttttttcatgtttcaaaaggctggcaatttttgctccctgcagatattttgtggaaataaaaatttgccttgtaaatattcattggaacttgttattcaaataaggtaggcaccgatgttcctgtaatagaacccgtgtcttatgaaaactgggtcatgttagtgatgggataaaatgcagacatataaatgacagtaagaattccaatgacttctataaaagttttattatacataaaagccgtctgatcattgcctactaacaatagtcagaattgaaacagctgttataaatcatttaccagagcggttgcaaattctccagaggccagaaaagtaaagcagattcttgcagtgtactggttcaatataatagggagagaaagatactaaaataaaggttaccctaaagcagaccaaatccttgaattatcattatggaaaactactaccttacacacataggactgaggtcaaaggatattgacagatttgtccaaaatgaaaagattccatggtctttatcagaactaaataataagctgcaaggtccattcgagataaaatggagggctctgtgcagtgcttatttggaattcagtatggtgccagcaaagcattacacgagcctgagccctgtgtaactgtctcatgtccggggggcagtcttggttttaggttctaattgagaatttgtataccaggtgcacagaaaactcgcagacactcacccataaccactaagactgctgatcagggatgtggtttttgctgttcacgttgtgtgagtgagccagcagtatgtataggaggacttcctgtgaggattggtcactactttccagtctcattgggaggctttttaaaatgactcctgtctgtttattaattaatcctgcctgtttttgttgtcgtgcttgatctcagatctctgagtcatttgtttttcttcgcatatctcgttaactgaatgtcttcatttctttaacttctacaggtggagattttccttttacctctatgtatttagctacggagtccggttcttgaaacaggtaggcactgcctcaaattccttcatatagcttttacatggctatcggcctatatccagtttttaataggtgatgacttcaaatactgtaacaagtttccaaagaattaattgtacgtttaaattggatttattaaaaaataatatataacgttcatttagttgtatgtctgagatgctttggaaagcggtttgtctctccagtgcggttatgaagtcttcagtgctctctgtgtggttattccttttttggcattagaacttacacccttcagctgatgctatgaatgtgcttagagtttcagcactgcatgtcacatgactggaaacccctggtggctgcagtaggtgtcatcactgtaatcttgccagcagagtttgctgttttaatgtcttgtacgttaattaacaggttgcattatactgctagtggttagttcagcttctctctgacttttttgttgtttttgatgcctgtgttgttttcactcctggcttgctaactgccacatgaactatggtaattaatccttgagaatatttctttatgaggtgtagttatcttttgcctggtgagtgccagccacccttactggtactagtgataaatcagggtgcttaaattcaagactcatgaagatttatcctctcatattcttgcatgtattgacaatagtaacttgacataaaatggaaagttaattttaaaaataccttgtactattaacctccaaagtaatatcagtgtttgtttatttgtttactacaaaaatatctcttaaaaaatataggccaagtaacatgctagtagattatatatattcataaattcataaattttcaaataagttttgttttaaaagtctgaattagcagatattgcctacctgtggaattgctcttatagaagaaagtggccactccccactgttcaagctccttagaaacacttgtcactgcttgttatttccttaggtagctgcttgtttgcttgttatcttttaataagaatatacagttcagggctacctgagtccatttaaatggatgaacttcattcatattcatggcagagaaatctgcaactggcatgtacagacatgcagaaactgcttagtttgaacccttatatgtgtgttttcagacttagagaggagcagggaatgagcataaagcattgtgtgcttacatagagaagatagctgtaggtagaatgttagctgatgtggatccatttgcccttcatggaatgtgaggaccaaggttcgggggttcacgctcgcttctgttggtaagagctgtcaatggtgtaaagggaagacagtgagagccaggatcactctgttgtcctgtccccgcatctcgttggatggttccttttgtcacacatggtaagtgtggccatctggcaccaccacaggaggcatattgacattgatctggttcattctagttcattctacccctacacaaactgaatggtgtgacagtggcttttgtccagactgtattggatcaaaaatggaaggccagtgggccatgcaaagcagtaaagagagacatgtcagtagaatgtttgcttgggaattttttttttcttaaactttgccttttttacactagtttcctttcaggatataacagatgcattaaaaacagtgaacgaccttgacatgttctggttgagttgacttgtattaaagttctttctccagtgcggtctgaacaacagtcatttggaagaactgcatgctttagcttccatcatgtgacacagaattgtgtgtatattgaatcgtgttatcaaaacatctgtacacaactttgcaaatatcctgtcaatcctctgtttcatggtcaagaaagtacaaatttaaagaggatgggtgttatcctgagttaggctaaagttactaaaggtgaacaacaaattaggtccacactgctgtatggtactcctggctttctcacttggccaggcaacatgtaacttccttctctcatcaggttaactaagtctcataaggactaaataaagtccttattccagcttaagtaacttttaaaaagttaagtattttaaacagttttatgaacttagaaaagacaatattatttacccttcttaaaaggagagaaaaaaactggatacatcctcaaaattaaaattaaaatttcataatattgtaaatattttaatagcatcagtacattttaccaacatagctcaagttcacctctgtgttcagcttttcccaaataacatagtacaaaattcctcataatcagtgagcaataaactaacttttttttaaatttctttttgggaaatgtttatccaggcaattaataaattttaaagtatttttttctgctaattttgatttctttttttaatattttttattacatattttcctcaattacatttccaatgctatcccaaaagtcccccataccctcccccccacttccctacccacccattccctttttttttttttttttatttgagaaacaaatgtgttgattattccccaactcatagaagaatgcctggtgatctactgttcagtttccctccatctgacttagctcagacaaatcagccagagctcatcttctagggatgtcaagtgctcactctgcctgaaaagatgcagcacatccagactatgtggcatttcccgtatctaaggaaactattacatcgattattgttaggctgagaaatactcaaatacttcgaagtaagcctaattcagtgtttctgttcacaggtagctctgcccacatgtgtgaatggcagagacaaaaaataaaaataaaaataaaaataatacgcttttgtaaaaggatacctgaagtgctctgaaggcctgaggcctactcacacaaatggacacactttccaggaccataaaataaaccaaacctttgctcagcataagtgtacatttgtaatcccatcactgcagagatggacacaggaggacagaaagctaatgcccaatgtggactattttattggttggttggtttagacttgatcactttcagatgaaagtttttatttggcataacttaaaaaatatttttaaattccttgttttatttttttaaatgcaacatcacaggaaggtaacatacacatatgaatatacataatgaaaattgttaagcatatacctatatatagcttctgtatcaggggcctgataagagagaaaccacaagaagcatggtaagagttataaaatttaggaagaattgattcacagggacccactaaggctatgtaaatcaaagcaactgaatggctagctattgatcacctctatgcagtgatccttgcacctgaacctgagttggcccacagcttcattttgagatggtctgcctatgaactaagggatgcacttagggatgtaattagcttatacactgttgtaagcacctttcctgatgtgaatcagtagtaaacaactctaggactggcttagtgctaccctgaaggtaatgatagcaagaaaacactagtacataggaccaagggatttcagaaaggaacagaaaaacataacaaagcccagtaaactttctgaacaggtcagactccagtctcctcactgtaagtcagatggggttagagctgctgcttgtcctctggaaccatctgagaagctggcttggctataaagaacagatttgactcaaccgaggatgaagaagacatcaatagcagaagggctgaggccataggattggcccatttttaaggcactagttttctgctggtactgtgaatcacagttggcaaacccatgtccctgagcagaaagctggctctgttgatgccttggggtaaagatatgtcactggtcagataataaaagctggaatagaacaggatagaccaagttccttcatccctctgcagcttcccagccccctagtgttctgggaaatcatggagccagcagaagtgtagtttgcaaaatctagctctgagctatgaacaatatctgagtaactaatctaaccacaccatattgtcacttgctgtgatgtgctctggtaatataatctattttactattatcttttacgatatactggttgtaggggctgagaagatagtcaataaaatgtttgtcacatgagctttaggacttgagtttggatcctcagcacccatgtgaaaatcctgacatgcacaatggtgcactggtccaatcccatcaccaggaaggcggagacagtaggatccgtgcactcagtagtcggctagtctctctgaatcagcaggttccaggttcaatgggagaccttatcttaaagtataaaatggaaaagtatagtagaagacaactggcctccatatgcatatagacacatctgccaaagcacctacacacagacatgaacaagcacacaagcacacagcacacagcatacaccaaagcatctgctggttgctctcagtggttatatcagctttgtgaccaaccactaagacttgcagttgaagagtattcttccagagtcttgccattgcctgtgcccttgaatttcttgagtcttgcttggaccatggtcctttctttcatggtatatgtggccatagcatattctgctggtctagaatttcctgttgttctcttttgcttattggtcaacttggaatgcttctgaaatagaaacaaaattgtcatctgttagcttatttgaaagtgaaaatagaatttgaccagttgttagagtggtcacaggataaatggtcattcatttacaagtttattttttgtgttatttttaaaatttttaaagtgcttggacaagtcacttatttaaggaaagccgaattttactttaaacctgaaaatggcccatcatgtgcttgtatcagaagtgtactcaacaagttggggagatgtcctagtggttaaagtccttgctatactagtgtgaggaccagacataaagctagactccgtatagcatgtacatagtaccagtgatcccacagcaagatgggaggcagagacaggagaacccccaaaggctcacaagcacatggagcatcaagcaaaaaggacaccctgtgtcaatcaaggagagaagtgagggcctgaggtccactgcctactctatgcatatcatggcaagtgcccgagctcagactgatgagtgttcaatctctatctctccctccnnnnnnnnnnnnnnnnnnnnnnnnnnnnnnnnnnnnnnnnnnnnnnnnnnnnnnnnnnnnnnnnnccctcccttcctccctccctcccctaaaaatgtgtacatggcttatattattagcattgagagaaggggccttaaagatcaactgtccaaaatttctcattttgggtaagaaaaccaatttcagaagggtaaattcatgtgcctgaggccgaactgggaccatgttttaagttctttgactgagccaaagaaaagttaaaaggcagctttccaaaaagttagcagttcagataattcctgctttgtaatagctgacctggttgatgaagaattccaaggcatttcagtgtggaacacttgggtagatagagttcaaagttggactgctagccttatgcttggccaggtacaaagaacttggtttccattcatgtgtagttatgattttctctgtaaaacctcttcttttttcctctctctcatttttttcctagaaaatgggaaaatgatacttgctctgagatacccaacttaaatatgtatgagactttggaactcttacagacctggtcaaccttcggacatcacattacaacatgatcctgtacaaaatttatgctctagcaccatggtgacaagaaaatataatatactccctacacacacaaacacacacacacacacacacaccttacagtgttttaaaataactctatgattttattttgggcctcattcatagctatccttgattgcatgggccatgggtgagacatacctacatacactaattattgctgattgccaattgggctctgcagggaactgtgatttctgaacctactgtaacctctgaacaggggaattgatgtgatggacagctggggccccctagttagtgacacccttcttgtgtgcctggaccatttctaacaggctgacatactttctggaacagaatttcagatcatacttgaatgctgcttctaccacagtttcctcttcccttctacccacccctctcgcaggctccttcatccagtctgggccttccatttatcccactccattttcctttcttcctgtctgtggtccccattcccagcatagagtatagtgaggagtgggaacctaaggctgctgtgacatagagaagatgctgaagaggtcctgtaaccatgctgtccccaaaggaccattgcagtcgtcatgactaacctgccctctaatcagctttatgactataggcaagtcacccagcctctctggcatttaattattccatctctgaacccagtcctacggtccaaaagagcacctttagctcgtgtttgataatttcagtggagaatctgaaattgtgacaattatggtaaatggattcagtctggtgatacagaataattatacatatgctcgaaattttgacctggaagttcaactcctagaaactcatgctgaagaaagaattataaagatcttccaagtatgaatatgtaaagttatcacaatgcaaatattatctatatctatatggatgtaataaaaaccacagaacacttataatgaccttaatatttaatatcaacagaattatcactacactatcatcaagtgaacagagaggcatgcagttctttgaagataaatctagaatgatccttagtaattgttgagtgaaactgtaaatgaagagaggtctgtgtgtttttctggtggtcacatacatgcatggaggaatgagtaagactgaaggagccctgaagacttctttttagaaggcagaaatatggttaatgtttctgaaaatacctaacatattattatttaaaagctctaagatgtaggaaatagagtaaaatgactacctgaagagaatatgaagttattaacaatttttatatgagaaaatagaaattttaagatggcttccattaaaacaacaaacaaaaagtttacttacttcccaatcacagagacttgagtttggatccttagaacccacactgatgcccaggaaggcaccagagtaaatcccagactggagacatggagacagaggaaccctggagctcactgtccaaccagtgtaaccgaacagtgagctccacattcagtaaaagatggtgtctcaagaaagaagaggtaaattgatagaggaagacactcagtggtaacttctgcactctacacacacattcatatgtgaatgtgcatctgtacatacacatacacatatgtgtgtacctccacacatagacaaatgcatacatatacatgacatacatacatgtgcatacacatacaaagtttagtgtaaaaagtctagctgttcatattgctctcattcccatggccctaatttggggctttctccttaggaaacaaacccctttccatgattgcatcaccaggaatgccttggaacaaccctaccatacttgtagggcagattttgtcctcctgtgtgtgatcctgctaaaactcaagttctctgtatttttgtaggatgctctgtttcttttgtttatttcttaagccagggtcttgctgtgttacccaaggcctctttgaactggcaatcttcttgggttagctttctgaatgtgggtgctatgagctatgggtgatagcccaggctacatttcaaatgtatttatatggtctgtgttaggaaatgactcaaattcttcattctgtgtggtgctttaaagagtgttttttttcacttttttccgtgtgggataatgactgggaggacaactcctgacttagtgaatagacagggtaaaatgtgtgtggctaacaataactacagtcacagtagtgatatagctgacctttagcgctgtgaattctgagtgtggttatcttgttgctcactgaaggccaggtcctgtggtgtatgatgcatttcctcaaccttagaggtaaagtggtcaggcaaattaaccttgttcaggtgttttagggactgagccagtgctgatgtgatggttcatagttaagcagcactttggtttactgttgtgtcttctaaaggacatggaaaagtgcttcccctcaaccccctgtccccagttgtcctactttgaatgcaggcacatctagagagaatgacatctcatgacagctttctgcaggcagccaagcagcaagacttcaggactccgcgaagctggaatggatacgggggagtcaaggtcatggttacttggtccccaaataccaatgattgctctgaccttaaagtatgttacatgcttttctgtaattgtcccaagcattcctgagtctgataagtctctttcgaggttcctcaatgctatatcgacttgtagaaactccaggactgaagggggtgggggtgggggaagaaacttagatttcagaggttactaaaataacactcattgaaatatattcattatgagtcccctaaaggcatggacttctcatgagtctggagcagagcttgattgtgaaaaatattactcctcatttgtatgctgtgacgaagttggctttgcagacttgcgctggctacaggcagtgcctgacaactggatcgcattagtattcatgtcccgtttccatggggaatagaaagtagtagtgcacaggagggctcgggtaattagagatgaagtattgatctgtgaatcagagcccgcacctgcacagtctctctgcattaggaatcagcagcagggacctctgccacacaggaaaatcacacgctgcattcaacacaaaccgtttttcttttctttttttttaattcaactgtgttttactaaaattcaagagctgatggctttcacatacaatggtcatcatgaaatactgcctgatttttccccctccttaaaaatcagctttctgggagaaataaagagatggaccacttgtgtttgtgacaactatgtgtgttctcatggtcttgtctgggtgtgtggggagtgaagggttcttaggccaaggcattgatgtgaatcagacatttctgtgcagccagcctatgctcccatgagagatctgtgtgttccttcagatcatctggtcctgggctgctgctgtccactgtaaaggcgggacagatagctgtttatcctgtgtccttcaaacttcccttcttcattaacgcaaaaatgaatatggtgcttgtcaggggctgacattgctattgtgtttgagagaagactgaaagactgtgagccaaaggttgtggaggacttgggtaaaacagtgcctcctgacataacaggtttactacactcaggattcacagcagcaagaccaacacatgatcaaaacagttaatattccagcatgaatgggaaggtgcatgcagcccccacccctaactgtggagctcttgacatggatgggtgctcagagaggaagagtcatgtatttttagagttgtggtcctggtaggctgactatgctcatctggatgaatcccccgcccattcagaaggcacaggacaaggtacaggagaagaaaggcatgctgcctaccttcagtaatctaataaaaggatcagattcgtctataaatatgatctgactctggtgtgtgaccacagggtggaagaaatctcacatgtagaagcagctttggtcaaagatgcagacaacggaagggagctagatcccactgtggatcaggctcattgcactctgggaaagcccagtatcctgcagtgtctgcagtagaagcttcagacccaggctggggaccagatgtggccccatcaccatcctagcaaacaagcaattctaaacagcagcttggtatggagagagaactcagttaagcacaagcagaaaggacctgggttcactgcccagaatcattgtgaacaagcccagttgcatgcttgtaattccagtaccagagagttgagagacaggatggtctctgagactcactagcaaagagcccagccaacccagcagctggaggtcaagtgggagactctgtctcagaacaagatagacagctcttatggaatgcagcagaggttgatttcttgcgtacacacacacacacacacacacacacacacacacacacacacgtccatgcacacagagcaagagcaactaagatgtaagagtgagaactacagatcacttgccataacttaatatagccctttagataaaatgtggaaattgaaaatgtaatccttaacattggttcattattatggccattccttctctagataaagtatgaattcattcagttactctggcatgacacctgcctttggcagaggagcattctgggtaatatcccataaatgttggagctgatgggtatttttcaaattacactggaaatgctattcttttcttcctttgttttcctcttgacatacatttgaattttctaaagctggttctcagtataaccttgagagctggacaaagcacatgctactaagaaaccgatccagaaggctcctgagttcagggtcaacctgggctgcataacaaaaccccatgctgcaaaacagtcattaagacttttatcttcatatgttcatcatggaagttcttggacattagcccgtgtatcttcaggagctgataatgggtttacagtgatatgaaagccccatgctcgcctctgctgattgtgtggccattttcactgggatatgaaggggaaaacaccatggagaacattccaacattctcgtttgaaactgacaagaatttccagatggtagtgtacaggtgtctgcaatacatggttgcgttattctgttaccttgaactgccgtgggaaaatatattttacagtaatcttaattttgttaagagctgatataaaacttttctactgaaatgtcatatattccatacacgttggctaatagaatatgatatgctcccaagtatatttgataactgtcattgggtattgaggactgcggtgatggtacagatggacctcttggatgagagaggagaagggtgcattgtacaggaagttcagcaaaatggaagttaaggagtagaccaaacttggagcaatgaaggagacccccacaatgaaggattgtttgtagagtcatgggatgagaagaggcttcatgtaatgaaaaataaggcggggctagacgagcacccatgtccgtgatggatcagccaggacttcagccttggtttaggagaaaaatgaagaagttacagacagttgagcctgagcggggaaagggccctggttacggtggaaggaaggaattgcagcagtagaccctgggtgcatgggaagacgtgttggccccgcagctgctgtcgtctgtggcttttgcctgtctttggcttttggctcagctctggagataaccacttcatccacatgagcttcatcttgctaggtacactcagggatggtgggcagaaagccagttttggacagttggcatggaagaggctgaacatgaaaagagaaaagagaggacacaagcctgctcttggcagcttacgaagctacttctgaaaggagagaagagaagaagtggaagtttagagagacttctcaaccttgggcatccagctcgatgggcgagctcttgcctggtgtgtacaaggttgtgccgttcttttgctcttcagcactgcaaagtttaagtacttatttacataagcaaacaaataaagcatctaatctgggcggtggtggcacatgcctttaatcccagcactcgggaggcagaggcaggaggatttttgagttcaaggccagcctggtctacaaagtgagttccaggacagccagggctatacagagaaaccctgtcacgaaaaaaaaaaaaaaaacaaaaaaaaacaaaaaaaaaaacaaaataaagcatctaaagatcttgcccctcccccttccttcttcctccttcccccttccttccccttctcttttcttctttccttcctttccactttttttcctacttcctccagagcatgcctgtttgttgcttaaacacgggggtattgttatttcacttgggatcttttcccactggggtaagaagctgttttttgtccaagggtcccctatacttcatctgaaggtagtgaatagtgaggtagggtacagccttctatttttgggtgccggacattaaacccaggcttcatgcatgtggactgctgtgcctccagtccctgtcacacgctttctcaaaaagcttacgcttagaaataattgttgaatggactctagttctgtggcatccctcggagaagcaggcggctgatttggggaaggagggggaagtgggtagctcatgtcgtaagctatgtctgctgagatctgtactgtgacagtccagtgatcttctccctgggcagaagctcgagttgctacaccatttagaaaggaaaaccatgtcagagaggttaagtaacgtcaggtggtagggatggcacccagccccaggctgtgtgattcttcacccgccctcaccactgtcaaacagcctcccctaagaagggcttggtattgcgtcaagtcctgcagtgccagcctactctgatattatacctctttgccttcagttgtggtgggaggatgggagagcactttatttttaaggaccatttttagacttaaacatgcttagtgtctactaaaattgtatgtgcctagggtttccagaaatactttcatgttttcaaccaagaaaagcttttcttactgtactagggtctagaacgtgtaaaacatatattacttttaatgggaaaggtttgcaatcccccactgcccccactcatagacttagcgaacctgtttgacttgtagtaaccaggatggttgatgccttgaatgctcagatggccatcacaagtatggactgtagtggactcctcccctttgatctttcccagtcctcatggctgtgagtctctcctcttatctccaccccgtgctgtgcagaggacatagcgatccacatggacttgttgcctgcttccatgcacaccactaacactgtcagcactgcaggcagagttgctgaaagtctgtaatcagggcacatcagatctgctctttatccacgtggcagatggtgggactcatgcgatccatattgagaactgagcacatttctaagctagagaataggaaaaagaagtaggaaactgaacattctagaacttgcttttaaaatgaagcaaatgtcccacatactgccttgcccgtgggttgaaactgacattggaagaatgggcaggaaaagtaaagagaccatttgagggagacggtatattctcatttcccactttcttttccgtatctccggagagaaagggaaatttgtagacacaaatgccaaagggtgtcccgttttcctggtagaggtccagaggataaagtgcctgtcactccatttctgcttctctgggcccgaatcactgttaccttccccaaccctcctcttgctcccaatacagacagttggctcaacagcttgctttggttttggcatgaccagcaaatatcagttcttcaagtgcagtggcctaactcctgaagcccatctacagccagaagtttcactaagagaattaattcaaaccctgggtcaagatggagaacaactccctgctccccacttcatacttactgttgcgatctggttgctctggctgctgcattgtctgaatttgcttttagaatgagtctcctacaagtctcctaggtctgtgctgatggccgttacatcatactcaagtgtcgggtcttcagttactctgaaaatctctcacaggagtgctacagctttaaatatgattggttttctcttgttgccaaatagacttgtatatgtatatgtgagtgtgtgtgtatgtgtgaaagtatgtgtgtgtgtatatatatgcatatatgggtgtatgtgtgtaatgattattcattgtcttaaataccatttagactgatatcacactacttaatatggaagtaattttttattgagattccagaattgtgaaaaatactgtgtggggatggtattagggtataactgcatgggagctttgggaaattggatggtgagagaaaaggaagtggggtgtcctatatgtaagtgaatgagaacttcctctctggggcaagtgtttaatatgtgttgtaacttttattaaatcgtaacatttgctatcatatatagcaattctgggtcccctaaggtagggggttcaacttgtcatggcttcatgttttagtcataaacttatgcatagtctttgagtcttctacaggtagcaggttttcttcttcctcctcctcttccttctctttctcctcctcttcttcttcttcttcctcctcctctgggtcatcaccaaccgaaattcagaacggcataaaagtatgtttctagtccgaagtggtcattatattcacattaactctcccttctgtagcggttgaggcagtttcatattcattttatgatttgaggcaagaaggaattccctacatgactttaatatgaggacatatatttaaccccaacccctttccaggcactcatctttcgggaaagtgactgatacccatgttatcaggcatatcataagacaagggcctgttgcagtagggcatcttaggatatcttgttgcttacatatataatttgcatgtagatctcctcccatccctccctctttctctgattgataagtgctctcatgtcattaaaatgtgtagacctgacttttttttaactttatgaattgcacttacattttctggcaggaaacgggtgagtgtggtgtaatggaggaccttagttccagggaagcagttgtcaggtcttccattcttctgtggctcccagcctcgtggacttggtagttcttgctctcttgtgtcagttgacctcttagatgtttacttctgttcaggttagtgaccacagcatgtcctgtaaaactggtgtgccagctaagagcaagaacaagattatgatcgacttgtgcattggctttcacatgctggatgctggttcagttccccactcagtgtctgatcatagaaattaggatgtggagtcaggatctgagcttagatgctttatttttctatctggaaactaaaaagaaaaaagcaagccacatatttagttaatggtctctaagtttttagcccttgactgctaaataaataggttgattggggtatcagaaagggaaaagtttgggagtcgataatttatttttcctttgaaagtttcccttcgattagttgcacatttagtttaatgagatctgagcatttgcaaataggcaaaataatgggaagaaacaaccaaatctatttattctggaagatctggcttttccttctctactggcagactcttgggagccacttacatatcttacaggagtcatgtgtttcctcctgctcatgtcccaggtctcacagaccagcagacactcttgctcacgtgcatggttctgtcatataaaggtgatgaagcgccatgctgagaggagacctagacacctgtttaattttgaggccgactgttggcagttcatttcccacagacacccttgctcctcaggctgcctgttttggtgttgtatagctctgtgaaggcagctgggcaataaatagtgttagcataccgctggaaatgagatttgtgagtatgggggaagggctatttgttgtcttgttttgttttcaaaaactatcattaggagaaaggtcattttttgaagatgttcaagttcctctgaggaaaagaaaccactgatagaatgttttttttttttttaatgaatgactgattttaggtagtgtttgttgaatgactgatttcaggtggtgtctgtgaatggtttctgatggtgtttgtgaatgactgacttttcaaatgaaaccttgaagggaaagagatgtaagcctagaatgaaccccagtagacttaatgtttccagctgcaggtctccatttgagatggggacattcttcaggtagatagctctgacacaaatagtgtgtcatcacagataacagctatcttggtggcatcaggagactgttcatgaaacaagggcatcgctgtgaatgttttctctccctgtgccatgagattatagctggatgacttgtctttggactacacctgagtaaaaagaaaaaatcctgatggctggtgccaacggagccaacgattgtgacacgagattcctggcaatgctaataatgagccaggatttacaaatccctgtcttagccctgggacatggaaaatatttctcttcagtaaatagttagaaatcatccacttgtgagcggctgtcagatcgctctgccaccggattacttattagagagcaagggttctggaatgagttgatgccgaccgatcattggctgtcctgtagaggatctttcactgtatcgtctcattaatgaatttgagagttgagactttggcttctaaagaactaaactctcatactttgaaacgcagatatttttcccctatacgtctcaggaatccgaagacctctgtgtccaggaaaaacaatcagcatcgttactacctatataggacgttatataaaataatttacattttttcgagttaatgggataaggtgttgtgagagtcatagttctatagcatctgacagggcctgtgaggtgcatttcattttaggggtatgtgttctaactcaaaagcccctcgaagcatttgggtggatcatggtagccatacacaccgtgagctttagctctcagttactaggagagtttttgggaaaatttgtttatgccgtgtctcaagtcctattacctgatgataagtaaccaatactaggttttatagggtgttttccttttggaaagcacaaacaatgttctatttcaggaaccctgtggtagagtgtcttgtctggatgttggttaggtaccatctggggtgcttccgtcctccacagctctgcagcacctgtgcactggaaggccacacggtgactcaaggaaagcaaagcaaacagagcaaccacacccagaacagtgacaacctgacagggaactgccagaaaagcccttttgttccttcatatttccaccattatgtccttcattacctttttaatgtggtgacaatcaggaaatgatctccattagaggataacactctctgctagcctatcagctggagaattaggagacgtatgtgaggagggaattataagtagctcaccaagtattaagtcccctatctgtagaccagctctgaccggttatgggcagtggaaagatcccatcagttcatgcttaccagctcttactggcaaacctttcctccccacttatgagctatagaagatgctttgtgtcccttgtcttctgatcatatttcctcccattactcatctgtagctcaggggcttattgttttcctcgagcacatttaatcgtgatattctccattccttggatttagagttagagtctttgtttcatgcatccaaaaaaggcagtgtaaagttgtcaggagtacttagccaagaatcgtcaacacctttgaaaactagagtctgtaaagtgagccagatacacagagcagcaaaagattttaaccctgccagctacccacaaggatgcagtgtaaaaatctgtaggagctgtgctaatagcagtgcgccacactggcacagtgcagtgtatgatctgtgctaatagcagtgtgccacactggcacagtgcagtgtatgagctgtgctggttgcagtgtgccacactggcacagtgcagtgtatgagctgtgctggttgcagtgcgccacactggcacagtgcagtgtatgagctgtgctggttgcagtgcgccagtggcacagtgtggtgttcaggcaacctctattctctttggggttttatgttgctaagaacaagaggataatttaaaaagcattttttaccaagagcattatgaaaatggattggcttgcagatactgctgtttcttttaaataagaatattctgtgctctaataaaacagttgccagcatatcaagaccattgcaataactgagttcctgattataatgatttgcagctgtgatcctgggggccccagtgtatcattcgtggctgtctctatttctgaaaattgtgtgccatttttcattcctgtaaacacaaattctggtttgacagattggatatacttttctcttagtaatttaaaacatcatctaggtacaaatacatgttacacagtctgctgtgttgtcctgttaaatgatacaaaatgatttctaaatttcaaatggtttcttttggttaacacagccccacaattaaatgaagaaaactagggggaacagagcacagtaaagaagagatcacaggggcagactggtgagaaagcaccatggtacaagagaagtgattacaaacagcccctgagaggtgtaaactgcccgactgctccagctctaaagcctttggggccacctctgaagcatgatgtgaacataaagtgggaacaagagctgcagaaatcctcagatacgctggagagagtggtcaggcagagccagcactgtccagatcgggctggagggattgtctgcttcacttgctgcagtgatgaagaaagcctagcatcccgtgaaactgttaggactttggtttcctagcagtttccctcctgcttcagttcccatctacaggagattgatagactgtttccgcctgcttagcactgctttttcttccttggaacacctctgcctttgagcacctggtttttattaatgcttctaaaccacacttctgtgacatacttaaaaaaaaaaaagttccctcaaaggttaaagtgatagtacttttaaagtgcattattaatttggtgagtgattcacagctttcagactcttgcaatttggtatgattaagggttagaaggatttttaaatcatgcaaaagatcataggagaaggcaaaggtagacttgcagtctaactgctactggaaggcaggaatgtatgtttaatttaaaattcagtgtatagcctatgtacatattttggaatccatatcaaattagtttatattaattactatttatttgtatgttatatagttcacattatattatatctttttcatttattacatgataagtatattcccatacctttaaataatacttgaaattattatttcaacaattccattgagataatgtggattcatcataaccgacttaagtattcttgcagtgttagaatatgcaaactcaagaggagaaaatttgtatctttctttggccttaaaatgtgctgagtatatctgtgtgcttacttatctctgactttggatccacctttaaaaggtgtgatagagctacttggtttcagaaccaagttaacaattttccatgtccacctgactcactgatggacccactcaactgactgtcagatgagtggggcagccattttgtttcactctgtggcctcttggggatcactcaccttggttcttagcggacagagagagagcaagctaaacaagccatgctttgtctacaggcaagctcctagacagcacatgagaagaggtatagagaggaaatccctttcaaggccagtgagacgccctgtctgtgcttccctgatccttcctcacagaagagatgctccaagggtgatggtgggctctagagtctatcctaggagtggtgggccagggatcagggagagacacggactcttgatgacatcaaggagctcttgcagcaaccttgagtaacctctttcatactcagaaaatgcctccctcatcttaagcccgtttctttgagctttttctgttccttatagctaatccccacacagttgccaaaatcttttctatactccatcagcatcaacagagagtcctcggcagaactgaacagagaggtaaatgcaaagatgatttttattactgaacaacagtaattcctcaagtgcttgttgtctataaaatatgaaattttacttaatgtattttaattttagatttccccatgctctagtctctctctctctcttcactctctctctctctctctctctccctctctcacacacacacacacacacacacacacacacacacagaaatagaatatggcagcttcttgttaacaaatcagttatccaaacaccaccgtttacttacaaaaggccactttgacatacaaggcattgcctttgtgctggatacagaattccttccatgagcgattgaatggaatgcgcagtatacttaaactataggaaatattgtatgttccactagcaagtgaagttattccataccccacccccataatagccctgatgtcccgtaactggctcttcctttctctgagcactcattactttctcacatcatataatttactttatctgacagtttatttttttttaatttttatctttaattgctctggtgaggcaagtatctgtgtgttgattgtcatcaacatacctacaatagtgactggcagggtcacttaaattcttatagattatgtcacttgctctataacttgtgactaggccatctaactttaaagcctgccctgtggcagagcacttaactagtatgctcaaggctctgggtgtactgagaaaaaatagtgcactctgaattcctatggtatataatttttcaaactgaaggttatttctactgacaaagcattatattaaattagttatgaaataatctggaagctttaggtaaatattattccttaaaatcatgagtgtatgagtgtgtgtgtgtgatatgtgtgtttgtgtcagaggaaaattgaacaggcagagcagagggtcctcatgtgcccctcccatctcatatgcccctcccattctcatatgcccctcccattctcatatgcccctctcattctcatatgcccctcccattctcatatgcccctcccattctcatatgcccctcccattctcatatgcccctcccaagtctcccaataataacattttttgtgtgtgtgttactatgtagtacttttgttacacttggcaaaccattattggaagtatcattagttgaagctggtagcttacactaggacttctgtcttcttatacattctgtgggcttttgcacataacaaatggcatgctgttacattgcagtatcctgcagaatagcctcatgcccagcactgcaaaaattgctgtcccagtgcacgtgtagatataattcttcaactcatttggacacagaccaaggaacatgggttctgggtcacgtaactgtttcttattgggtctttacagtgtgcctgatttgagaagcagtgctggaaagtagctgacattagagctaggcagggatggagccgaaagctaactttctcatgttctgctcccttagaatctcctgtgtataagtagcccgagagtgtgcacagagcatgcaagcattgtttcgcaagggcttaaagtaattctcatgttgtcggaacctgaaagcattcataacacattccatgtgtttatattgtagatgccatgctaattaaaaggtagtttacacaattcagcaatctttgccaattttcagcagtaagagagtatcttacaaacactcggcaaaagtgttcacacatgccacgggaaggcttctgtgtttgccgcactctggcttgccattacttcattttctccttttataatgagtttgagctaagcactatatttccaactcagggtttgctgtatttagcaagtatgtggtccatgctatcctcctggcatttaggaaaccttaaaggaagaggacgctgatttcatctcatgatgtgttggtcatgtgatagcacaaaactaagtgtaacatacttagaactctgttgccctgacaagtgtagagaaatccagctttagcctggccatgtgggggatctcccatggtgcttctcttcatccaaccccgctctcaggctgctgcctcctgagcatcaagaactaaaccctgactcacttctgctggctcctgattttgcattcttgatatgctttgcatgcaggttttcagagatctaagctagctactttccccttttcttctggctaattagctgtttgtaaagtggttttcttttcttcttcttcttttttttttattctcctatcattttctcatctactctctgaggataaaagttaccactatattattcaccctccttgacaacttgggattgctattgagcactttctatgtcccagataaaaaacagaagaaacaaacacacaggtggggagcgtaagcctccattaaagaaccaagtacaggcgcacagagcagttttcctgtactagatctgcgtgccacaggtcatgagggccaaactaaaatgacgagggcaaatgggaaataggaaagagaatggcgatttgtttttgaactttgacatactcttataatgtctttgagtttcaatgcaaagtccaagtgaaaactagaaaataggttgggaatccagactcactctcccctaccccctttcattaaaaaaaaaaaaaatgataatttcaaatcagttacagtaaacctcaggtttcttatgagttcatggctattgctgacctgggtttagcctcctgttggtctctctttgtattcttctttgctaacaagtcactgctaaatacaaatattacccagaactgtccccagttccccaaaataagtttaaaagcagcccactgctgggtatgtttcttccacatgtagccattttgctgcagagacctgattgctagccacaaaaaaaaaaaaaaaaaaaaaaaggttgtctgtgtgtgtctaacttgcagccccatggcttaggctcctcagtattgttgaggttgtacttgtgtgccaccatactggcaaggcataaatggtgtctccccctcctcctcctcctcctcctcttcctcctccaacaagacagcatacacagctactcctttgaatcatagtctaattccctctctgttcgccatgtttagctttaatcattcataaatttaaggtcattagactacactaattgtccttcactgtacagagttcaggtaaattgtgtttattactgcagcacctggggtgctgcaatgctattagacctctttataaacataaaattatacatattcaatatgcctgtgacagatattggaaacagtacaaatgtgttagaaagtcacacactggcatttccccctgcttccgtatgtctcttcttgcttctctcatgtttagtcaggattaagttcagagcatattacagtccatcaacaatcttggtgtcttgaacaataataaagatttatcatgtcaagtaagtctagaatccaatataatggcttcactgtgccatggtttacacagagactttttgtgtgttctaccacgataggataggtttctattttctatattatttcctggtatgaaatgactactgaactctagccaccccatcaaggaaaatgtaggtagacataaatttgttgctagccaaggcatctattgttattattgtgaatgcccacatactgtctcaacagtaagagcagagtcaagaggccctactctctgaaagggggatgagagataccattgtggttttagactcagagttcagttattaaggagagaactataacaggcagttttgcttggggtggacaaaatcaccctcttcctagtgggtaaaatgtgccaattatttgcactgttgactttcccttgtctgagttcctgcaactgtgtggctgccgttctagaaagcgtcttcattaaaacaaacggcagaactacctgccaggattcagtttctcagacgcgtcaggtcccatgaagcagcagatccacacatcctcagcagtgttgacaggaaagcagggaaggcacaacagccaggtcagggaatagcacactgttcttttgagaacccctcaatcacacagtaaggaatttaggtgatgttggcttcaggtctgacatttgtgtatatggctgccttactcacatgatacaggtcagcctaggagttgacctcttgacacatagcagagcctgagatgtccaaaggtcctgctgcagtacagctacatacagtttgtctgggaatctcagttgctgaagtgatgctcagctttagttggattgatggtcctcatggagagtaagtagtattttgctacccatttcttgagactgatagcctctatactccactactcctgtgttatcctgaagcgtaaccgtagaagttatcataacagggttagcttagcacttagcacagttgtatcagaagaaagtctgtatagaaagaggtttttctctcatctcagagtcagagatgagaaggactagtcacatggctgaatatgttgagaagtcaggaattcttcatacagtgctttcagtgtggactaggcttctggctatactgtgaacatcatttctccacctaattcatttccacatcacccccttgactaccgtcttctgttactataatatattgtgaccagagtcatgtaaggaacacagccaatggcttgcatccctagacagtttttgtttttaaaactcttgccgtttaacgtactcagtttcataaacagtcttacgacaccatcatggctgcttttagagagtaggaaatgaagatgagaagacctctgtcttctgaggctgacacggctcagctactaggtaggtctccttactcctgcctaagtctaaatgttctttccaagaactatactgtaaataacaaagatcacacatccaaggatacagctccacatcacaagatgcacacaaacttgtgtgacgtttatgctaattacaagcacaagaatatgaacctgagatcagatccccaacacccacataaaagctgaacatggtgcctcatgcctgtggtgtgagtactaaggggacagagaagggaagatgccaggggctcactggccagctagcctatgcagattggtgtgttcctagttcagcagaaaattctgtctccacaggctaagatgaagaccaacagaggaaggcaagaatgttaacctgtgacttctacatgaatatgcacatgtgagcacacacatgtgctacctggacggatccctgtattagcacactgggcttgcctagttgctatgacagactgccttgccaaaagcaggagaaggagaaaggatctattttgtctcacagtttcacagtctagtcagtcctggcagaggaagcctggcattagaaactggaagtggttggtcacattgtattcatattgtattcaccatcaggagacagggggaggtgacagttagcttgctcctctctgttccgtccagtactcagctcatggaatggtgttgcctgcagtgcacctctgctaaccagacttatgtgtagtgagaattttggtttctttaaaaatgcagatttttaagaacgggttttcgttgttaatcccatgtgtgggatctaggctgcttcagattgtccacggcagctgactgtgatttgactagtgctctagaaggggcatgattttaccagtggcagatagtttctttgattgtgtgatgtttggaattctgggcacttttcccagggtatataaatgctatggcccagaggtatataaatgctgttggtggattgttggttggtggttgatggttgttcgttatggtttgttatatagtcatgtacaaagaaaggagaaaaagaattagatatcctgaacttgccccaaggaactcagagccctcaatcaccaggaagtagtctaatgagaacatctccctctttccccctctatctttttttgtctcctacctagtgctggggggttcaaagggggtagaagaaaaaaagaacccacaaagtagcaaaagcctggctatactcatccctcacaggtgcacccagggtgttatttcctaggtggatctagaatctgtctgtattaaccatcacacaaatgaaagacagcacatacataaaattgaaggtagtaatcagtttccctccatgcctccaaagctgtcattcccaaaatgttcctagctactccagtgatgaccccttccatgtatgcattcctttccatttgctatcttcagagaccctcgtaatagcctctgtggagttttgcttatttggtgcctgctggctctcctcccactggaacatcatatttctctgtggagttttgcttatttggtgcctgctggctctccccccaccggaacatcatatttctgtcatatgcatccttgtctcctcagcacctggaaccttcacagcacagagcaggtgccggaagatggaattttattgaatgaatacctgggaacacttcagaaatgtaatcatcccaggattgagtttgattgtttcttgtgctgtttgttaaagcgctgccatttaaacagatacaatcaaactgataaggggaaaaaaaaatcatgctacagctggcctgctagctccatcttgttagttttggcgcttgtcacagctgccaaatttttctatactttatagttgttttatttcttcctgtttaactgtaattttcctctccttgggcgtcctctttgtttttccgaggacggaattacatggaccccactataaaaccaattgatgttacaataattagatttacttccatcttagcttaagttttgttcatagaaatagcacctacagatgcgtgttcttgttattgttgctgtgctgttagttaaagctgaacgttattagtgtctgtagcccatcatgcttcaaaactgggagtagttcttccaagacatgttccagaatcagaagctaacctgggtaacttctcactcaattcatattagaaaatgtggattttacctcaaccctaactattaacactgagtcaatgatagcaagctacagtctatagaaccacagtggctgggtatagaataagggactagctaagagacaggtagatcttcctagaaagggaaatttacataggtacggatgtatgggggagagtggaaactggaacaggaagatgaagttaggaataccaggagagatagctaaaattaaggaccttttgagggaaaatatggaaacctaatatagtagaagcttcctaaaacatatacaaatatgaaagtaatctaaatgaaatctccaaataacagaagagccagagccccacctcgacatctcttgtcactaaatgaagcttccagtagcaggaatgggttacatataattcagttgttggcctaaagggttccagggaacccccccccccagacaactgaaactattgtcaaaactataagtttatctccataaactggtgataagatgataagaccctactgctaaagacaacacttacacaactcattcaacacagagtagttgagctggtgctcacatagaatgcccatccccccacacacactagtgttcttgctaacagaaggaactctgcatattaccaaagaagaaatggaaacaccaacccagctacaatcccttcaggctccggtgatggcctgcctgcaagctatgctagtgcagtgaaggcacaaaacctgtgggagtaaccaaccaatacctggtgtgacttatgacccactccataagatggaatccatacctgatgatgctggattgaccaagaacttgagactagatagcccaaggacctagggtaaaaccaactgccactgtcctactaaaggaacatagcaataaaatgactcccaatgacattctgctatactcatagatcaatgccttgctcagccatcatcagagaagcttcatcctgtagcagatggaaacaaatatggagaccacatccagacaacatacacagaatgagagagcccttggaacactcagcccaaaaagggatgtctccatcaagtccttcccttctggccttaaggagctctgcagaagaggagacagagccagagagcatgggggacatcaaggagacaaggtgctctaacacagcaggactcacagagcctagggcagcatacaccaggtctgcatgagtctgctgcggatgggatcctagagccgaaaggagacatgaacatattctgcatccgtaacacagacgtaagcaccaaatgataaccactggcaaatgagcatgtacttttctccaagagtctctcaatggcaaaacgaaactactcttaagggtaggcggcctgcccagccatcagtggccagaaagttaactcagcggtacctgtgaaggctccttttcttataagcttatgccagggctttttacttctttctttttaacttttatctctttttgtgttttgttgctgttgctgttgttgttgttgtcgtcatcactgttttcaatacatcctgactgcagttttcccttcctcccctctctcctagatccacactcgtctgttcccttgagagacgagcaggcctcccaggaatatccatgaaacatggcataccaagatacaataagactaggcacaaccctcatatcaagtctgggtgaggcaacccagtaaggaaaagggacccaagaggaaagactcaaagataccccactcccactgttaggggtcccactaaaacaccaggctaacagccatgttgtatatgcagaggacctagtgcaaacccatgcaggctccttgactgcctcttcagtctctgtgagctcctatgagccctgcttatttgattctccaggtgcccttgacccctctggctcctacatttctttattttttatttttttctttttcttttttgtattccttccctccctctctatctctccttcccacctcctctccgtcctcctccctcccccctccttaaccctacaagttctttgcttccggttttgtgtttttataggatttctgattgtgtgagtgagtgggtctgtcttgtgccttttcttgcgatcttttcttctgcctgtttgttttgtcatttgtgtgtgtatttatcatatcatattatattgtattatatattatcttattatcccttagaagcttgttcattttctaatgagagataagagaatcaggtggatgagggggaggtattggaagggaaaacataatcaggatatatattatatgaaaagtctattctcaataaaagaaataaaaaataaaataaacattacaaattgattatccctgtggaattaaaaatattgtcgtgacataaagaaacctctaattatgaaattttagacactaatttgaaaatctaagatagcattgtcatttgactctgcaatacatttctaaagctgaaattgcatggtagcccaaacgagttttctagataatacttcctgatgataacagaataatgtgtcttctcaggtcatttgctaaagctgtttacattggagcctgtaaaatgtcatttcccttttaaaggttacttcatgtatgtaatgagccatgcatggcactttgagtgtagaatgaagccatttgtatactttagcctggtgcctgatagctccagcctggttcagtttcatggactctccaagcattgccagtgtttgctacaataatagccctgcttctcacttgtttgtacaaggaagttctgtaattgatagagtgtgcctggagaaccaggcatctgacatagcagtaagtgcagcccgggggggagagtataagccgaatgacaagaaagcaaatatcaataggttcatattatggagagcaaactcagaagtactctaggcataaacaaaacaaagaagcatttaaaccccagagggaatattccacctgcatggatatagtctgctcagtgagatggtgtgagtggttgccgttctttttgtttatttcccagtaaatagagtgataatttgagataacccattttaatatcatgccagtttcattaatcacccatccattctgtctcattaattttaatagctctttccactcattgatgctttatcacgcattcagaaacactctactgtatttttaatccggcccccttgacatcactcagctgcatcagtctgtcctacttgtaccctgaatcctgtccctttaaaaactcattacacatttgggggagataagaatatgaaaggagagagacatgtgtgattaagatccagaaatgatgatcaattctttgtaattaagttggcagctcaaaagataattgctctatactattaggaaataagtagaatatgaagacttaccactcaattaatgggcagaggttgaccatttgtccttttagtactgaatttgtagtcctttgattaattttaatatctggaagtacctgtaaggaaagggaggtaattattttcctaaattaaaatggaaaattttcatcacaatttaatttaaattttttaaaatctttaataataagcataatatggataagacctcacaggtagaagacacattgagaattagttaccacctttatgattttttttttctcaaatatctcagaattgtaccaaatgggctttttatttcttgattactaagaagtctctgttgtattcaataaaggtaacagctttgtacttcaggacttgttcattccagtagataaacaggtccctacaaaaagaacacagatcttcctaaataagaggtttccttcagtggggacagagttggcaatgtggccagagtatagcaaaacatgtttgtcttttggaagaaaaaaaggagatatgtcatggtccaagaatagagttgtatgagagttctgagtgcttgtgagaaaacaccaagaaattaagacaagagtcttgtgatctcagtttctttaaaacacagaattgttcttggaatgtgtttttgtgctcctccaggtgtaccggagaggagtgagtttactccaactgttattattcatgtgcctctgtgggaaaacatggtatcaccatgtgtggcttgtccttataattatacacttcactcaggtgattcttcttaaccctcgaagtataaattgtcagatgctctgaataaagttggccattgcataagacattagtctgattcatgtttaagcctcactcttccaggttcatgctgtcaactagagcaataaacagagggaaaggtggcattgaaatatagggtcagataaaaatcttagaaatgtctggagtcaactcctttcttcacacacaagcagcctgataggtaaatcgactgacaaatagcatcagctggctaaggccaggctgaacatcaagagtagggcttcagtatctttctggccctcttctttgccatatgtgccaaaacccaaaacaaaatagaaaacagctcatcctagaagctgcaaggccacacagagatgagagcggaaggagcagccatctacccctccactttcacatttatttgccttcatcatattctctgctcatatactgtccatgctgcttgtttggactttgtttcccgcaaatgatgacatcatgatacagctgtctcttaacgtcgatttataatgtcatataaaatacactcctttcatggccatttctaggcagagacttcttgatgaatttagggactatagaactttatccttaataggtttgaatccatgactcctgtgatttggcatagtacttatagactcccagttatggttcccaggcatggcaacaaactagtgtttctaaaaccaagtgaaattccatgtgcaggaagtcaagcttagagtgctctatattttgaaaaaaatggaagaaacagaaatttctgctccttttaatttagtttctttaaagtgttcttaagaggttgatttttccaatattgatggtgtcacagaagtcagagaccttgagccagactcattgcagtgatcatttgtaagtgatggtgtgtgtagaggggtataatgtggctcacactgtgacttgctacagcctccagcttccagggtgagctgttttctatgttttgtgtgtgtgtgtgtgtgtgtgtgtgtgtgtgtgttttattttctttgggggtgagggtatgttgccaggacagagggcagatatcagaggactgggagatgagtgggactggggtgcatgatatgaaattcacaaaggatcaataaatagtaaaaattttcaaaaggtcagtaagtacataaagatgtaaaagaaggtgttttttacttatgtagaatttagctcaaggtaaaattatgtaaaggaaaacaacaataactgtttaaaatcctgatagtgtttaggccaaacagccacaaaggccacttcttgttctctcctacagctaaagatcatctcattgtattttggattatgccctcaacaaaaagagccttcttccacttaacctgattgatttgagtctggcttttgtttgggaaggtcgggggagggttacatcgagctgagtgccctatactattaatgagaccatacatatggtgaatgagatttatttgaatagctcaggggtctcttttgttgtgaacaagggctcttgcagatgggatatatctgtcaccaggtgtgccttacatggtcagagaagagcagcaaggaaagccaccagcgcagtggccttgtgtaaaagccccagtcgttcagagtggcctcagacatctctggttgtcagaggtctagagtccttctctatttgttggtttgccagcctcaaagcagtaattagcaaacttccaggtttggaacccttatatctaacaacatcaaacaattatatagaatcttaaagaaccttctttattttattgacactagaccctgtaatatctactaacattggcttattggaaattaagactgaaggactttttttttttgaaaacttctcttttttctttttttcttttcttttttttattctttagtccttttttacactccagtcttcatccctctgagtctgacttccatcccatacctcctcccctgcactcacccctcacccctgtctccaagaggcagttccccacccactcacccaccccaccagacctccccactctctggggcctcaggtctcttcagggttaggtgcctcttctctgactgaggccagaaaacttctttaaattttaaaagagaaaatctttaaaatttaccaaaataaatcctgtacatttaacacaaataacattaaaaaacctttcctaaaattaaataattggttggttttgtgatgttcttctttagtaaaatgaactagattgttattgctgttcctacagtcagtcaattatgatgtgttgccttagttgaagaaatttaaatgaagaaatctagactcccaagatgcaataatttagtaaagtagaaaaatgttgatgtggctatcaggggatccaaaataggatttcccctcttcctgtgaagtatttatttgatttgaaagtattgtgcaaggaaacttaatcatacaactaggaaacggttgagggaggctcaaattgggatcctgtcgtttaggtctgtttctttatagcttttgtggggtttctcatggcatcttacacagcaccgcttatatcacaattgtgcctggcagcaagaagggatctcttaatatcagtttatttttcacctgcctctccttgctggcttgcatggctgtcactgaggagcaatggctcatagcctgctgtttctctatgcttagtagcttcctggatcactgatggtgagacaaccaataccagagaacctaccaaacaaaacatatattagagacaatttcagttcaattagagaactgaaaagtagtgtgtgttttgaacttttcaaagttaagttagtagagggaaagctctccaaagggccacaggaaacagtttctggaggaggaagccaagatactagagcttagaagactgggcaagctatggggaggcaaacagtggggctccggggttaagacaaagagggaaatagtggctagactgttcagagcaaagaacatggcccggagcggtcagtagacagatgaagaatagactttcttgcatagtcacaggggaccaccaagccagcaacagtctacagtggcaagaggtatactctactgcccagtcagaaatgaggacagagtgctgagttctttcctctctggagagtaaagcatggaaatgggtggatatcataaatgttggagctatgatccatcttcataagacaaggacatacttttattttctctggaaattcccctcccctatctagtgactgctgcccacatgtctgctccatcctaccttataacactctgcagtagagcttttcctcccactataaccttgaaggctgggtttagtgtgtactactttcttgcatcttgtatttatagctgctgtagtctataatgtacttgctttggttgcctgagcaatggcaagattccccaaagatagagaacttgtctatggcgtcttgatgcctgccaaggtgactaattcatgttagctattcagcaaactcatgaaagattgcatgaatacagaggattctatggcagcacagagatgccaaggccgagttggtggttaagagtaaggaagaggttggtaaggaatctctgggcacaagaatgaatataaggctttgtgttaaattatttgctcttattaatcttccattctactaaattcccattctgcaaattcagtattaaattattaataatgtgcttttacttgaaataaccctataaacacggaagagctccaaaggccactatttcctgtgctagctttaaagttaaagctaattatgattattggataatttgagagtggcagtatattattaatctcttaatgctgcttataaatatagagcaaatgtcttttaaaacaccatttgaaacttcataggctagacttcatccaagtaaaacttattcactgcagaaaatggctagatacgataacttgtataatttaatattgatatacaaacaaaaaaatcacccgagaaaatcacttatcagagataactagagagcagctctctctctctctctctctctctctctctctctctctctctttctgtgtgtgtgtatgtgtgtacaatgtagttctctctccatctccacagttactatagtcaaaggttcagccaactattaataaaaataatgcagaagaattgcacatgtagtgaggatctacagtcttcaaagcactagactgtaccacttattcactgagcattttccttggattagacattatgtttagtcttgagagactttaaactatgtgggaatacacataatagtatgtaagcaagcaaatgttgcaccaatttatataaaggtctgagcatctaccgatgtcagtatcctcaaggggtcatggaatcaactctttgtagatattgagcaaatagagggttgtatattctccttgtgatctgattttcacatcaaatatacctgttatactggtcctccgtggcccacatgatgctatcacagctgagataaacagttccatgcatctttgatggtagctcacatgatgttccagctgcaccacctccacccctctactttctccagagctgtgcagatcagctaggctcaggaaggtaaaagctagagaaatggagaaatgaacacggcaactttcatccagtgtaggggatgggcacatcacaagtgttctgaatcggaactgttgtagatgcctgtgaggaagatctgcaggaccttcccgtggatccagatgccgccacctgcagcagtaatcagctcacttcatcaaactatgtcacatgtcctccctcatctgtctttctttctcctaaaacagtctgtatccaattcttcatcccagcatcaacttttaaaggaggccaaaactctgagaatctcaacctcatattgctgataattctatttattctaatctttttgttgttagaaaagaaaaactgtaatacatatttgtgtgtcaaacaccttcacaaagaggcctgatgctttgtggctttctaatatataataaataaataggataaatactgggtcaaagacaagcacattttaaacgctcttgatacacgtttgcagaatattggtttctcttgacactgatgatccctggtattaaccttgttaaataatatgtccaggcactgcaatgaaataaaaattctgaccagtttttttctgtaatacttaatattaaaccataaagatattctatttaaatgttgcatgtccgtatctttgctccactttttcattgtatgtttaagtatcttaggtgtaggagccctttacatattagagccatcagtccttttttgttacatgttataagttgttctaaaactgtattttgattaatttgtgcttcttagtagccagtcttgttggcacttttccttctgtagacattgtcaccatttcctcctctctctagatcactagttcttaacctgtgggtttcgacacctttggggaccaaatgactctttcacaggggttgcctaggaccacctgcatatcagatgtttacattatgattcataacagtagcaaaattaaagatatgaagtagcaatgaaaataattttatggttggggtcaccgcgacacacagaacggtatcaaagggtcccagtgttaagaaggttaagaaccatgctctagatctttcatagtctttctcctttgtcttcttgcgcacgctggactggccagcagtaacgacgctgcaacaggatccttttgtacacgtttattgggtgagcttgattgcagagacgaagagaccccaagcccagaactggtgctgcttatataggcctaggagaggcgtgtctcacacccggattggttatgcactaagcctcatttgtatgttcctcatctgattggctactctctctgtacctcacagagcctcattatcatacctcatttgcatgtctcacatctgattggctactctctctgtacctcacagagcctcattatcatacctcatttgcatgtcaaacatctgattggttatattcccaaagcctcattatcatgcccggaccaggcagtatctttgcaaaaaactttactgtatatgtacacattggttgtttgtccaaacttatgcgtggtggccagcagtagtcagtgccactctgcaacggcacatgtggcttcccacattgtctggtctgtttatccctgctgctgcttctaaacatggagctgaggagtgcagctggatttttgttggtcattgcctagagaaatgtccatcagcactgatggaggtgacccggcctgctgattcttgagcacagccagcacgccaccctgtgacttttagtgtattggaggctttcagttgaactgaggcagaaaacctgaggtctcctggcagaaaggaatgcccctcacattttctcatctttatttctctgataaaaccttcacagaggtcctgtgacctccagagagggcctgtgacctcagggccagggccagggccagggccagtctagagaatcttctacttttgtgtgcttggaagattttcagattattttcagaattgattgcaaaatgtgctgaaggcacatgcaagaccagatctggaagactgggatcccctttaaagtctgatcaatatgaaaagcatatgctgtcccagaatcaagtctaaattacatcttcacatcacaagaactttcaaagctaatacagataccgtgagcttccagggagagctaccactttgctgtgtagatttataatggtgcatctccaggcctgggaaagaaaggacaggatacttcttacattctgcttagtgttccaggctactcaccactgacaagcagagtctttataatgaaagacaattaaatacagtttatttgcaccttttttgaaatatgaaaatgtatcttttcattgttttgaattgtaataaactccagatttgttctcctaaactgatatgacttataataaagtatacaactgagtgtgtatgaagattttcagtatttatataatgtagatgttaaacatcatacacacacacatatacatacatacatacatacatacatacatatgaaaggtgatgctaaatagtaagttcaatgggtatgacagagtgtcagggttagatgtcaatttcccaatgctaaggtgagatgtcacagagggtgaccccctttgcggtgtcaagaaaacatgctaagctttcacagaaagaaaacacagtattatgggacttaccgattgaattcagtgtgaacaaagagagatttttctagtataagttcactgccaatgtggaagcctgtttttttatagtaaggttgaaatgttgcttgataggagttttttcagggtagtttcagcaaaagcagttttgtaaaaggattgtgtgtgtatgtgtgtgtgtgtgtatacacatacaaacacaacattactaatacacattaacttaactcagggattaattactatcttagaattcccatacataatccaaaaagccacacatttattgttttatctgtacaaatgacagtgtatttaggctgtctttcttcagccatgtgagagccaggagagttttgttggtttttccttttgagacagggtctcactatggagctctgactgtcctggaattcactatgtggatcaggctagctgaggactcaggtccccctgcctctgccactgaagttctgggatcaaagatgtgtaccactatgcctgacagaagggagttttgatggagatcggaaactgaaattttgtctctaaaatactaactttaagtataaaccacttacctttcacatctttgataaaacaacacaaaaactcatgttctctttttaattttgaaagaaacttctattccctgagctttggtacttgctacttcttttaaatgtatgtacgtatatttaaatgcatatacatgattatatttttatttaatctttaagcctggtaaactatatactacttatagagtttctctgattgtttaatacttcttctctctttagcctaaactgccacaattatttcagatggtaaagcagtcagaccttaactatttttatgttagattcatgatggggtctctatatgagagatgataccaagaaacatgacattatttactctttaaataaaagttaaaaaaataattatcactcatgtctttgtatatggtctctatacaaatgaaggcttcaggctaagccccagcagtgtccaaggctctgtcctgccactgagattgggtttgttgggggtgaacagatccatagacgcctcctctgggcctctgtataattattgatggatgggcttgctgttcagttggtgtctgtgagcagatgtgcataatgtaatgaaaaatcccattgtactttgtggtttagattgagggtgttaaaggtagtttttcatcttctacaatgcaaccttagtcttaataagatactttgtaagtcagctgaaaatgaaatctgttggtttgtaatttagtagctggtaagcatcatttgggaagtgtggtcttataatgctgtgttagcttagactgttgtaacaaaatacagcggctggctgaaatgtagtcctctctgccctggaggcagcaagctcctaatgaatgtctggcaggcagtactgtctggtgagggcccacttccctcagcagaccatctgcagatggccaccttttactgaattctccacatgctctctgttctgagcatgtgcgtggagaggaaggaagctatagaaaggatctgcctctgatgcagtgacgttgggtcttaaattatcagcatatcagctcaggataacacaaatcactccgtggtaaacgtttagaaattaaaaagaatagtgttaattcactagctgttgaccaatacgaacatggggtgacacagtaaggccaagtatctcactggtgagtgagaacatggggccctccgtgtaaaaggcctggggaatttctgtagattaaacagcatttgagaggtcttttcagtgtaatagcactcagagttattaggtaataaccacatacacaaaaacgtggaatacattctgcatgtctgcccagtgctataattgctcattctttatacctgggggtggggggagaggacctgggggggggaggacagtgcaagagcctgggtagctcttgcagctcactctactgactagctaggtacctctgggttcattactgtaccccaccaaagtaggctctggaatgacactttcatgcgtttgggggtgtgtatgtgtatcacagtagctcagataggatggacatgataggagttgtcttatacagacaatctgaaagtaagccagtcttaacaggacacccatctcaaagccaaaggtggcactcattgtctccctccagtggccatgaaggagtgtgacagacttgcttcccagtcactgttaggagaagcatcccaaagtaactcactctgctcacagccctactgctggaggctagctatacaggggctattttaaaagaggttgggtgagagccactgcctccagcaaagagtccctgctgcaaatggttattagagccatttcagctcatctgtgctgaactgtaaagtaataatgagttgtttagaatcagccattttacagcctatactacgttaccactaagtatgggtcatggtctaatggtgcgatgttcacttgggagcctcagaaatgcagagttcccttccacccccagtcagacgtactgagtcacaatctgtgttttagcaatttgatgagcttgccaggtcctttgcaaatcttttaaggcaggcacctgctagctgtattacattgattactgacaagttgtacatggattaaatgagataatgtgttcaagttaccttaagtctgtcccgagcttagtagcgttatttacacagtcaggtgtgaagcaggaagaggctgctcccgagcttccaaaacagtaaaaattgagacttactgaacttctcagatttttgacctattaaaaataatattttatttattctttgaaaatatcatatattaatatagtgtattttgatcatatctgtcactgttatgttttataaaaagataaggagagaagaaatatgttttgtggatgtgtagtcaggtttgggggaagggggtgcctctgcaggcccaaactgaggtatcccttccccctgagggaccagccacaagagggtatagcatagaatagagtttattcaaggcacagggtgggtagtacagacagagaaaggcggagagagggagtagaggctggccatgagcacatggagagggggcggggagaggaatgggagagaggacagagggagagcaagaaggcaagagaggaggggcaagcagcccctcttatagtgagtcaggcacacctggctgttgccaggtaactgtgacgtagagcctagacaaaatgctaacagtcactacctccccccaaactccccctagttgtttcccacagtcttattccttactttatgtgtttttaaatttttattacatgagtattctatgtcattcattttctctccatttccttcctctaactcttcccattccctctgtcatcctcatggctgctcattccttaattatcattgcaacagacatatatatgcttatttgttggttgatgaagacaatctgatgaggccccttagtgtaattcttatctgtaggtgtttagagatgatcccttaagagcagaacttgtccctggaagggactgattctccctctctccaaaaccattaatgtcagatcagtgtgagatagacctgtgtcctctgcaaagggcagccagatggcaggaccactgaagccatgggtctaggagctgaacatccacacagggaggggcttccgttttagaataaaacatatgttgagaagctgagagaggaagagaagccctgggtgctgggttttcctgtgtcgggtgtcctgcgtgcacacgaaaggatgaccatagttaaagagatctatgctgtgtcatgaagggtagatacactgtgccctgggggcttgaggctgatatttccagaaagctcttccaggcctgctcgaggtctcacacgcgcctgtcatttgcactcgggacctgctgacctgtctacttgagcagaggtgctgaggctgagggaagtgtgtgcaggacataaagttcccctgggaattttcagcaaattgtataaataactttatcagaggtaaaagcaataaacaacattgtactgaccttcaaaatagattttatgctatgcccacatttttaaaacatgcttatgtatgtacatttaaaaataaatctattatttatatctctatcacatagggaaaaaacaaaaacatgctataacttaaaaacgttaatgctgatgagaatttaagttgtttttatttccattcttttctctgtgttttgggccttcttcagtgaacatgtattgtctgtgtggtataaaaacgtaacaactcactaagcttttgaagcttccgttctatttttatatagtccgtctcatttgatcttcatttctaccctgtctcagttcatcttccattgttgcaaagagatataaaggctacatgtatagaaaagcatttaattggaggcttgtttaccatttcagagggtgagtccacgacagtcgtggagggaagcatggtggcaggcaggcaggcgtggtgctggagcagtaactaagagtttactacatggtctacaagttggaggcagagagtataggagggagggaccagaatatgtaaatctccaggtttaagagagatgtacagactagactgggcctagagtgagcttttgaaacctcaaatctccagtgacataccttctccagccaagccctgcctacctccttatgggactcagccaagccccacctacctccgtatgggactcagcattcaaatatatgcacaggacacagtgaccattgtagactacacagtctatttgtttgcagtttaggcaatactgagctatgtgactaggaaggttttccagactgagggcctgcagttacttactaaaaaaaaaaagtaagacaatatcagtggctgttgtactgactaagtgcgttaacatatgtaaataccacgacagtgtgttagacgtaggaaggcctaacaggtattggctgccagaaactcatcatcttcatccctgcgttccagaagtggtgatcagggagatgagtcatcagaagagtctaggtataccaagtgtatagggatgggacatgtactaccaaattgatggctaacaatggatgagaaatgtatttgaggacattgattctgatgtcattggatgatccggctctctgtctcaattcaaatcaatccgtctctagttattatgggtttggggatttgtgtgaatacctagatttttttaacactattttttttatatataagacaaatagttgacattgtgaggaaggatttgtcctagaaacttggaccacaggttgaaagatgggaggtataccacagggattcctcaggagcatcctgctgaagtgaaacctgccagttgagccctggtcaaggcatgaagagagtggctttgtaaatactgaggcccagggggttccagggtaggttgtaccagttgttagcaatgtctttccataagtgagatgggtgatttggtttggaggcacagctgttgaggttggtacattgcaggaatacagctgagtgtgacaagcggaatatataaatctccaggtttaagagagatgtacagtgtgatgcctgctgttttaacaatgttctaaagcatgtaaagtctatttctttgttatttttttccagaccccttggttgtggaatacaagacactgctggtataactacccttaccaggtaaggaagcctgacttctgggctttacagacgaggggatattcctttggtcagctgcctgttgtcaggaaggtcaggtagtcacttatatgtcgatattgcacctggttgttatgcctatcataacctagtgaagacaggactttgtgcattcatactgaggcgcataaccaaagtctagttgctttagcagatggaacaaacctggaaggttcttttgttgaacaagatgcggctggttcctgtttctcagtacagagggaagtctgaaggctgctggcagtgcaggcttacccccacagcagatgtgaacattcaagtgcgtgcggtgctggagctggcccgctgagttctgttgactttgtagcttagaagtggcctctaaagacgtaaatcaccacggactacttctccaaatgcagaaaaaatacactaatgccatcatcacacatggctgaattgtttcagtgaggaaaacagtagacaccatctttgaaattaagtcatagccctgaaaagggagtgttttccgtctctgcccttgctattctttcgcatcttcttatgagttcattactattagcacaagtctttgctatccctaaatcgattggtaatggaatatcaatggtgggaccaggaattttctaggtactcgggacatgtcctgtaagggaagcaaatggaaccaggcattgtactgaacaccttcaggtacatgtggacttctgtgcacataaggcctttctataccttccctgttctccacatagctgcaatgggtggaggctgacactaggtactccttctaggctaagggtgacttgaaatagaactctactttgcatttgaatcccttaatttatttagattgggaatgaatttacataatcagcatgacacagttagaaaaagctgagaattcctaagactgtggcatggaggacagaaaccagccggttaccttaccggttgtctttagcccaactggactttactatccacacctatctacatttctacttgaaaaggcttctaggaactttaactggaaagttggcatgccatccactgcagtgccccacatttcaaaggtaaattttgtaacatgaaagacattgtgatcagtgtcatataaaacgtaccacttaaccttgtttctaactgtaaatgtagccgaaataactcttgcattctgcctgtagctgagaagttgcttggtttcagatgaatgctaggacagtagcccagaatgtcgctgtgggctgttttacagaaagcacaagagtctgaggggctaggagataaggttatatttaaaagtggaaacaccactaggatggaaaggaagatgccccatctgtgtggattcggttaagaatggccttgtgttcgtaaggtatcatagtccagtactgagtaattctgcccagtgctccccaaagtgaagagaaactcatgatctctggcaacagtagttagccgtgccaagagccatatgctaataaaattaatgactttctttgtgtagggggcataggaaatgaaatagcatgtatgcaagtataatactttgtataagtcatatgtatataaatacatacagcagattatagtccagagtctgtctcaaaccttcagtgcacttttaaatattgaacaagctcatgaaattattcattattcattatgtctttaacacatatattatataagtaaccggatagatttctaggtgaaaaaatagtagtgcacttcaattttaaacattccctcttttatatgagagtgtccattcgttacacatgtaagagttccatatgggtgtgtattttaaggataaaagtaagacaggcttatatgcagttgactcttgcacagctcgttacaaggggcatgcgtacacgaggcaggagaagtctaatgcagggatcagggcctcaatagctctgagacctggatgtaaacttttaacctgagttaattgatagcaattttctgtcagctgtataatctagatgaaaaacgagagtagtaattttacagatttcatatgctcagagtgagtcatgggagtgtttcgccaactgcagagcggctggcgagtgctgattactgccatgctcccgcaggaactctgcccttcccatcgtgatctgacttgtcctgtgaccccctccgaggcacattcccagatgaggatgccagaagtcagaaaatctcatcaataccaaatctgacctcagctccagccagggccattttcccagactgcattgctgatagcatttgcctaaataccttgctaatgtctttcagtcttaaagagacatgtcagtgggaagtagatctctttcaaggtaccactgggcactgatgcttccttcactgggccacaggattccgcaggaagaccttgtgaggtccttcatgagagttccccctctcatggcctccctcctgcccagctgtcctccaatctgcacattccatcacagggactatgcagtttaccacatggctttgtagagacaccagctttcagtctatagcaattttccttgtcacttagagtttaaaactgctgatctaacgtctaagcctaaagtacctcgtcagaaatatgagagagacatagtttccttgatgcctgtcctgagtgagtaagggccatcttgtgatagctatccattgcattgtgattggcagatggtgcgtataacattaatttcctttacagtatggagtcttgccttctgaacagtagtctaaatgtatttgaagagctttagagttttgttttagttctttgagtaaaccaagacacttcattatagctcaataaatataaccaagagtagctcatcaaagtgttgttgagaaaacattaaattaaatacacttcactgactttactatctccctgagcctctgaggcagtcagaacaggcattatcttccatccctggcccctgccattttttaagtaactttactaccaagctatggagctgggcctttatctcagacatcctggctatctgcttagtcaagtatgttggcagccttcctgtccctctgatctttaaataaatatctcagaatcatctgttttgaatatagcatcctattgcccattttctaaacatacaactctcttgaacttgtgcttcattgaccattccggaaagcatccatgccacccactagttctgtgctttgaactgtcacaacagctgtcctgtgtgtgctccaggacatgtctccagttgcctgagggatcttgtagctgctgtatgtgaaggaaccgtagaagctgttgttccgttcaataatgaattgaatcccaaactgccgtggtggctaatgctttctgggtttaagatgaaatggaattactgctctcgagctgtggtctgtaggcagcctccagagtactgttgtgtatcagaaaacaatgggactgcatggggttgcatgtgttcagcataagcctggcttaccagtcagtgtgagcctctggcttttgggatacagattgggtttcccgttgagtaaaccttcccattttttcttttcctcagccactcacagctgaccttcactactattacatcctggagctgtcattttattggtctttaatggtttcccagttcacagatatcaaaaggaaggtaagagtcgtggtgttacatgggcttggtttaaggtgggtgaagtgtcagaggcatccctgagctgtgggagctgtggttagcatcagttcctgcattgttgcaggaatgctatctgtctgtgctgtttcatattctcttccccctccagtcttgccgccaaacctggtgttctctattaaccatgcaaacctacagcagcaaagccagtcaaatctgtaaggtgggaatgggaaaattgcaagtttaaggtgaaccttagctatatagtaagggtgagactctgaggccagcctgggcggcagagcactctatctgaaacacccgaatatggatacacaattatatatgcaagttcctagacatacttaaatttacatatgtgaatacaagtatcaacaaagttcttatcttctcgaaattgaataaaaagagaaatttatagcttccaagaaagagagagagagaagcctcaatattaccacatgcacaagttctccacttaaccgaatctctagcaacactgcgcccccttaacatagtccctcatgctgtagtgaccgccaaccataaaatgatttcattgctattttgtaactgtacttttgctactgttaagaatcataaatatcagctgggcgtggtggcacacgcctttaatcccagcacttgggaggcagcagcaggtggatttctgagtttgaggtcagcctggtctacaaagtgagttccaggacagccagggcttcacagagaaaccctgtctcgaaaaaaaaaaaaaaaaaaaaaaaaaaaaacaaaaaaaaaatcataaatatttatagagacagaggttcaaaggtttgccaaaggggtcatgaccccacaggttgagaaacactcatctagcatccactgacaacacagaaacagccttcctgaatgacatgtgctctgctttgcccaactgctcccctggagttgcctgtgctgagagactgtctgcatgagcttctgggccctggatctactcattctggtccctccctgccagcccctggggaggacactgtgtgattgactgcttcccttctccatcatgctatattctcaatatccccatgtgtctatcagaatcacctcctagcatccatataaatgaaatggagaaaggcaggctactacaattatttacatccattgtgtgtgtgtgtgtggacacatgggtgtaggtgttctcgagggtgggactctttctctttccagcagcagacatatacctggctagcaaaaaaaagaagaaggatgaagaaggagaggggggaaaagtctttcctaactatgttaggatacgatcctaacatatctaagcatcagaagtatatggtcccatcaagaccagcttaggcatattgggtgactcattaacacccacatttgtggctcctctggtcttctaaccaagtattctggaaacagtcacagaatccccagtgatgatatctggccggctctcctccatcacgtgaagagcgttccttactctgggaggcagaccgttcatatgatgatcttctccgagccaggttccatattaagctcattttatatttgcttttccagtagctcatttgtcctggtagccacataagtcacacttacatagcacagagatgtagaacagtctttcttttattttattttttttttcaacttgagaaaattaatgctggatgaatcagtgtgtaaatctcttaaggccaggccatgtgagaatgaatacgtgcccagggttgcaaagcaaggtctgaagagtcactctgagagtggacacatttcacgagtgctgccttgtcctgtcatgctcttgacatgagcctcttacagcctcttgcagtgttcctctgttttaggggagtcttcgttggcctggtgatattttggagtgccatctacagctagccacattaactgagcagggaatggctgtcttttgcttctgagagcctagttctagaacattcctattcaaaaggtcactgagcccctccacttgcttgagtttttccattgtgtatataatttgtcttttccacaggcaggtatattggggggaattttccttgttgtaagacaaataggcatcatcttgaccacttttgtaggcagattgctttaaaacattgaagcatatagatagctctttacattttttagtatatagttaagacatcagatagggaacacttaagaaaaatgataatttgaccaggaagtctgtggaattgagcctaagccaatgtattgtcaatgtttaaaacttagttttatggatatttagtttttttcctaattaaaatgcttggcacctctcttattatttggtcagtgtagttttatgtattcctggcatagctggcttattctggtttctacacaaaatgggcacttggccaacaccagacctgtatagtagctggctcaggtgttattacggagccgtttcccttgctgctttctgccattagacactgtagctccaggctaccccttcgcctccctgactggccccacaggtctccagcagctccatacactcctatcatgaggaccttctcttttaaccattggtgatttatggtatgtactggctgccagacacactctccaccttctgtgtgtggaggaattaactcagatgtctgaaaccatcctttcttcatcttgggatagacttgttaaagccctgtgggcagtggagactgagagcggctttgggaagctggctatgtgtgaggtccttaaaggggattattccctcccattaaatcacagcaagccaaatggtcattctaaacaaagaccaggacttataaatgctaagtgaaagtttctttctctgcccttggagtgggagtcttaaacagtttataaatcatttctctcctcagcattcacaagccatttgttgtttttgtttgttttgagacagggaaagttgggctcagatgtgctgcctgagcctgcctcctgggtgcgaaggttacaagttagagccatcatgctcacatttagagatgaattttttactgggttgttttatcaatctttttaaaataatcttgatatccaagagtcatcttcctttttcagcatttttttctaccaagagtctagaacagtcccctaaaagtgagaggagagcctttcaacccttctgtgtattgagaaagaatatgatgacttgttcatttccaaagttgggacttcctgctcagtgggggacactgctattaaaagaagggcaaagacacagtggtgagttaaatatacaaaaaaaaaaaaaaatggaaacttactggagaatttttccttacttttttcttatactttcctttcatttaaaaaaaagaaaaaaggaagttagctaagacaccgtcaaaacttgtcaagcattttcagtccccaacactagtaggccttactgtcctcaaggcttacagtctcctccagttctgtgctctggccacctgttccgagtgagcattcctctgcacatctgcattttccaaggcaggctaataaatactctgttccattcagaacagcttgcttatgtctaaactgtgtgtcccttttaacgaagctgctgtttggctcaaaggcctgggccttcggccaatggccctgctcatgctcaggcctccttggagcagctccagagagcctggctcatagaatctgcctgatgctttcccttgttctggaaggagcactacatcttgtcaaacagtcttgacagagagagatatagtgatgaaatctagcaagaggaaaacttggtgactggcatgtctcctcccttgtaactttttatagaaactttcttgtgtccagtactgtagggctttagctctcttacagagcctacccgtgttccagacctttcctttagagtaaaaggaaatacatcctttaatcccccataaggacccagtgggccatagattgagtttaaaataatatacactaaatacaccatgttcagtagatagaaatgagaccagcactggtgcataataaccaaaatttgaccaaatctaagtcaagaactaaaactaaactagtgttcgtagatttaagtattcctaatcaatcaaaattaatgtggtaatcataaaaaaggagtaagcgaatgtgagcacctctttcgtttcccaaataagaacacttgaaaagcagctaccatgaatcataggaggaaaccctattttagcataataagaaaaccccatcttatactaatggatgatcccttaaattcaccattatgagaaagcattaaggaaggcatcacttagaatgacagtcaaggtctctggggccgcttccttacctgtccagcacactccccagtgtgaccttgaagtggttactttgcctttctgtgtgttggttttctgagcaaagaaaggcgatctcaggcctgccctgagggaatgtcaccagacctggactggttcctggcgcaccagcaaggcgcagttcacgttagctttcctgtggccacctgtgttgtgagtcccagcacttcaggttgtctagaactgtatgactcatctacccccaccaaacacacacagctgagaccagtagactcgtaacataattgatttctattgctcctgcactatttaattgctgtggtgaaaccctccaaagggttcactttccttctatggtgattggtaaaatttgagatggttctgccttcagcctaaagcccctaaatgattgacaagcagactccttcctttacaccatctcccaacagaagcatgccattggtaagaaacaatcattttgtctaaaccactgagattttgggggaggggggctttgtttttattctctattatagcttatcctgatgggaacagctattaaaaatatggtgaaatataatttcctagaactgtgtttgaaaatgatttatcaaaatcagcaggtctcagatgggggtctttgagttcctggcagtcactaagaaaatttcaggatgcctacaaaggcaaaaccaaatagtggcacttagatcttatttgcctttctctatgcacagaaatttgcaaaggtaatagtggacaaagctactggctgcagcatcaggatgctcctgtggtcactgtactctccagtgctatacacctaaggatgagcctgtgtttaatatggccttgaagaaatctaatgacaacccacacaggaccatcacagcaataccccactcccagtaccaacttctgtcttaggtagggttttaaccctgctgtaaaaaacacaaacacacacagaaatacacacacacacacacacacacacacacacacgctctgatcacagtctgtctttggggtcctggcatgagattttactttagagggtcagaaatatgtatagctcagcaattctggtcaaggtgtggagcacaccttgacccaccattgcctcagctggtctctccttcgactgtgtgaaatctccctccaggagagtagtctctcctctgctggtcccaggcttctcccttctccttctcccagcattggattcctggacattctgattttagggaccgttgtttcaacagtctccgtagccaaagtaagtagcacgtgttttccaaacatcttcatttcctggcaagctaagcatcatctcttcaatgctttctgggaatatcaagatgtcccgagaccctgatgtgtacgcatggctgctccagggtcttatctttcttaagagtgatttgaggtggtacctcagattttatcaactaggcctctcctttcttgaaagctaagctctcactgggtggcatccaatggatagaaaatgatatgcatctctcataggtgctgctccctggcactgcgtccctcaccctcttcctcaggcacatgacaccctgaggtttctccttagaactatagtcctgatccaagcctacaccccattcctgcccctcccccagacgtcataatataaagaagaaaatgtaactcatttgaataagctactatctgccctcaaaaataatctgcagggtaaatttgtgagatttttggctttatctcccaactcaacatctacatgcctttttaaaagcattccagcctttgatccaacagttactaatcccattcctcctcccccttgcctctgagagggtgcccccccccaccaggcctcctcatttcctggggcctcaagtcccttgaggattaagctcatcttctctcactgaggccagaccaggcagtcctctgatatatatgtgccaaaggcatgggaccagccctctgggagctctctctctggtctgggttagttgagactgctggtcttcctatggagttgtcccctctggctattataaataaggctgctatgaacatgttagagcatgtgtccttatggtattgtgggcatcttttgggtatatgcccaagagtggtatagctggattttcaggtagaactatttttcaattttctgaggaactgccagattcattcatttctagagtggttgtaccagcttacaatccctccagcattggaggagtgttcctctttctccacatcctcaccagcatgtgctgtcacttaattttttgatcttagtcattctgattggtgtaaggtggaatctcagggtcgttttgattttcatttccctgatgactaaggactttgaacattttttaagtgtttcttggtcatttgagattcttctgttgtaaattctctgtttagctctgtatcccatttttagatttggttatttgggttttcggaggttaaattcttgaattctttatatattttggatattagccctctatcagatgtagagttagggaatttttttttttcccatctgaaggctgccgttttgtcccattgacagtgtcctttgccttacagaagtttttagtgtcgtgaggtcccatttatcaattgttgatcttagagcctgagcttagagcctgagccattggtgttctgctcaacaaatcccccccacccccacccccttggccaatgagtttgaggctctttcccactttctcttctattagattcagtgtatctggttttatgttgatgtctttgatccacttgggcttggagctttgtgaaaggtgataactatgggtctattttcattcttctacatgcagacagccaataagaccagcaccatttattgaagatgctttttttttaccactgtatgtttttggcttctttattgaagatcaagtgtccataggtgtgtgggtttatttctgggtcttcgattctatcccactgatcgtcctgtttgtctctgtttatcactgctgctttgtcgtacagcttgaggtcagtgatggtgatttccccccagaagttcttttattgttgagaattgttttggctatcctgggattttttgtttttccatatgaagttgagaattgttctttccttgtctgtgaagaattacttgtgttggaattttgatggagatttcattgaatctgtagattgcttttgtattttgttgaaagcttttcagcatgtattgagatgattatgtgactttttttttccttgaggtcatttatatagtatataacattgatggattttcgcatgttgaactatctctgcattcctgggatgaagtgtctttgatcgtagttaataatgatggttttgatttgttcttggatttgattcgggagaattttattgagtatttttgcattgatattcataagtgaaattggtctgaagttctctttctttgtttggtctttgggtggtttagatatcagagtaactgtggcttcatagaatgaattcagtagtgttcattctgtttctattttgtggaatcgttttcaggagtattggtattacctcttctttgaaggtctggtagaatcctgcactaaaaccatctgactgtaggcttttttgtggggaggggggaggttaatggctatttctatttccttaggggttatggaaatgtttagatagtttacttgattttgatttaactttggtacatggcatctgtctagattatcattcatttcatctagatttttccagttgtgttgagtataggcttttgtagtaattctgatgatttttttgaatttcctcagtttctgttgtaatgtcttccttttcatttctgattttgataatttggatactgtctctgtgtcttttagttagtttagctaagggtttatctagctccttgattttctcaaagaaccagctcttggttttgttgattctttgtttccaattagttgatttcagccctgagtttgactatttcctgccttctactcttcttgggttccatgagaagaaagtatattctcttgttttggggtgaaatgttctgttgatatatgttaaatccatttgctttataacttctgttagttccactgtgtctctattctgtttgtttccatgatctgtccattggtgaaagcgaggtgttgaaatctcccactctgtgtgatatgcagtgtacgttttgagtttgttttatgaatgtgggtgtccttgcattaggatatggatgttcaaaattgagactttttcctggtggatttttcctttgataaatatgaagtgccctttcctatcgcatttgataagaatggcaactatagcttgtttcttgggatcatttgcttggaaaactttttttcagcacttttgctctgaggtagtgtctgtattcatcactgaggtgtgtttcttgtacggagcaaaatgctgaattgtgtttatgtatccagttttttttattggagaattgagtccattgatgttgagagatattaaagacagatgattgttaattcccattatttttgttgctagaggtggtgttatgtgtgtgtgattctcctcttttggatttgttgtgaaatgtttaatttctagtgttttcttgggtgtagttaccctcctggtgttggagatttcctcctagtatcctctgtagggatggattagtagaaagatcattgtttaaatttggttttgtcatggaatagcttggtttctccatccatggtgattgagagttttgctgggtatagtatactagacgagcatttgtagtctcttaggttctgaatgacatctgtccagaatcttctgactggcctccttggaggcaggtagagctctgtgacctgggttagaaccagtctcctggtaggtaggcagtgctatctctggttaggatcaacctcctgagtctctggttagagaaggcctcctgtgaccgtggttacttcagaccccctgggaggcagacagactgtagtgtgtgagagggtattgggtccctgatctcacccaggtggggaagcagctctacatgcatttttaaagatgaagttatctttcggtctttgattcagatgtctggccactggaaagattgatctgcataggtacaggagggtgacaagaacttatgtgctgctgtattgcccaaggacccatacctgggactgtatatcctaagtcttgggcctcagctagatgtctgcctccctgggtgtgggagaatcttctgttccttatgatattctcttcaattggaagttgttatttggtcttctgggggaattcctctcaagtcattctagagagccagaaaaatctccactctgggtcattgtagttctaactatcctggactaatgaccccattcagcccctatccttataaataccaacaagccatgcttggggctttgatctccctggaagcactgtgcctcaggcccaaggccactccttgcagcctggctctcacaatgcccttgtcatctcccagggacagtccttgttctgtttgtccctcacctgatggtttctcctaaccaacacctctgcctctttacagtcacccttccccttatatttgtccctgagaagctaggagtaggatattcaccagcctgaactccagactgcatggaactggctctagcccattgtcacaatgtgactttggagaacttgatgtctaggtgcctcagctcccatctaaaaaaaaaaaaagagagagagagagagagagagagagagagagagctctgaatattgttttatggagctgccatcaggaagacatcacagcttcggagcttctgcacatgaaaattagtagtcaaattagaaggtacttaggcgtttgctaggtattcattgcaaatgtggggtttagaaagaggaaatatgcatactttctacgccagctttgaggaaatgccacagctagaattcaggtgtaggagcaggtactgggatggctgaaggaagaggaacaagaagaagatatggttgctaactataagagctcccctgaactctgcccaacagcttacagcaccatccccaactgtttagcctggagaagatattctccaccctctatgtgaagcacaaaattgagtctctgattgttcattgtcattgggcctcaagactttgggagtacctatgaagatgctggctggagtcccatcaagtagctctgattttagttgagcacagtctgccccctactgatggtgttggatgctttcaggttagatgggctttgtggttgagctcttatagggacctttgcagaaaatggagagattcatttgtgaactaatggagttcttcagacttacataaactatatttttaatacctcagaagtgaccttttctcatttaaattcatgcaaactaatatggccaggtcaagggtgatttaaacagaacctagagagtccattataaagaccaggtagttgcatgtagacaacttgtgagaaaaatggcatatgtgtgtttgaataaacacactgatggcatttgaaatcagagggtttgagagcttgcttggatggagagaggtggaagactgaagactggctcagaacactgcaaactagcaccatgttctgactaccccctccagaagtgattggtagcactatcatactgtttctgttggcacaaataacattttattgtgctcctttctaatgtaataaaaaatcaattaaagattaaatattaactaatccacagcggacaagattatgagttctcaatcttgaaagggcaccataaatgttgtacaggagaaagatcgggtgaacagcccttacacagcagttccctgcctcatttatatctttttccagaagccataaaataatggtgcttctagcaacagagaaaatgctggccaatctggacacaccgctcctgcttttagaagctggagaagccattgctggcctttcagttgtctagaagttgtagttataatcgatcatgacctttgatgagggtgcctttcagagctccttatggtttatatgaatttcatgagcagtattaaattggtttggattgcttcagaagagctgtgaaaattaacctcttacatatcctttgccagaatcaagtaaggcagagactacaaacctgctgcgttgcataactgagtttctcacatgatgccctttggcatgattctaaaacaagggtcatcaaactttactgtaaggaccaggtagtgttgtaaagttgtaggtgctttctgttgcagtttttcaagtgtgctaccagagcaagaaagccatgtaagacagaaaggaaacaagtgggtgcagttagggttttaataaaactttattcataaccacaattctgacagtttctctatctctgctttgaagtagaataacttatgagccttgaaggaaaggaagaggcggaagagtggggagagggaagaggaagagagggaaacagagatagagaaatcatacaatgtcaattgcaaactctgctgttgtcctgtttctaggagtcttagaaatctgttaaatgggtcgtaagtacctaattgctattctttgagcaaaattacaagttattatttatatgtattaactttattaaattcaagacaacatacattttctttgcatctgagcaaagtcttttctactgtcttgatttttagaagtatttacgatcttcgctgtctatgaatgtttgtcccagccctagttagaatctcagaagccttactccttttttttgaggtagctcaataatacttttttcattcagttcattccaaataaaaatttaaggaaaaatttcttacacatagaaggagtatatgtgtatggtgtagctttttatgatgtaattttatcttaataaaggcaggtacattgagatgaatttgtggtccctttacaaggtagaagataacatttcaaagactctaacatagtaaacttggagggagctgtgttatctagaatctggcacatatgtcttagtgagtgattatctctttggctttgttgtgctaatactttgttgtttataaaattcccctagagaagtaaaggttctggttcgttttattttgttttgttttgttttgttttgttttgttttgttttgttttgttttgttttttaatagtgggggactcgagccaggcatggtggcacatgcctttaatcccagcacttgggaggcagagacaggaggatttctgagtttgaggccagcctggtctacagagtgagttccaggacagccagggctatacagagaaaccctgtcttgaaaaaccaaaacaaaccaaaccaaacaaaccaaaccaaaccaaacaaacaaacaaaaaacagtggggggactctgtcttactaagttttgccattataatggatggcttatccttgaattcttttatttcagagtttttctactggaatttgggtcaaaaccacatctggttcctttttttcttgtctctgataacatgtgaggaaccactaacaagatggtggggtctgtgggaaacgccgaggaacacagagggaactcttgaggacgagcgattctgtcaagagacaaaatgacattacaggtggtttgggtcactgctgaggccagggcgcttctggtgcttgcaatcaagcactaacccaaaggccaaccatggagcccaggctctcacatgatttctcctgcggaagacggtttgggaaacatcgtcaacctgaagcctaatattctgtgagccattgtgtctgcaagcacactatcatttccagcagtaacgaacgggaggatggaaactctcctccctgtgcagacacaatccaaatggacagcttttaaaagcacagttatttggatcaaactcagtgcctactcaaagatacgtgctgggtgacaggatgtgagtaacaggcgattgtgagggattggactgtgtctaagaccttctaaagcacaaatgttaaagaagaccattatctccgcctttcctgttcgtatagataggactataatggaaaccagccctctgctatggctgcctctgagcagcggcagtaagaaaacactttttttctttttttagaacaagggatttacagtcaaagctcatcttcacaaagcaaattttatctgaaaaacaaggcttttatttttgaaggttcctcgtgattctgacaggcattgttgttgacatttctatcagatacaaattaggatatttaattgggaagtggccctaatcttccataagtgctttaacaatttatatttattcatctcgaaattaatagagaaaaccttttgttctctttcttctaaaaagctgagagctgccatttggggctgaaccgttgggagggtgggagcacctaacctaactggttttaggtattcagctacttagatgtcaaaagctacctggtaaggataggtgactataaactcactgagttcctgaactatgcgttttgatttagtcctgtgtaagactcggtttgacatagcagttgatgggttagggctacttcagttcggctgctgttctgaagtgctatgtgtggtaaaacacccttctccaggtcatggggagcagaattcatctttcattggaacacagcagcagggcagtttgtattgtctgccagaggcctcttggcatcatctgccttttggcatcatctgccttcaataggaaggctccggatagtgtaaagattcgctagtgttttagtagcttcaagaacagctttgttgtgcctgtgtgcaattcctcacacaactcagtgtggtcatcatttctcgtctgtctgtgaggtaagactctgggtctgaggaatgggggtggcctgggttagcaggtggtgtgactttgttctgtttggggatgaagcactaacagaggcaagacagactgttttcctgccaccggtggccaccgtcagtgctgtaccactagtttagagactgagtccattgaaactacatcactgtgttttaattattaaatacctaacctcatggatggaactggcatatggtttagatctcagagattgacctaggtgtgaggttatcaatgcaaccccttcctgggatccaaaatgatccttgagcatcttcaccaaaaggaacacaaagcttgtagaagtattagaggtctcaagggtgacttttagaaatgagaagcagagtgacaccaacagctcctgttgtaaaaatcagaggggaggtgggggtgtttgacaggtcggtgcctgctttgcctgcatacgcatgaatgagtatactttcttaaatctctaagttagacaggtctgaaattagttgcataaagacttcaggggtcaatcactggagctattaaactgagaattatagaattgacagctaaaaaaaaaagatctaatccagcatcttaattgcaagataaggaagttgatgcctttgccagaaattacaaagctagtgagctggaacctacattgcaggtggcctctcacgtagtgtgcacgtcgtaattaaactaagtaagagtcagaaagtcattaagagtcatcatgttgggagttcctggtcataactttcttgaaattgcctgttaacatagaaatttatttaactgggagttgggcatgtctaaagagcagttgtccaactgacttaaactagaaacaactagaaactagaatttaggaatagatacttccttgagttgtagaggagaaggtgtctgtgagaccaggtctggtaagtaactaggagaccaaatatcagtggccctggatgtgacgttgtctctagagaagacctaaggctgccatgtttcccaggagcaaaagatgggtttacatctgagagctgagactgtccctaagttagttgtccttgcctctatgtcagaaaagctccgtgtagcttggccaaatgacagcctaagcacagcagaccatattcattctccaatggagagtagtcccagtagaaggtgcgaggaggtaaaggcatgggtaaaatgcaaaccagcccagttatctcactctcagagtacctgcaaggactgtgtggctatgctagtgccataagcaagtcacctctgaggccacagaaagaattttatcattcccttcttagcccgccattattctatcagcacagaagttggatccctgagatagttgcataccagtgattataacaatagaatggttactttcctttctgttcaccatttttttttaagtagtggtaattggagctggagagctgacccagcggttaagagaattagcttccaacttgctcttccaggggacgtgagtttggttcccagctcccatgtcaggtggtttgcaactgctgttaagtccaactccaagtggatatgatgccctcttctggcttctgtgcatactgcacacatgggacgaatgtttatataatgcacacacataaataaaaacaaaattaactaaaaaaataatggtagtagccaagagaaactggtaaaaataatatctgtagtttccaccatgacctctgtcctcaccttacctactagaaaacccaggatgttgatttcttcctttggtacccagtgaggatgttctaggcaaagggcactaacaaagagatgcacgttacaagaaactcataacaataaccaaaaggagtctacttcttaatctggcaaatatattctttccagttctggaggcttgtgagtctaagcttaagtctctgacaagcttggcaccctttgagggctcattcctggttcatagatgacgccatccagttatgtcttcgtgtgatagatgggacagtgttgctcttgtgggcctctcatgtagagacactaatctttgtgatgatttaatgaattccctcccccaaacaccttcctcttggtcattatgattttaacatgaatttcagggcaaaaaaagatataagcattcaaaccattacattatggtaaaactaagtacgttgtttgttaggatttatgtaaacagagactgaccatcctaggagtcaggtcttctatctccttactttaactggatatttcttcacatataccacatacttaaaataaataataatgttgcttatatctgagcctggtagcaccggcatataatcccaactgcttaagtagctaaggcaagaagattacaagttcaaagccagcctaggaaacttagttaagaactatcttaaagtcagaagtagaaggagagatgggaatatggaatgtgagagtgtttctaacacatgcaaagcattgggtttatttccagagagaggggggagtggggaggaagatggagggagggtgggagagaaaatacaaatatgtgtgtgtgtgtgtgtgtgtgtgtgtgtgtgtgtgtgtgtgtgtgtgtgaatatgtgtgttttcagaaattgcaagcactaagtatcagagaaatatgtatgtgctgttgtcccaaagagcttaaagtttgttaggttgttgttgtttgttgttgttataacaaaatgcctgagccaaatcaatttataagaaaaaagggttggactatgctcatatttcagaagttcaatagatgattgacatgttgttttggggtctatggcaatgtagtatattgaggaaggagtgtagagtggtataagctactcatgatacagcagctagaaaatggtggacaggaaagagtccacttttcaacatctaccagagcattctctcagcaccctaactttattccaataggctctggtaacaccttgactggggtctaagcctttgagcatggacctttatgggacactttaacatgacaaagcaaaagacaagtctaagtagtgcttttgtttgtttgaaattctatggcaattccttgtgatctgactcactacagtgttgaaccccattctgcatggactggtcacttgtctatctccccctataaacaggaaatcccaattgtgcaggagttgtatctttttgttgttgttttgttttgtttttcaagacagggtttctctgtgtagccctggctgtcctggaacttactctatagaccaggctggcctcgaactcaaattcacctgcctctgcctcccaagtgctgggataaaaggcgtgcgccaccactgcccagctcaggagttgtatcttaaccaccaaagaacaccaatgctatggctgtggatcctccccgtggtctggctcagagagtagatggctggagtggaacaccacgacgttgctgagaacttactgtgttttgtttttccttctttgaggacttcggcattatgttcctgcaccaccttgcaacaattttcttaataaccttttcatatgtcaacaacatggcccgagtaggaaccctggtcctctgtcttcacgactcagccgatgctctgctagaggtaaaccttttcttttcatcttgaggaagacaaaatccagaacttgcaaagtccccagaccagctgtcccgtggtgtaatggatggtgctttgaaactatcagctgtcgcttagtgggttaaattggcaaatctgagactttagattaccatgcaaatgtgtgtccaaagtgagctttgttagcatcattggctaataggaaactggaagctttgaccagtccacatttgaatggttgattgtttaacagaaaaatcactgttttaatagattttctaagagtcacattgatctatctgaaaactgcttataacccagtttagtctcacagtacaataaagcagttttatttttgttaccagtatacatattatcctactggtttttaagagtgataggggcatatgaattgtaaattttataccaaaggtatgcaaagaatttgctacttggagagttaatgttatgtgcataaataagtctttttactttatgccaagaaattttataactggtcaaaattaacccaaacaagtacagagtttgcatagaattggctcttggagccaccctttttcttccccctgctgtgtcatgtttcctcatgtgaagaatcctcagtcataatctgttattgcaatcagaggtacagatgcacacagttatctttcatagaggcggtcggtaagttaaagtttgaactgaatgtaaaagctcatcaaaaattctgatcccctgaaggttatgaaactaaagtggtcataagtcagaagatagctcatggttataactattgtatgattcagactgaacttaattcagcgtgtttttaatgggagaaattatgtaatcggcgggaagtcctctgaaattctattataatttgattgtatccagtgtatgcatagaagtggacatttatgctgcagtctatgtgtagaaatcaaccctagaccttaagccatggttgattcctgtggaaagctctggcatgcactttggctagagttgtgggagaagaggtacttgttgaattctcatccaccactttcatccagagaagatagctaatctgagaacacaagtatgtggcttaaaagcaaaaggttttcataaccaggattctttttgacatgatagataatgcttggaaatatccagttaatgaaatcacaaaatagtgtttacagtgtacacatctctggcgagtttgctgccattggttatcaattgcttctgatggatgaacatgaaagaaaaggggtgtgttggtgatacctagccagaagaaagccaaaagtacttttcttttgatgtaactcaatggtattcacgaaattaaaagctcatagtcctgactcccactcaggtgatggatatttcctcttaagacacattgttcccatagctttctgcactgcttagcgctcctaaatgattctgaatacctccaaggatgctagcaacatctttttcccgtaattaattttccaacacatagaaagcaatcttgtgttgcagaagagatctgcagtttccaatagtgtgtaagtgctgtggactctgcacaacttcaagaaatggggaagaaaaggtttatttccaggcccacctgctcatccttatactcgccttgagaagcaacagcatagaaagcagtgaggatgcctcccactgaaatggctgtcgtcagccatggatttatttcctgcagacacctgagatcagtaaatatcatctagaaaatgagccttaaatagggctagaaatcctatagccatagagacactgatataaaatagtcatgacactgtcttcatctcagagttttcaagaataagcagggaactcatcttttagtgaaccgctgtgattgttaaagaaagcacagacccagctagatatggtggcacacacctttcaatcccagcacttgggaggctgaagcaggtggatctctgtgagtttgaggccagcgtggtttacaaagcaagttccaggatagccaggactacacagaaatatcctacctcaaactgccctccccccaaaaaaaggaaagacggaaggaagggagggaagaagagaaggagggagggagagagggaaggaaggaaaaaaatggaaggaaacacaaacctcaaagtagaagggaaaaccactgtggaaaagctgtagcttgtggcctcagcattcagggtgcaatgaggacgttatattgacctgttatgtgatttctgttctgatatctctggcttgctaacatcaaaatacaatgcaggaaagttttttatttttcctctcttctcttaaaatcagccatataattgaaattttcaggttagtagatatttttatcaactctgtgacagttgcagtgtatgtatggttgactctgcatttcactaaacttttgggtaatttataaatgccagtgtgtggcgtgtaccattttacagtatcaggcatccttatgcatgtggtaagctatgtgaagtcactggggctcgtgcagactgaaggaaacttttcttatcagtttaactgaatgaatggcattccttcctcttctaggctgccaaaatggcaaattacgccaaatttcagaaaatgtgtgatctcctgtttgtcatgtttgccgtggtttttatcaccacacggctgggcatatttcctctctggtgagtatggtggtcttctttctgataaaggcaacccctccacggatactgcacacactcttatcctgaattatactcttaatccttcctgagaaggttaaagcccaggggagcaaccgatggagcagctcactggggctggggaaatacttttgctgcagtgtttgtaagtgtgaggacctgagcttagccccatcacccacaataacacattcttgtaattccaccactgagatggaaacagaggagtccttgggagctcccttgccggccagcctagactaattgatgagttccaaaccagtcagataccttgtctcaaaggacacagatggcatttttaaaaatgacactcggtgttgtcagatggctcgcccagacatatgcatatataggtgtcaccacacacgtgcacatatgtataccaacacacacacacatgaacacatcacacacacagcatgtgacctcttccttcaggagagttatatactttattactgttttgatgagatcagatgggtttaagggtggcgtgactgtggatgtctttcctaataccttgtgtagcatagcccacttctctttcagatgctagcctagaacatgaattaagagcctctgccatgggggtctgagttaagaagggaagcatggtcctgtagccagaggccagaagcagcattgcctgggaactcaagacatatgcaggttcctgggccctgcttcaacccacttaatcagaagaactgcagataaggctggactatcatgtcatctgagatctccatggtgattgtgtgtgacatcaaagtgtgaaaaacactgtcctaaataagtctcttcatcagcttgtgctccagctaaaggggaatggaaagcataccttcaaaagaaccctgacatttcctgtggctctttatgtctacatggctttttttgccttgttaagaactaaagaaaaggcaggcatagcagagtgttggcgtctgacagatgtttctatgggtctattgccaatctccccgttacttgatttggggagaatgaagtctccatgttgttttaaatctaccgttgatggtagattttttttcccccttccattttcaaagaacaatttgaatgggaagtttgagccataggaagtggagagagtaggaacacgaagacacagtactacttgaaggtccaggggtgcccacagaagattagcaggcagaaagtagggggctctagggagtaggtgtatcattagcattactgaattactgacacgcccacacaccttttcagccacgaggcagacacatgtgtcttccctttgaggttcaaggctctttggacacctaggttaatcgttttcaagcagcagtgtcacgtgttggcaaaagacatttaataaaaccttattgtaagtgaatctaaatgtaggtaggaaacactgaagtaattctaaatgtgatgtatctaattatttcagggttgaggatctttcaaaattattaccataattagtcataagaatttaaagaagagtttaaagaagaaattcaaacaaaatgtaaggatgacttctcagaatgatagaaagcattttcagatgacttaagagtctgactcttaaagaaacaggcatcactcgtgtaatgtgatttactgctttccttctagagagagttaagatggagatacacctgccttctcaccatttaacatataaactcttgtttataagctcttaaggtttaggcattggtgaattaccaagaatagcagtccatggaacaaagaaatcctgtcccgctgtcattgagatcactcatggtgcacctgctaggaggacctgttagctgcttagaaagtttctgtgactgagcataaaccttgcaaaataccttggggctcctgcacctgtgccctgtgctgtagccaagttgtttttgaaaagtgacttatggaaaacccttttctatttcttgtaatataataaccgtatgctcactacgattataccattacagtttacagttagtaaagagaaatctttttacatacatccaggaagtcaggttgttgccttgattatctgtttgatcctgcatctgatggacatcactgttatttaaccctttcgtggaaagagcaataacaaagagtattataaatatttgatattgtgaaattattttaaaactcctttgcaattaggaaagtacagtgtgaagaaagaccttccaggctgtcacctacagactcctcccgccccttctgctcatgataaattcaatcagttttccaagtcaggagtattgtttttgacatgggggccgggggaactgctttcttttgtaagatgacatctggatctactttataactctaagccaaggattcctaagctctctgtgaaatctgttctgtggagcattgcacaggcatgcttccactctctgtaaaatctgctgtgtgtgagcattgcacaggcatgcttccactctctgtaaaatctgctgtgtgtgagcattgcacaggcatgcttccactctctgtgaaatctgttctgtggagcattgcacaggcatgcttccactctctgtaaaatctgctgtgtgtgagcattgcacaggcatgcttccactctctgtaaaatctgctgtgtgtgagcattgcacaggcatgcttccactctctgtaaaatctgctgtgtgtgagcattgcacaggcatgcttcctgggtggaggccccagtgctttcatcattttctggcatctgtgactccttcctttgttcagagaaatacctgtggaaagcagaacaagtgtactccagggtgtgcaggttcccaggacatcttctttagaaggcatctgtgattccttcagctacccctgtatgtcattttccttcatttgtttcccagaattcctcctgccatgatcttccaacctcagcatgagaaacagcagcacataccatttgccacaaccacctcacaccatggtgtgagctttaagatggcttccaccttgccctgtggaggctgctgtccaactgaaccctcttccctctcctaaggtcaagtcatgctgtacattttactttccagtgtggaatatttgcatactctgtttgtccctctcagagttcaccctgctgtttttggataccatactagcctaacagtgtcctctgaattacaccctatgctgacccttccagatttgttatttcttccaactcactgaagacaaatgttgactagagaaggatttctttggttaactcagtgcctaacaactgagtgtgtgtaatttttcaccacattatgaagacttctgagagccattatttcggtctcttgcttcttcatatttttctacaatatacaaaagtctatattcaagtcctgtgtaaatcaggatgaccattgctgtaggcacctcttgtacatagagaagcaagactacagaggacagaaggtaggggtgatgatcctgccatcccaactagctgagaggcaaataggaggagccaagttcagagccagcctgcttggtctcagaagaaaataggagagacatgaaggaggaaagaggagtaagctggggacatagcttagtcgtagagtgttcgtcgtagagcagacatgaggcccagagttcaaacccactgcttacaagacaagacagagaaggataaaaggaaatgccaaagctggattttaggattttggtcttttattttctttatggaaacttttaactcaaaaatcttgccatgtatgtgcgtttagtgagggtttcctaggcaaccaggatgaggtgcatactgaaccttccattagatgcggggcttttaaacttgcagctcagattccaacaggtagtgtcagtactctgctttatagtttgaaagaagaagctacaggctatgagttactcttataagcatttggcgagcattggtaatataagtgtttcctatttaaatcatcatactgcatatactgaagggctctgttggctaaataataaatatatcagacagcatatatctgaagaaatcgctatctgagggtttttttttaggagaataagagataatttatcagtttattctgaagccagaggtgagttgccatcgcccagaaccactcgttccaaacatggtgaccattctatgaagcaatttaaatttctttcgatcatattccttctccttccccaaatcctccccaactccctccccactcaccttaatgtgttctccctctgtgcactcgcttgctctccccaccttcccttcccttcctttccctccccttccctccccttccctcccctcttctctcctcttctcttgcccccccccccaaaaatgaaaatcaaaacacaaaaatgtaagacaaaacaccaaaggaaaacattgagaattgtgtacaggaatacctgttgaattctctatgttagtctaccctgctatgtggttgatatatccagtggcactctattggaagaaaaagccttttccctttctcactaagtatcaattgcaaatagcgtttagggtagggttgggactttgtgcccatctccctttctcaaaactggtgttttgtctggtttgagcctacgcaggccctatgtgtgctgtcacagtctttgtgagttcatgtggatatcaatcctgttggggtctggacaatgctgtttcctgggagttatccaccacctttggctcttcgaatatttccacctcctcttgtacatagatcactaagccttaaagtgggaggttgataaagacatctcatttagggtgagtgcttcaaagtgtctcccaaaattatgtacattgtctacttctgggctgggtctctgttgcaagaaggagcttctctgatgagggttgagcagtaaatgcactgagctttgggtattttattactatctttctttaacagaattaacagtagaaggttttcctaggaaacacaatttacccagtcccaagttctcggctactttaacaatgtcaggtatgggtcccatctcatggaatatgggtcttaaatgcagtttttaaactgcaattggttattatcataacatttgtgccactagtataagatgaccttcctgtagaccacagataagatattctttatcctttagagttgaggccattaatatttagaattattattgaaagatatatatagattgcagtcattttgattttttttaactagtttgttttcttagttgtggtttgggtttttcattaaactgtagctttgtttgattctttctggagtctcttgaccgggcttgttctactcttcacgttttcgttccttcagtgttttctcattggctacgcagaaccatttcacatttctttccagcaatacatgaaggttctaccttctttacagccgttaccaagatttgttgtctgttttattatagtcattctgaagggaataaagtgccatcttttcatttttctcccaaatcttttattcacttttacttgaattgtctttctatcatcatgggagttggtattgttatgccaaccacaccattccttaatggactgttgcttctactatgatgtcattgtcatgtcagtggaacaaaatatttttttgtcactgtcctcatttcctgccctatacttaactgacttgacttcatttctgcctcttggagtctttatgccattttaatccaaactgactcatctgtcctgtcagtcggagaagtgtgtaacctaatgagccaagaactccggacgcattaatgtgccctatcctcctttctcagagctgagatactgtccaaggaactggtgatcatttctattcaggggatatctaggccacattccagccccaccccacacaggtcaggagaagagttctctccacatggtgccttcctgatgacatcattgtctggtgttgtttcactgtagacagccccttgtcttgctgttcccagaatatgacgcactcccaaaagtgaaacttttatatccactatggccctgcccactggccagtctgctttggaagggaagtgggggggggtgtattaaagtgacaccactcctcttcactgtctccacagcacacacagtcccactccagcagcccatggagggacttttattttttccaatctgcagaatggagagatgagaaaaatctaatttaacaagcaactgtaactgtcagataatttagccactgcatggataattaatagggagagcctgtaaaaagcagtgcccttgatgtctaccctgcagtgtttacagccaagctttttatgcctctaagcctgactccggttatacaccacagaccagtgactagctcacaacaaccaaaaacagggaaaaaaaaaaaaccctatagacctccttcctggagtcatcaagatcaatattataaattctttcagtcccatcttctatagtttccaagctatttttctctgattctgaattgtatcgtgtcaactctatgaaagttatatcggcttttcagaacttaggtttccatagtgtttaaattagcgatacatcattatttcaaagtaatagtcttgcagtgatagcatgggatgacactggaatgatcttgttcagttttcatggacttctttaattatacagctcgtgtagtatgctaatgtacatcttgcaattttgtgaacataaaaccctggagttgtaagatcataatatgagcatccaggaggccagaataattggccttcattttccattctcagtaacaacttggctctgtaatgcttttgtggttgtgactaagcataaaaatggaggagctatacaagtgctttatacttcgctgattttatcaaatcagtgatggaatggctcaggatttatcgtgcaggttttactttctaatacattcttgaatagttagattccccctttattaaatagcatctacaatttaggaacctccaagattattgccgttaggaagacatatttttacctctttggaatgcatgcttacgactttgtatataatcaggaccaaatttaaacaaggtccaataattatacgcttcgaaagattcacatcacaataagtattgcaacagcccaaaaatacatactgaatccttgctgcactgctgccatcaaactgataatcacaggtggcccagataacaaatgttcattatgatagggtcataattcaaaaacagctattggtttaatagtgcctcttttcataaagtttaataagttatgtctgcttgtcttcgcttgtctcaaaaatatgtgtattctagtcttatagttggacactcactaattcgatgctttttagaccctctctgttgatcccccctttttcctgcactctatttgtgggtaacccaccaagttcctacaacctgctaggttttacaaaggtgtaatctcaatttggcatggagtaggctgtgctcagtctcatgacagcacctgttataatgccttgctccgaatgacactttaattctaaatgatttcacaactctttgcttattagttaatctccctgatctttgtggcattcgtgcctacagagaaacttaaattacttcaccggtgattcacttaagctcccttactgatctcctaatatcagttcagccaaccttactatatccattttttttttctttctgcaatagactactgtcttctttaaggccactgagaaagacataccttttgagtatttgacaaataaaatgtcatttaaaggtagtttcctgttattctgcctcagtcatcaagtcatattaaaaaacagtatcatcatctacccatgaattagaatcaagtaacgcaaaagggagatccagaaggactctggaaggatggtgacgtggtgcagctccaaggggaaccatgtaccttgagttgtattcctcccgcttgcgtgttagaagaccaggcatatggattctgtgtgtctatcacttcagtagttaaataatgagtgcctgtctcaccagaaaagctaagagtgactgaaatgtcgtttctggtggtgctttataaagatatcatctaaatagggaagattttcaatgtcgttacaattaagatggaaagtcccatgactgccaagccatgtgccaacatggtatatttttaatagtacttggttttatttatatctaatgaaccataagtgcctttgaaataatcttctaaaacacttccccaaatcctgatacccacacagtcttgtgtcaatcatgtcttctctcagaactcagtgagtgcagactgctgaacatggttacatgtttctcccagatcccaagtggcataactcaagacaccagaaatcactattgcattgcacagattcacaaagtcagtgggtatgtattcggcgactcctttccttgttaagtctcagattcgtgttcattattcagccaagagcgggcctgcagtaactgtcaggacctctccctggcctgcatgaggtacgttatccctctgtacatcccagagagcaagccctcagttttaggaaaacgcacgtcaccgtgcaccctcaggatcggtgcagcagaaaccgctgtctcaccgttttcttttataagatttgaaactcatccaagtccacagtggcatagaagccttttctttgattcatttctgaaagtatatcttccaaaggagcatggcttacatgcttttctgaatagctgataagaagcagattagtctcccttcacaaattcggaaaagcttatcctctcgctcctgagaacccttgataactgtactctcaaatttgtattggtgttgttctgtgttcagtggatcagaaagataacggatgaagcctagaaatgctttggtagataggtaacttggcatgctttttaataacattcatgtctgatagtgccttcttcagaggagttggttggatgcaaatgctgtgtgctgagagacttgtctcattgactgagaacctacctgtctgattgcggttttaatttactcccacaactgacaggttaaaccaagactccacaacctcagcttgtaggccatgtccgcagacagcccatttttataaataaagttttgttggcacacagccttcctcatctgtcatgtgttgtctgtgagtgcattctgctgctgtgacaccattggggagttaggcgtgatcagcagcacagcacgacatacttatcacctggtcattggaggaagactcttgccagctctttgacttggccattaagagtttgacttggaatctaagtaggggttcagaattccagtaagataagaccattaagggagtgacacgctaaatgcatttagccaccagatgttctctgttgagttataactaccttcagcagaaacagatgtggtgttattcttaatactgtggcagcacagagggaaggtatactccccagtcctgtagtgacttttgtcaacaagacagtatattttacagcactcccaacacagaattgatgacataagtgttccctgcctccatccttcccacttagcttagtggcaggtgcccaacctcaaatctgttaccactcccagacctttcagcacagcttacatcaacccaaccttcctgtcttaattcttctttgaatgaacaggctataaagccacccttaattctcacactcctgtgtcttctgagtcttcatgtcctctgtagtcctgactaatacctcaacataaatttgttatgaaataagtgaatatttaataggatttcttggtggacaacacattgtgttgtgatagctgagttatgtatttgatgattataaggaaatgttttgggtagaactcactgaaatatttattaaaatttgtccaaagggactgagaagcaagtccagggaagtggtattgaccacgttccatttattagagcccatgggatagtcttatgagacagtcccaaatgttttaagattctaagcggctaagtggtactgtcttaattaagagttttagattatctttttaattgaagtataaattcagtgaacaataactaatgaaatggaatttctataaataaatgtaattttactgcccagcagtagatattagtcaaataatatgatctgtgggagtgtttctcaatatatcatgtaggaagtgctgggtcattcatctcattgcagtctcctacctaccatacctgtagaagctacaatcaaaactgcaggtaaaggtgcagattacacaagcctggtggcctcagtttgatctctagagcccccataactgtttaaggcagtagttctcaacatggggggtgtgacgcctttgggaagtcaaatgacccctttcacaggggttgcctaagatcttcagaaaacacagatgtttgcattaagattcatagcagtagcaaaattacagttatgaagtagcaataaaaatcatttcatggttgggggttaccataatatgaggaactatattaaaggattgcagcattaggaaggttgaaaactgccgggcgtggtggcgcacgcctttaatcccagcactcgggaggcagaggcaggtgaatctctgagttctaggccagcctggtcgacagagtgagttccaggacagccaggactacacagagaaaccctgtctcgaaaaaccaaaaaaaaaaaaaaggaagtttgaaaaccactggtttaaggaaaaaagagatttcacagattgttctttggccttcacacatatatgccttggcacacacagccacacattaacatcacacacacactaataatgatgatggtaatattttaattagtgttaaccatcaaatggtaaaatattttaaatgactttattaagcatcttaaccagtaacaaatgaacaagacaaagatagttatttgctgcattgattaatataactccatgagttgagattttagctcaccaaattttcctcatctttggtagaaacagaaggatcttttgtatcttgtgtgctactgtaccctgtggtaaagcaaaggacacttaagttgacaaaggtaccttttgaacttgtcctactccatctatttgggggcggggggaggggggtgcagctctgaaagcgtctctgtgcagaaggccttggaattaccacagttccagaaaactacattacattatgaacacaatttgcaaagtcagcactttgcagaaagggtcagcaaccttctctttgcattaagctgacagtcgctcccagaagtaagttaaatctactgcgaaaaagcaacagaggcagccagctgagatggctaagtagtgagttattcagcccttctccccttctttctcttcctgacgatatgatcgcatttttttctaatttaaacttcgagaagtcctgtgctctctgtgacagccacaggactgtctgaagcattgccctggtggtatctgatagccactagctcttttttttaaccccttgacacttaggaataaattccagcaaggcaggaatcttgtctgctccgtttgcccagcactgtgtgcagtgcccagtgctgattcatcttcccaaagagctctgcacctgctctgcattttgatttgggtgtttctatgataacgctcatctccccctttcagggtgatagacaggaaggaacattctgaaaggaacagtgatgctctcttctgaggctgtgccttctacctaatccccctacaactgtcttcccttctacctgatctccctataattgtctcatctctccccacatgcagtcccctgatgaggtatgctgagctctatccggtgttgtgtgtagggttctggaattgaggttgcctgtatcagacaactgtcttgtgtctatctctttgtcttgttctgtttttaacatttttttaatccatatgtcaaaggtatggccgagataatgaaagtttgccttattctaaatgtaactcccctcacagctgggaccgttattttttttccatctctgacctacttttcgaaaccccacagtgagttgaaataaagcaatctgttgttttgtttctgtgtgatgcagacaggtccatgtgatacatatatacttgatacatatagagatctatcaaatacttatcggtcatacagtcaaattgaaagcttgattactttaggggaaataaaggcaaatcagtgtagtcactgctggttttgaaaccatatgtgtattcttcatgcataaatggaaggattggaagaggtcttaataccttctagctctgaattttctaggaactacagtttggcagttagaagggattgtgaccttctagtaagaaatatttatgaagtgataacagcaggggacttggggagcaggagcagtcagtagtgaaggagagaccatacacatagcttacatgttttaaaagttggcagcctataaaagcaaagaaagacagtggccagcagtcaggaaggccatgctccagtttaaacagtgggcatgtcccaggtgctgcaactggaggatgccaaatggaaagctgtgacgtgacggtaggtctaagtggcttgtatcctgtgctactttaaaagctaatgactcagccgggcggtggtggcgcacgcctttaatcccagcacttgggaggcagaggcaggaggatttctgagttcgaggccagcctggtctacaaagtgagttccaggacagccaggactacacagagaaaccctgtctcaaaaaaacaaaatcaaaacaaaacaaacaaacaaaaaagctaatgactccatcatgactgtaacaaacacatcagtgcggcagtgagagcccgtctgtcagcatcagcaacagcattagtcagactgtatttgtgagcatatttgcttaggtctcttctaaatacccttcacttttctctcagagaaacccagttcatcgtattctgaaaaggagcggccgtaaaggactgatcctgtctgaagcactttggtataaaagttgcttagcagtggggcagaaaagaaaaaaagcaattaagtttatatttagtgatctatctatacacatctggagcacatttgggaaagaattcaaaagggccaattcattgcatgcctcctgctacagaacgagtgtgggagtcaagctgcgatttccacagcatcagacatttattgttgacttcaaaaagttctcccacttatgtgtaattactatcctagcaaatggctctgaaatttcagcttcttaagcataaggcagagtggtcctttaaaagtaaaataaaacgtaggccctatgagataaaattaagataaattaagaatcagttacttccaagacgaagcacttatggtgcatgccttcttatataaagcagatccttaccatgtatgtgtgctgtttgcttgccaagaccaagatgtcttccataactgtggcagcactggactttgaagctctgctgtactttttcaaaagaatccatgctggtacaacttaatgttagctaatgcttttaacaaaaggcatggtagatttagatatcatttcaacctcctaaaaagtctttatagaacagttctctccggatgggagggggtggctgacaccctaattctgtttcttccagtttgtgaaaatagaccacttcaaggctccaagagtgtaaggctccgactaaagccatttctgggtgctgcatcaagtgctgctgagatttttatcaccacaccacttgagaaatatttttcaaggctgacagctcaaaaggaaagaaaaaaaatgatataataaagcaaagcaaactgaacactgagcttggtgttttgtaaaaacaaaacaatcaagtatctaacaaaaccactgtctcactgggcggctcacgcctgtaattccagcactgagaaaccagaggcagcaggatcgtcgcaagtttgaggccagcctaagctacatagtgagttccaagcgatcctgggctacgtagtaagttcttatttcagaaacagtaataagagaacatcagtgttgaatgaagcataggtggaaggagtcacaaagaccaaaggcaacatcacaaagctgcagccaccccacacaggcaacttctaactgcccttaaggcctcactcacagcaacccaatctgttttgttgaacttgccatttgagaagaacatattgcaaggaaagctgacaaaaggcgaaagccttgaccccatatccagacaagaaaacaagtcataagtagcagcaggtggctggaagggcagagggggctgcggaaggccatggacattggaagggaagaggatgggaagagcgtcagcaaaacccagctatgcttgaaaacgctgtaaagaaactgaatgggagagatgtaatttacagaaaatcaaaatgaaagaagatacataaatatatttatgtgcattattgtccagttactaaaactatcacacacacacacacgtctctctgtgtgtgtgtgtgtgtgtgtgtgtgtgtgtgtgtgtgtgtgtgtagggagagagggggggagcgagagagagagtaagagagagagaatatatattgtatgagagtctttgctacaggttgctaggttaaagcattgaacacaaactagccaaggatatttgaaagctatttccctgtagcttaagggtgtttttttttttattaaagtatcttaattgagctaatgaggaaatagtgttatactaagaattaaaagtcgtgtttatgtcttaattctgatgctaatatattccttacacctagctcataactctttctccctacttcagttacctccacgataagcaagttaatagcatctttctcacaaagggatctggtgtgtattaagtaagaatacacatagaagtacctggcaagtcttggagtaccacatagcactgtgccttctgggtttgtgcagaccctatcaaacacctacaggctttagacaggatgtgaggtgggatagagaatagggctaaagccagagactgcttaagttaggatgggagattttaagaataattcagttgcagcatttcgttgagaatttcccttgatagctaacatctcctcatggggtcttggattgaaatgagacttctgtaaagacagtgctgaacagccagaaggaagatgtcagacatactggtgacagtgcccctggtgcctgccctttcctgtcagtgcccattactctaggttcccttgccctcagaagctgtaggagaattctgttgtgcctcctggcctctgctccttgtcagggagacatgtggctctggttcttgtgttcagcattcgttcacggttttgctgcagcttaaggaccagacagcatgtttctccctggcacttttgttccatctcttgtgaagagccatcgcttcacgtgcctgtctgtcttaacctcctcttgacctgaaagcatgccagcctcttcagaggcatgaacagttgtgacagagaccagactgaggaataggatgccagcatctttcactagagccgtgcacgctgtgaatgtgtctgcaatccataagagggtttgaggaaaaacacaatggaaacctttcaagactgattcaattaagtgcctcccaagagacaggctgagcgccaacaatgggaaattcaatattggcttactgaaagacacttcatctcccccaagtaccaaccctctctctctctctctctctctctctctctgtctgtctgtctgtctgtctgtctgtctgtctctgtctctcctctctctgctttccttttctccctccccttccctccctcatgtatgaaagaaaatattctgcagctaccttttggaaaaatatgtccctttttgcaataaaagtctgtacctctcttaaattcattaatgtcaaccatcacaggaagttcataagagaaaatgggagattatataaacaaattctcacagtgtctaaaaccaatgaattgattagatgtagttagattcctgcatgaaattatctgcatttgtggccattgacagggttaacgagatgaatggtgagtgtgatgggcttgtgcaaatgactttgtcctttctcctctatctaccagatgaaggaagatagtaaatacgcagccaccatacaccagctgagttcagtattaagcagtgtttttgaaaacgagcaatttctctttgtccctaaagtggcactgtggtagcaagtcagtgcaaggatggtacgtaagtggcctccaagctgtgtgtaaagaggtgttcatgagcgccatgatccaaatggggcaacggggtgattgtgagctactgttagtgtctgtagatgtgaagagtgtcggtaggcaggcctgaagagtctgaagtgaagcactacagtgccaagggctgtatcaccagctctctgacaagatgctctcactttgcaaggtgagtgatataagtcctaggtaaggacaaaagaacagaggattcgtattccccaaggctcgaaggagtgagcaaaatggacacatctacccctcctcccacaccttagttttcatttgctgccatttcatgcttctgctcctgctaagcataaataattaaatccttaattaagtgttacacgatgcaaatgatgtctctgcccagcttggtgtggaagggaggttgacacgagagatgacggaaccgagctttcgaaggctgggcctcaggctccaggtccaagtcagagctgattttgaaaagttcagtatgtcagaagaggaacaaggggaaaatgagctctgtcctttctagaacattgggtccaagatgcaagaaaattgtatgtgtttcttatgatgtgcatgtcattcaaaatgcttcactcagcactgactctcagccgatgaaggcaagccttaaccaagcacagctcaaaggaacatcagaaggaagactttgctgcccttgtattttctgtgtaccttgaaattctgcaaaattagaaaatattaacactattctgattatggaaaaattctctttgagtttactatcttggaaggcgggcatgagtcacttcactccagtgtggtgagtgtagttaagatctatcccttgctgttgggatccatcctgcttgtgctagtctccagccatgcttcctggaggagggcctttgaagctgctatctgaagtctggatttgttcaactactggttactcaggggtcttcatagagttaagtaatgactcttagattttatgtggccgtagtctaatttcaaactcatgtggattatagaaccagtctcatcctgacagccacatgatttcgttgctcccattgtcttgtttctgaccattgggaaccaaggtctcattagagacctggtgtgtatcacacacaggacctgccttgggaggattgattgcttagggcagagtggtactagacagcacatggaccggaggcatttagaaggttgatagtgcatgtagccagtaattgagggggctgtgggaaagaggctgatacataaaggtgatgttgatgcaagtctcctaacgaggactgaaacaattgcaggtaagagagaagatgaacagcaactagaccctggggaaactctgtgtgtgtttgagtcctggtactgtcgctccattttgccctggggtcacctactcactctagcctcaccttatggatctgcagagctagcaggtgaaggcagtgcatccctggagttacggtggttaatggtaccaccggcagagcatccccggagttacggtggttaatggtaccaccggcagagcatcgctggaggtgttggggatataacaggactagggatgaatatagatttggctatggcagtacctcataaatgcccagaaggaatacaaggttggcagcttatgtgatttacagctttaagaaaatgaaaaagcaatgtggaaagtcatcaaacaatctagactgtgggattcagcgtggcgctcacaaggcagtagactatctataaagagaatgtttttctgtgccacaggcaggcatatgtcatggctatggcacttgcaggtctttataagcagtgtttagaaaacagcaatagcattctaaacactgggcttgctccaaggggcatgtaaataacacagaagcccctgcccaaggcagaaacttggcctctgattacatcagcataggtctcacttacaagggtgagcgaatcctggctgctcagtggttctcgagggcccaacttttagtgagaagaggagaaagtgagcttcgacttgactgtcatctgtcttactctgcagagggagagcaaccgtggtgggcaatgatgaaaacgcacaacattagtattttgttggcattgcagtttgccttgcttctgcctcttcgactgttcgctttaaacagcttccgaactcactctgtgtcagcctcaatgtgagatgccatctgttactgcctaccttcctaataactattttcaggattctaactttctcagtctttttgtgtgtgtgtgttgcatgtctaatgctttccctaaaactggtcttggttgcaaacaggcctaagaccgtcatcatgacgcaacgtactggaaaaccatacctgtggtagaaacactgcatagaatgcgaggagtggccctgcttagttctgtattctaccatctgagtgtctagcaaagacattccataggccacgatagggtctttctcctctgtccattttcttacaatgaaaactgaacaaaaacctcccattattagcacctggtattctaaggaccttggcagatctcctgggacacagaggcatttcccttttagagctgatacttcacagcagttaacagtgagatgctgggccaaaacctaaaacgaaacagacatactgtctggtcacacaaagcggtcagacagaagagtgttgagcctgtcttggaattgtcttaacgttcccatgcccagactaaacctgggattgtgaaattgtacctgcactccctccgccaccccccacccccctcgtggcatggcctcacctattcctgctgtagaaagaagatggatactcaggaaggaggggtgtcagcgaggttgagatagagaacagcagcagactaggagccactgaggacctttgtgtaaagtgtttgaggtttatatgaattgcttcctgtcagtcattagcaaatttagttctagtggtcatgattatccttgataccttggttgacaaatctctcgaatgaaactcttctaaataatgaagttacagcttggtgaagagccttacactatgtgaggcctgttctgactttgttggtgaaagagaccatcaggagccttaatttattctctgtctttatgcaagaagtacaagtaaacggtgagttgggacctgaaacctaagaatcctgtatattaaaaaatgaacgggaaatggtggcaaatccctgtattctcagccaatgagagactaaggccagaggatcctgagtttaaggctagcctgggctacattggaaaccctgtctcaaaaagaaacattgcaatctattcttacatagctttatctggtgtgttgaaagtaatgaggcctatgctgtagcttagaaaacatgacagtattgaacaagcctaactggggaaactatgtaagtgacaaacctatgtttttatgggttatttgtcacagtgccaacagctggatgttgagttaaattgatcactttccttaaagaggaaagggattgagacagtggtcagaatatggctgctataggctatttgccttcaggaacaggcaaagtacctttttagcaatatgaatagtagataacccaaatctttacaatatgaattttgaaccacaaacacccagttattaggtatttaacacgaggctaagtgagctattcagaacccaaatggaccaaggatgcctttacagtgccttacatctgaatagagattgagttgtccaaaaagatagagaccttgtaggtgttgcgctgtttggtgtttagaaatgactttatcgctttccctctgagctgcctgcggacagagattaagcaccccatgtctcctctgccttgggccctcttcctgatcctgtgtgttcctctccactgtactgggctttgcttctctgaatgcgttttaaagacttatgcttctaacctttccttcaaaggacagtttcatcaagatctgggaagtttaaacaagagcttggagtgtccatgtaggataggataggaagaaactaggaagacgggtgctcaagtgctaaaagcagtctgtagacgtggggaactgccggggccctaaggactgcggggaacacaggctggggacaaaactttaaacagatttttgagtcacacacaatcattaaaagatccataaaatcgccacacttctactggaagagagcggggataggtgaataaatagttattcagaattgttactcaaaactttaggttttaagagccagagaactggctcatcaggtaaaaggcacttgctgccaagcccagcagcctgagttcaatccctgggggtaaaagataaccaactccacaaagttatcctcaaacctctacatgttctattgctcatgtgcgtgtgtgtgnnnnnnnnnnnnnnnnnnnnnnnnnnnnnnnnnnnnnnnnnnnnnnnnnnnnnnnnnnnnnnnnnnnnnnnnnnnnnnnnnnacactcactgtactaaatatagtacagttctaggtttaaaagtgcaaagagaattaaaaaccaaaggagaaaaaaacttgccaacaggtgagttccagacttacttatatatggaaattgtctaggaattgttttaaaattccagttgctcaaactataccccagattatgaaagtctactctgaagacagaccagacttcatgggtttgacagtcccagggcactcaaatggcaggttggaaaccactgtcttgttttagctttttgaaaaataagcatatagcctgacctctgacttcttcagataaaggaagacaaaatattacagagaaaggcgccattacagttaaaagccgatgctgttgtctccgtggacacgtggtgtagtgtagtgtaatgttttcattagaaacccatgttgacccaagaaacttttgcatgactgaagggacgtagcataggtttacatctcagacactcattgatgataaggcataaggaaatgtattttaaagcagtgctttggaatacgtgtaatttatcatctattaaagatcaaaacaaaatgtcatactgccgaagtatatgtacttgtatgtcttcgagttcagaattaagtctcagctggacacttagtatagcaggctatagagcatccccgacggtttttggaattgattcatgctttagttttatcgttgtcattggtgaaaactccactgagcatcagtgtgcagcacaaaatgacagaagcgtgtttagggccattccagaaattgttaaaaattctgttcttatccccaaacaaaatgatttaatttttgttttcagtgaagctcaagtcagcaagtgaatcagcaagttttaaaatccaacctgttgggcctgagaggttaagttaagagaactcgctctttcaagaacccaggttcagttcccagcacctacataacagctcacagctacatctaacaccagatccagggcaccgtggcgcacattcatacatacatacatacatacatacatacatacatacatacatgccaacactcacacacataaactaacccttaaatttttaaataataaaataaaatgagacattctgatgcagtacaatccagtgtaaatttgatactggcacactaaagaatgacggtaatcaaatattaaaagcctttgtttcctgtaattgaatcattatgtctttattccagcagaaggctttctttgcacagtaaaatcactgcagttgatagtgtacagtagtctacagtctgacctgaagcacttataacagtgttctgtagcactgtgtacatgtggtggcatgtggtggcccgtgagctccaaaccaaagctgcagtccagttctgtgatggaacccaggcaaacacatagtcatttcacacttggtttttggtttgttgggtgtttttttaggatttttttttttttggttttgttttgttttgttttttcttttcccattcagtcagttacaagccctcaaatggtgtcatgactcacaattgagaagctatgatatattatacagactctaaaatcgtgtgtatatttactagttaatcgaggtctttttttttttttttaaagaaaatagaccaccttttgtatccctaaatctaggctcttggtgtggccatcagaggatccaggacaagagcgcaaatggaatttagacatacaaatacaatcaggattctttttttttttttttttttttttttttaggtattttcttcatttacatttccaatgctatcccaaaaagtcccccataccccccccccattcccctacccacccactcccacttcttggccctggcattcccctgtaatgaggcatacaaagtttgcgcgaccaatgggcctcttttcccaatgatggccaactaggccatcttctgatacatatgcagctagagacacgagctctggcgggtactggttagttcatattgttgttccacccatagggttgcagatccctttagctccttgggtactttttctagctcctccattgggggccctgtgatccattcaatagctgactgtgagcatccacttctgtgtttgctaggccctggcaaagcctcacaagagacagctatatcagggtcctttcagcaaaatcttgctagtgtatgcaattgtgtcaacatttggaggctgattatgggatggatccccgggtatggcagtctctagatggtccatcctttcatctcagctccaaactttgtctctataactccttccatgggtgttttgttcccaattctaagaaggggcaaggtgtccacactttggtcttggttcttcttcagttccatgtgttttgcaaattgtatcttatatcttgggtatctaagtttctgggctaatatccacttatcagtgagtacatatcatgtgagttcttttgtgattgggttacctcactcaggatgataccctccaggttcatccatttgcctaggaatttcataaattcattctttttaatagctgagtagtactccattgtgtaaatgtaccacattttctgtatccattcctctgttgaagggcatctgggttctttccagcttctggctattataaataaggctactatgaacatagtggagcatgtgtccttcttactggttggaacatcttctggatatatgctcaggagaggaattgctgatcttccagtagtattatgtccaattttctgaggaaccgccagactgatttccagagtggttgtacaagcctgcaatcccaccagcaatggaggagtgttcctctttctccacatcctcgccagcatctgctgtcacctgaattttttatcttagccattctgactggtgtgaaatggaatctcagggctgttttgatttgcatttccctgatgattaaggatgctgaacatttttttcaggtgcttctcagccattgggtattcctcaggtgagaattcttttgtttagctctgagccccattttttaatggggttattggattttctggatttcaccttcttgagttctttatatatattggatattagtcccctatctgatttaggataggtaaagatcctttcccaatctgttggtggcctttttgtcttatttgacggtgtcttttgccttacagaagctttgcaattttatgaggtcccatttgtcgattctcgatcttacagtacaagccattgctgttctattcaggaatttttcccctgtgcccatatcttcgaggcttttccccactttctcctctaataagtttcagtgtctctggttttatgtggagctccttgatccacttagatttgaccttagtacaaggagataggaatggatcaatttgcattcttctacatgttaaccgccagttgtgccagcaccatttgttgaaaatgctggttttttttatcacaatttttctgtagtacatcagtcagtattcttaagaccttttcttttctcatgaccaatatgctgagtatgaaggaaaaaatgacatcacttcaaatccatgcaaccactgctcacctctttgcgcaccagtgtaactgcattcctgagaaggattctaagatggattaaggcataatccaatactcataagtttacagacaagtgcaggaaaaccagagaagtacacattaacattgaggtagaatgtcttaaatataagcaagggccaggagcacaaaaagtatccacaaggatttgtgaacagctcagcagaggtccacaagcctacattcaacatggaaatgccatttggcatctctatggaaatttgaactcatagcacaaaataaagcatctaggatggcttggaaatggatctgtaggtgggctgaattatgacaaggtgtgtcctgtggtatcaagttacatattccatgccacagtcttccacacggatttaaaattagatacagtaacatcataaacatctatcatttctagcttctagttttgttaggttgaacagcaatatgaggagaggactatggattcttgagttctagggccaactcatgcctggcaagccttctgcattccttgctgccttgttaatgtggaagctggagacaccctgacaaggagcctggtgggtctcgaagttgcaccacagttaagctgggggcttgctaggaatccctgtagctgttatagtctgcttcagcagaaagccaccctatgtcacagtgtcatgaagctggggggggggggtaagaaaagctttgctcttgtaaatggaacatttgctcaagcccttgagtgcttcatgagttcctcctaaatgcaactttgcacttctcttctttgcagtcttctttagttttactcatacagaacaaagcctgtgcttgcttcttggcttccttcggctgagttcaaagtttcatgaatgacttaagaataatgcatcttccactggggaattttttgcttgaagggaaacaatcagaccatgggaaattttaggtagacctgggaggaggtgtcttgaagctctttatctctttgcttaagaagcttttagtaatcacattatctgagacctttacttttcagacatgaaaactgaagtttataaaagaatagtaaggcacccaactggcaagtgcaggatctgagccgggaacacagtgttttgacttctacttgaaacgcaatgtgcaaactgtcagctcctttctgagtaagcccacatctgcccacactcgaaacacgcctgttacactctgtagcaatgattccaatagttaacactatttcagttatttttttccagaatactgtctttgcttgtcaattgccttattattattcaatggagtttttcctgtgttgtatttcttccaaagtcataaaccctaaaagagcattctgttatatcaaaatctctgtatttataattctagagtttggaacttggttatgttatcctcctggttttttagcatctcacaatttagtttagtaaattttgacttactctgaagggctaagtctttgtataaaaaaaaaaaaatgtttactgtatttctcttgccaaggaaaaagtactaaaagaccattaggtacagaatagctctcaagatagcaggccagtgatacagttgatcttggtggcagcacttccaagattttcagagacatttcgtaaagataagatataaaattatgtccttgaaattttaaataaaaacagagaaaatgtcagagagagagagagagagagaacactgcctacaactattctgggaagccaggcagtgtcacaatgagcacactaaggcaagggatcataagacagatcagagtttttgtgtgggtgctgccaagtgaaacactggaaagaccatgtgaaatatagagccaagaaactggaagtttcaagggtcagagtctcagagctaaggagacatgatggagacaggaaggagcaaagaacaatgcaccatcttatctgtcagcatgctggttgagtgagcttggctctcttgtaggcccggtatcatgtgcacgctagaggatatgtatgctatatttatgacatgtaacacatgagtgacatgtgttcagtgtttggaatttttagtgatttcacagcagcctactaatgactgagtagcctttatccaaactgttagtgactagatgttatggctgaacctctctaatctaaaagttcagaatgctctaaaacctgaagcttcctgtatataacgttagcgtaagaaaaaacttgatttctgacattggattccagaagttctaaatgggtgatcaacatgcagttaacacactgcatttggaaagcatttccctccttgagagggccaggacatctcacatccagctctcggcaaggccccatgctggggcccacatgatacctgcaatactcacaccataagtttaggacccgctcgactacatggcaagaccctgtctaagaaagaagagtgaaggaataagtccctgcagtctctgctcttagctttccacgttgctgcaagagttggccttctgtgctcttttcttgaagtcgaggatatcggagatgtgcatgggcctcgacccttccaaagagaaaatcaaagcaagcagcagagggctcacacgcctgttttatgagctgaatttagaaagaagtctttgattttcttacataattaatatttcatatctatgtcaaggtggtagtgaaaggcattacttgattgtcagtaggaaagataatcgttttgggatttaaaggttaaaggaatgggccaaggtggggcaatcaattaaattaaacccactctggtcatttaggcgggaacaaactggaatatgactatgagaagccagaggctgagactaaggcctgtctctctggaaaccagagcaagcagtaacaggcagaggagatgttctgcccatgtgccaagcaacagacccatggggcaccacctccgctgtgggatggcaatggcttggctctgagcataaacaatgggtaaggggctggcacacaactaggagagcttggagcatgaacagagcaggagtggcccgggggcctagtgcagtacccaaggctgcccagatctcttctctttccatctcccaaccccaaccttggccatgctatttacattttctgtgcttcagtgtcctgtctgaacaatagagataagagtgcccactggggggagggatgaggatttaccctaaaaccttatgtgagaattaaataaatgactggatgtgcaatgccggagcctggtttcagacacagcgttgcgatgattatcgactcttatacctagcaagactgaatgatgtatgtaacgaatatgacactttcagcaatagtaattgctcaatgaaggactgctaataaggaacatagcaaaagtcacctttaccaacagggaagcaacaacagaccacacaggcaggggtggaagcaggcctgcctcagtggtgttgaaacagccagcatggagatgcggaagacagggaggagagtgggctgagaaaagcctctgctccggcccaggaagtccccagttagacttggtgagatgtgatacaggactggttcttcagtccagccagggtataactaaagtaaagtatatttgactgaatgtctcatctgtaatgatgccgggatagagtcagtacatctgtttctaaaggccagggttcaagttcagattcctgccagggataaagaaatcacatccatgtttgccatagacagataggcaaggggaacagttattcaaatgtgagaccaggcgtcagacccccaagctaccctcccaggatggtacttgctaactacaccagcagtggagaagtccaagtgtgggagggctgccctgtagaaagggagaaaccacacacacacacccttcagtcctgttgaagtattgaatggccagtcttgtcaagatatagtttaggccttgagttgttattcccctttcagagtgtcttttctggcatgtggcactctttgggaccaagtcctgacttctgtgtctggagaagaaatcgtggcagtctttgaatgttcattgtgggcctaatgatcttgcagagaatgctgtccacagcgaggagccatagttttgcccttgggtgaattggcatccagtactggggcataactcagcaatagagtccccacttggcatgtaggaagtcctggttcaaccagcactaaaaatcaaatctacctgtaacacatttgtacggtaagacttcctggactgtcttctatcacttacgtcacgggagtacttgaaaaacatgataggtggtactgaatatgtgaatgtctatataagtatgtgctataaagataaaaaatataaattcgtgctttgaagtcacaacatgaatgaaatatataccatatatacaaatacatttcatcatattataagtatttcattcatctgtcgggcgtggttcttcaagatcatatgtcagtggcaatttctcatgagtactccagaatagtgaactgaagagagaaagcagagtgctttaagtggtattggtattctagatgcaaatgaaaatctccttgttttattaaaaaaagattgctctatgggttctttgctcaacaacaaaaaacaatgttataaactcttctgcagaaatatgtgcattctgccagcatatttattctatgtttcaatcaaaaccaaatttaaaaaagtgtccataacaggtaagattgggcaaaagtcactataaagccaagtagattctattcttaggattcattaaaatctactaaaataacctcagtcaagctctgaggggtcagtggggcatctgcttttctctagggaattgggtgggctccttgcaagcatctgtgtccaggcagagccatgtagcaagaatgagtctcacataaagacccttcatctcccagtggttagtggaacttggagaaagaagggtcaagtgtggtctgtgctgggtttggccgaataatcccgtgtgagcatgctctgtgtgctcctagtgtgccatctagtggttaagtgagccttgccttaatgagaaaaaaataaaataaaaggtctttgcttctcccttgtctccctgtactgtcaccgagattttattggggaaagaactattatttgggaaagaaaaatatcattttctcagcctcaatacattgaacagagactatgtggggaaaaccccattgtactgccacagtaattaaacagaccagacattgcaagttgatggtgttcattatgttcattttgcatgacacagagaaatttctcccactgcattttatagatgtaggattcacatttattgtgtgatgcacagaccttgaggatacagcttgccctgatagacacatttctcaattttatgtatttagatcccatgcaatcactacccacacgaggacatgaaggtttccagtttcccatctgcctcgttcctccctgccctagtcaatcctccctgagaggcatccgttctcctggaatcttgtcaccaggggggtttagtggcatcttcacagtacatatttctgggccttatctttcagaaagagtaagatcctgacatcatcctttaataacttgtcccaaaaagggaagtttgctcagaacagtctaggtttgctatttttcagaatccaggtgtcagtgacgttagctgttctttggtgactttccttaccaagctcctgtggtgatgactggatggatggatgattgatagatagatagatagatagatagatagatagatagatagatagatagatagatagataacagataatagatagatagatagatagatagtattttcccagatatataggtagatagatagatagatagatagatagatagatagatagatagatagtattttcccagatatataggtagagagagagagagagagagagagagagagagagagagagagagagagagaattttcccaagggactctgtgagcatccaagtcaattttcaaagaagtcgcattatttttgagtggcatctctgagacatctgtcatagaagagctgatgcattcatttctgaaatgaatgtgagtatcatgtcaccagccagtgctctgacaccctgctcaaattaagccatgtgcagcactggttctgaaaccctaatggtgagacaggctcccagcctacaaccagtagaatgctacttcgtgctgtgcagaacgatacagttgatgtgtctgtatagtgtgtatgttaagaagcagagctatagtaaaggttttgtaattatcccagacattgctcgagcttatttacttggttactagataaacaaatgggagtcactccttctggatgcagctggaaatagaaggtgtaaggtgcgaagatccctccctgacagccttggcacttagccttgtttagacctaatggtccctggtctgcaaagtgacatttcaagaaacaagagccacttagcacaaacaaggtggcactgtcaacattatcccaatatactctttctcagaaataactagtgtttttttaaaaaaaaatttttgtcatgatcttggaaagtagaagatgtaaaaaggaaattataaaattccctgagctaccaaaggaaagccaacttgatttttaacagctttaatgtacactcttactttctctggctttccctctcccttccccctccccctccccctctccctcccttttctctttctccctcatgacttttccctccattattaaaaattcttaaaatatgttttagggccagagaagtaacttagtcatagttgctggcccagaatatgcaagagatgcctaaacacaaaaggtagactagaaataaaaatatatttaatacttagattcatgtcataatttctggactagagatgaaaactaatttgttagcaattttatatcaggatatttctattgtttgctacttttaaaatacttatagtttggtacataaaatattctaaatagaaatctttctatttcttgccatattgagtgaccagaacctctgatgagaacactaatgctgacttccatggtgtgtttctgtttttaaaggaagtaactcttgttttttaaaatgctcaaatgcttattaaaatcatacaaagaaatccattttcaaaactcaacaatggccaggcatttaatctcaacactcaggaggcagaggcaggcagatctctgtgagtcgaggcctgcctggtccacaaagcaaatctaggacagccaggggttggttacatggagaaatcctgtctcaaaaaagtaataataaataagaagtaacaaataaacaaaccctcaacagtggagaactggacattatcaaatgtctttgatgtcattgaaataattaggtttgtgctaatttggcctattaatataacattaatagatttccttatattcatcccagtattaatatgtcagtatgtataaagtacaatactacttttagtttctaaattcagtctcatgctactgctctgaggatttttgtgaattcatgaagtgtttcttttaacctctctgaaggcatccatcatactgtttgtttaagttctctccatcttttccttctggccttgtataagtagaccctgccttaaattcaagcacagtccaacctcttagccacttagtctgtgccaggtgtagccctgccttgcctgtccaatctgattggtcccacacaaagcgctgctgcccttgtgggtgatggaaaggctgccctgtgacaactgagagaaggaaaggtgacccacaaatcatgtgggtggaagggtgtcatgtgactgtgacagtgacaggtctggatgacaagtcagtctccaaggacttggaagcatcacaggccgacaggagaaccagacttcatggcatctacctctcatggctacctgctgcctctgatgacaagttatagaattgcttggttggttggttttcctaactcgagtatatatcccaacacactttaaaaactaaatacattcattataccctaataatttttgttagaaataaatctttcaaatactcacataaaggcgtcactttcaaaggatttcttctaattttcggttctttcccaggggaacaattagaaaattaagagccctctaatgggatcacatgcagataaaagcctggctctcatgcattttctaatccctgctgtgtgaggcatgtggtcttctctgaacatctctttcctggtgcacctttttttcccttgcagtgtaacattgggtggtggtcttctcactgcagaaagccaaaatcaacttgaaagacaatgcaggccttcttaatgagttgttagagaatcaaatctaaaagatgaatggaactcatagagggagccatgaatggtgacagtgaaggggacattggacagattcagggatttcacttctaggtggagagtcaaaaggtgtacgctagaacagatgtttgtgaacccagactcttagaagcaatatttaccatagccaaaggatggaagcaggctgcgtgtctgctggtggatagatatgtaaacacagtgtgctgggtgcaaatagttcaggggagaagtcctcatatttgatgcaaaatggataaaccttaaggctcctgtgcttgggaggagccaggaaccactattttatgattccacaaacaggccctagaagcccagctttcagaggcagaaaatagaatagaacttgcttcagacggcgagggtggggagctgctgttcaagggcggtctgagttttgcaagcgatccgaaggtgggtggtggtgattcctacacaatactgtgagtttacacagtgccaccgaagtgcacacttgaaaaagtgacagttttttaaacagtgaatgggttaaaataactcaattggaacagtcagggcactacagcaggagatgactcctcgggcctgcttctctttcgggctgtcccccctggaagggaggaggcagctgggggagtctgctgaccttgtgctccatcacaatcagtaggactcctttgagaaccagctgtgttcagtaatgcctttcttctcctcctcagggtgttgaataccacattatttgaaagttgggagatcgtcggaccctacccttcctggtgggtttttaacctgctgctcttgttactacaagggttgaactgcttctggtcttacctgattgtaaaaatagcttgcaaaactgtttcaaaaggcaaggtaagttaaaacccactctctccagtacgtcccagaaatgtcagggtatttttggctcctctgaaatcacttgtttctgatttcatcaaaatcggtgctatttcttcccaaacttccttgaaacacaaattgaattatttccttctcgttggttcttttttttaaaaaagtttctctgttggctttgttgatgatgatacccatagatctgtatttacaatttagcatttaatgatggcatattatttattgtggaattttttctccctgtctctttaatgttctctgattatttatgctgagcagaaatttgatttagtaatgtatttccttttgttaaaaggattgctaggtgtcatgtgcacattgaagtagttctttctctcaaaacaaggaataaatacatctgcaacttttcctacaaaacttacttaagtctgttttaaaatggaatcgagaggctgacgtaaatatatcttccagagcctcagccccttcgtcccgagcagggacatttccagatcattctccacactggtttcttacttcattgtttgttctcttcctcctgccatcctggaaggctgggaagtggaaccctttgcatgtaagttctcgtcctctctcttccttctggggtgacacttgcctgctggagggttgcacaggtgctttgttccagccgttttcctgccgtctaacttactgacactactgggggctttgtggccactgtaggttccatggtctgcaaaaggtatcagggagagtttcatcactgccttttgtgggaacaaatgaatcttgctgatccaacaggaagggacttgttcttttctattggtccctaacatgttggctaacactgaaacagatcagtgtgaggtgagagaagtaagccagtcgatccatgcagtgcggaaaggagacctgggctacaggtgtccggatctgcagaaaacagagagtagcacttgccctctgtcctcggtgcggtccacaaactcagctccttccacaggaaacatctgagcaacctggcatgatctataaggccagtcctcagcatcaccatctatatatataaatcctgagtattttgacaaattaatttcataggagataaggttcattttttccccatgacttcttattcttcaaaataaatccatgtttcttttttctttttttgtttttttttttgttgttgttgttgttgttgttaaatttttccagacagggtctctctgtatagagagaactatactgaatctgtagaccaggccagccttgaactcacctgtgtgcctcctgcatgcccagatgcaccaccatgcctagcttgaactcaggtttcttctcatttggatataaattaaatcagcatgcatcgtcctggggcatgacaataactaaaggtggagagtgagtgcagtagattagattatttttgtatttatggcattctcctttccaccggccctgtcgtcttacctctaactgtgattccgtcatctttgtgaaggaatgatcactaattacgttccccagccctggcttcagggtttgtcctctgcccctggtgcttaaacctaacacagaaagggccctctcgtccatgggctctttcctctgggttattttgtgacattctaaattcccccctttttctttgacagtatcataatggtgggtttttccaaatgtaatttagaatcaacttactaggcatgcaaattaatactctctgcatctggtgtcctgtactagcacattaatttgaaactaatagatttataaatataatggaacttacataatacgtctttatgactcatgcttttaagctgaaatactcttatcccccagtcatttgttgcctcagtatcttaagtgcattgttgttctcttttgtttttgagtgacattgtcaacatgaattcattctcacctcagagggctttggggtgaggcttagctgtgtgtgatatttaggtcatcgctagttagattggaacagtagctttccgattttactgttccccatctctacacacctagaaatgattatgtccctggtccctagtggcttcccagtagtagatcccaaggccctcgagttgctgcatttgttaattgtgcagagaagatctgatttgagaagccctcagtctcagtaatttagaaatgccattgagaaactgagactgtctctcagccccgcccctagaggatcactgaaggccaggcttcataaagccaggtcaaaaggctcctctgagcatccaacttaataattagtcaaatgaagctgagtgtgttggtacagacatataatgccaggactcaggaggcttatgcaagatttctgcaagtctgagctacacagtgagacctggtgtcaaaataaaaattgactagttaagtaaccagtgcacttacttgaagctcgtaaggccctctaggttaaaatgctggctatagtttagcgttatgtaggaaagaattcaaattatttcagttttaaaatcaataaagtacttacttgccacactgtaggatttttttttctgtactccatgttaacatgcagatgtatatcctagtatcttattttcctgttcatattacttaatgaaactaatggaagattgaagaaattggcacataataaagaatttttgatgatctggcctatagtttttttcctggcaaatgttaaaagctatctcatctagaggattgttagaatgtcttccagtgccatttgtaattttagcaaaaaaaaaaagaaaagaaaagaaaagaaaagaaatgtgaattaaatatagaatgaattacaatcccaaatagcaatggtttgagctagtgtgtgaatatctctattagtatagtaattgagagttaacattaaataattgtcaataagaatgtagtcattattgaataaattgatttgtttgggtgcagttcctaaaggaccatcctcatggtacagatgccaccatcactgtggttaagggcaggagtcatggtctaacattatctctgatgaaggctgcctacccttcaggctctgtgacgcctaaactcagaaccaactcggtcatacaaagcattcctgctgtgaagaagggaccttgctaccagaacagtgctcttatctgttttctttaacatgtgaataagttcatcttcatgtgcggttgcatgtgctgcttgctgggcacgcccaaccctgctggtcctaggaagctggtgacactcccatctttgtattctgcaggtatccaaggatgaccggagtgacattgaatctagctcagatgatgaggactcagagcctccagggaagaaaccacactcttcaacaaccaccaacggaaccagcggtaccaatgggtacctcctcactggtccttgttccgtggatgattaactacccaaaactataagttctgaacaaagggaactgtttgttcctggaagtatttaataagttgcaaatgcagttcctttcatgatatctcatcaccagagacaaaaaattaggattcttggagcattctgaatagtgtactgccatgtgtcctgtctgtgaatgaagaaatccattatttctatgtaggcatgctgtatgtaactgacacagggaacagtatttgcatttgtcttaggatattatttatttttttatttgtttgtaaatctgtggacaaacgaggattccttcactcctttcattctctgggctcgtgattgacagtaaggatgtcctgtctgtgtgtgccccttttccacgttgtggtccagtgtgccgtgagcatcagctttctttaccccttagagcaaggaacatcccatgccagatcctcacacagttcccagtaggttggctttccttctgttctgcacccattttctatttgcccatacagttggtgaccattgccccacgtgagtctaaacagggtgaaccaggtgttttccttgccactcttggtgatcagatgaaagagagtggctatggggggactttagaattttacaggaaaccgccttggtttgtctcttgtgcacagacatgagacttcttttctgtggtaggttgtcgggggttgactatgttggtaacaaagctattttgccctccagtgaagtcagtgttctgagtatgaaacagtatctcttgcataagttcccagatacaagggccccacatactgggttctgggagtctcgtaaggatagccactgccctcaaccaggtcttgccatgacttctaccctattagtccagtcttctgtcctgacgtataaaaaagaggaagccccgaatattctgaggcaggaaaagaaaaagtcttgtgggagttggcaaagacttccttccctgcaaagcactttattgcaaccagctttcaagagaaagccctatctggtattagactttgtattttgctgagtaaaataaatcgaatgagagaaagacaattaaccccttgccttcctcctcaaatgcatcccataatgactttcttgttgctagaaacatccaccccacaggacaagtctgttccatttactgctctgacgacttgtgagggctcctgtgaatttctcttcaagtggagctatttccagaaaaacagtaaaaaattctactggagaatagcagcaacagctgtggggaaaattgccaaagaatacgtcatgagccctcacccacccccaccccctgcagccagtgttacttttgttcggctacagaaaccacacagatgagccgaggactagacccatctcatcctcagtaaaaaggaaactgaatgggattacaagtactcgtgagtcaaacatctcctaaaacaggactccaaaccagtcagcgctgagtaaccaatagcaaaacattacagtgcatgacggtcctgctcagaaccacccccactccatttggttcttttaaattaaatctgcatacccataccttgaagcctgtgagttaattgttaagagaagactcccgaagaactcactgcaatattaaatcctcctccacctaattacaaaacagtattttctggtatggtccagacaataattttcaaagcttggaagcatgtctagttgttaccacagaagacagtgcaagtgactgtgtgatttgagccttgctgatatattagccaaaacagttatatgtctaggagtgaaacttgattgagtgtttgggtttgtgagaccagtgataagacacgggaggtactgttagtaatcagagcatttgctcaaatacaaatggatgaaaaccaagagcagtgttgagacagtgaaagtttgtcatcagctaagctaaggaacctacccatctctagttaatgtctgggctcatcctcccaggtatgagatggttttgacaaccactgtgtacttgtatttgaaccatgtgacactctttagcacagaagaattttaagatcaatctgtaaattcagaagaggtatataaaaatgaagtaagttgatcctgtccatatcaaaggcagctctaactcatcttctccacggaagttactgtggaagactaggggcacgctttctgactgacacctttaggttggctcagtctgcaacgtgtctgttgatttttctgtttcgtattacctttgtgagaaaataattctgcttggctaattgaaatggagtttgtaggctttttctggaatagaatattaatatctctgtctaatgttctcccaaaaatggacggataagactgagaacagacactgtccgcggaatcgtatccacatatggcaggccatagctctcagaaagtctgacttgtaaatccagctttaggttagttctaagtggtgattttggtaattagcatagcttgtggtgatgtctcctccttcctggttgcatccaaactccccagggtaccaaagtgtgtgtagaaaggactctagaaaaagtaactctcatagcttacctagatttagtgggggggaaagtaggaaatcaagtagactttggcctagagtcagtaattgatatagccgtgtctgatttatgtgtgcatatgtatgtttctccaaaaactggtaaaactaaatgattactgattcatcatcgtcctccatattcctttccttagaaaaaaaacgaacgcattcaaccatgtcctaaacagactttccttctctttagttttgctttgcaccagctgagagtagcaaagccctctcagcctctcagtcacagagctccctgagatagactcaggtcctggagcatctgctgccacacataggacacacccacttcactatcgcagactcggccccgtggatgttgagagcagaggagcaactgcaaggatcagtattgtgggtcattcgagtattcattgtaaaagtgcaagtgattgccatttaaccccatggttctaatgtctgctgaactgccagacagagcatatcccaaattatcattagattgtgtcattggcgtccaatgctgatgaacaaggcagcaaaggcacggaccaagaaagaccagtcatctttagtccatatggtaggtgagtctcaaactggtaaactcctgtctgagtcatacacttagcaaaagcactgcgtgctaccatggtcccaaaaggtgatgacatagcctaggtacagaggcggtactgtctgctgtgtgtaagtacacttattgatgttcgcagagtgacaaaaatgtgtccctgctgtgacatgacataggcctatactttttgagcaaatgtattgcctttccttcactttagatagaaaggtctgaatcttccaccttgcatttaaatctcattgttacttgggctaaggaaaaatgagacttcgttgttataaaggacattggagctcccctgagtctgtgttgaccagttcttctgagagaacgaatgggtgcctttcattgcctccaacccagtttacattactaatcattttggggtaaatcaatgtcagagttgcctggatatttgagtattttccttaatttgaagaagaaaaatagtgtgtagaattagcccaaaggtacggatgtgggccatttatcagtatgggagatgatgtcattaacccagagaggccgcaacacctttggaaataagaagttaagtgctggccctttgtgtaatgtttgtggtactaaggctcctacctgcctttcactttccttgtcttcggcttatttctgcttagtcaataagtcgtcatagccctgcaatggttctaacacccaaaggagaaaaacatcaaacaagaccagagtcgccctgaggggatagtgatcacctggctcttgtgtagcaagaaagaaatgtggagggctctaactactgcaggtgccttcaagtatgctgcccctgtcaggaatgatcataaacgttcttaaagtgaaacaagactgtttccttacatgtatgcttcccactatcagcttctcttccagaggtgagattgtgccattctccaaatgctgtgagctaattagcaatagtctaccaatcacattttagttccatgaactgatgggctaaaggagggccctcctttcacctatgtgtacatagcacccacccacccctaggaggcgccaagcagatgtgggggagccctagccaaagctcttgaaactcctgtaaccaccaatactcaaaagcagccacttttcatggagaaaatcatgttgaagaacgtaagtcaccataagtaatgagatacgtagacacccgaataagaaggttcgcctcctgcaggcttttgtgacttgatgcatcccaaagcctttgacaggaagcatcggcaggtgcgtgcattgagactcccaccaatgccaagtgacaggaatgcatcggcaggtgcgtgcattgagactcccaccaatgccaagtgacaggaatgcatcggcaggtgcgtgcattgagactcccaccaatgccaagtgacaggaatgcatgggcaggtgcgtgcattgagactcccaccaatgccaagtgacaggaatgcatgggcaggtgcgtgcattgagactcccaccaatgccgagaagttgcaaaagcctgggccacagggtgagttactgtgtctgcatggaatcgggcactctcggattgctgggaagcgatgaggaggcgctgttagcctggagctggtctcctttagctcattcactcacggccttttaggcttctggaactctggtaaaagaaagccagatgctaacatttttctgctttcagtttactaatgactgttagatcagctcttcccatcccttcttctctgtctggtgccattttcaggaggtgggagagggtgtgcccatgtacacctgtctccttaacacaggtccacgaatacttagcttcctgggttgtgtgtcttctgagaaccatggtacagcgtcagtcaccatagtttctgtgctcagtggaaaattttgatttcattcatatttttattctctttacctatgataaatgtcataaactgtaaaactctccttaatgtgaaactttttttggttttttgttttgtttgtttgggttttttttgttttttgttttttgttttttggtttttggttttttttagtgttagctgcaaagctacaaagctctggaatggttacattatgattctggaacgttcgctcaaagcttaattagcataagtgtggaccacactccagcttaattcccctgtgcacacagttctcatcactcctgtgcccaagtcccagtcatttcccttcatggcctgtagctgtcagagaaaggaatggtggttaatttggaggtttgtttctcttttccagctttccctggggactagaataagtgacagaacctcatttgttttctaaagatagttcggtgcgtgagcatctgtcagaagtggaatggtgtgccattagccaattagaatcactctgtactgtcactgtgtttttgctgattttttatatgggaatataattactcgttcttgatctttggaagtaattgttattatgaggatcattttactttggaaacactttcataataaagataaacattaagagtacagcatgagtgtcctttattgtaagcatcgaccagctgaattgggaacacatccaacatctctgggtgggactgtgtcagagctcagccatccggttatttcttaatgattctccaaggcgttgtgaccattgagaaatactgttatatcgtcttgtgatatgctaaagtgtctccttgaaatttagggtgcaaagccttcagtgttaaatctcacggtaacaccccattctggaaacagggtttctagagaaagcaacctaaatggatcagaggatactgatttttcccaaatcgtgaaggagctatcaatagctaatctctaaagcacaatgggaaacagcccgtctctgtgcatgcgcctcagaacagcttgcatcagcttgggatccgggctctgcatttctgggccttttttcctttttttttttttttttttttgcatctgtgcttacatcatgtaggatctcagaaggcatcagatagcaccgaaatgcacttagacaacaccacaattatatttttaaaaacccacttcgaaaaaaaaaaatcttagcaatactgatgtcatcctgaacagtgatccgattcacacagtaactctagcgaagtcaccagaatttctctgaaacacaaactataagaaaaatcactcattgcaaagctatgaacttttcctgttctaaagaggccgatccgcgatgctaagagcatgttttccagtggccaaaatacaacttgggtttcccaaaccccttcctgctaagacaaccacatccaacgcaggcacatgtttctgccccctgattctctttctaccagtcttgaccttgctttatccagaagagtggtagcagtgacagcaacactccatgaggtcaagaagacaaagcagagggaccaggcaccaggacctactagaatactaatggctctcagaaccagtcattgggctgttggagccttggcatctacagtcttcattatccccaaagactaaagcatgaaaacacacaagttaagagtttggatatgaaatgtccctctccagtttatatgtgaaaagcttggtttctatgtggcagtgccatcttggtagatgggacatagatgaaggagtggctcttggtctcagagcaagcttttcaaaatcacacctagtcccagtcccctacttttttgcttccttcttgacaagaagtcaagatgttcctaccgccatgatgctctgcccaggttcatggaaccaaaccagcacagactgaaccccctaagacagtgagccaagataagttcttcctcctttcaagtgcttatctccaacaggtttgtcacagtgatgccagagtgcttttcacagatttacgccattcctcaagcactgaaaaatttaaattccattaagtttatataagtgaaagccagaaagcactgtcagatggttaagtttgttgaagagtcaaggaaaaggactatttttagaggtgaaagctggattaccagatcaaaccaatgtcaataagacaccttatctaggaaatatgaaaagacatttttctttcctgtgctggtaagagatgccagtgagggggtggggtggggggatatatagaggaaaggccatgctgtgagggctgtaaacctggttagtgagcaagtgcccttgtgtctctgctatctgttggctggattcagctggaaagccaccatgctggctcagcagaggcatgctacaggactgagcacctcgctgcacccagcaaagcaaagcactggggcagcaccacaccaggacgtctgagcttcagctaggacacggtccatcacagagcataatacatgtggcagacacatcattctgtgccaaaaggaaatgtggccagtgaggagagagctgtaagtcatgagccatcagcagtgaaaactccatctgttagggaacaagaacagaaagatgatagaggggagagcatgtggactctgggagttctgctgtgggctccaactctgctcactcatgtagggggtacagaagctaagctttcattcatgatgggggttaaaggagcagttagaagcaagctaaaaggaactacggaaagtgcacagagaaaaccagagctaatgagctagcacagtggcatgaaaatgcagcaagagctgggcatggtagtgcatgcctttaatcccagcacttggaaggcagaggcaggcggatttctgagttcaaggccagcctggtctacaaagtgagttccaggacagccagggctacagagaaaccctgtctcaaaaaacgaaaaaaaataaaaatatagaaagaaaaagagagagagagagagaatgcagcaagaagttctaagcttcaacacccatgaccaacgttttcttaataaaaaacaggaaatgtccattagatggcctgagaggctaatgctcaggttcctggctgtatccttcagccattcaaaaatacaggatgcctgggattgtaactgagaatggagatagaactattattaatatagacagtttcctttcaaggaacttacaatctaggaaggaaggaaaaacaagcagatgatgcaataaggagctacacataaaatgtcagcaggagaacgcagattaaagcagcagggctgtcactgtacatgtcgggttgctcagaatattgacagtgccaagtgccaacagtgatggtaacagtgctcacatccagacacgtgggatacaggatgtttcatccactcagaagacagctgatggtttattagaaaattaacatgttctggctcggcagtggtagcacacacctttaatcccagcactcaggagtcacaagcaggcacattgctgggtgtttgaggacagcctggcctactgagttaagttccagcattgccagagttacacagagaaaatctgtcttggaaaacgacaataataaaaacatgttctccagaacaatctagcggtcattgtctttggtgtcgatgccaaaggataaaaatgtgggcacataaaatcttgtacgcagatgttcgtagcatctttatccacaacttctcaatctcagaagcaacctgaatgtccttttgtggatgaatggacaggtaaattctgctacatcccggggattattgaaaaatgtttcagtgctaaaaagaaatgagctatttctggccgtccatgaaaagctatggaagtaacttaactccatattaccagatgaaaaatagccagtctgagaaggttaaacgctgcatcatcccaaagtagctgacatcctggggagtgggagggggaggaggcaaaactggagataaaagaaaggggctttgggccactgatggctgctggggtcgagggagtcacatttccttcagatgtgtcccctccacatggctctgcacccatgctcatactggcagcattaactggacccaggggttttaaaaagagcacatgaaattaggaggaaatggtggtggtggtggtggtggtggtggtggtggtggtggtggtggtggtggtgatggtggcagtggtggtggcagcaatggtggtggtgaggatatgagaagagtttgaggggagagaatgaaggatgaatttgatcagaacattatatatgaaattctctctctctctctctctctctctctctctctctctctctctctctcacacacacacacacacacacacacacacacacacacacatttagaagatattgggacacagacacacatacatgggtgaagacacagttaaaaaggcaccagaaagagagcatgagaggcttcaaaagaaaccaagctctgtgacaccttgatcttagagttcaaggctccagatcgtgacagagtaagtctctgcgtgtgatcttgaccaaaagtcagagaaataatgacaaaacacatctccattgagaaagtccacccacagagtctttggtattttgttacaaaagccctttgcatttacttaatagactttttcttttagtcaatgggatatgtcttaaaaactggtcttggctcgcagaaaattgaggcagaaggtagagaaatatccttacatactccttggcctattcacacaccacctcacacatagacacctcacacttcatgtacagttgctagccctaacaccccagctccatcattagtttaggggattctcatagtgttgtgcatttgatgagtttgaaggcacgtatgacatatgtccaacattatggagacatacagaggattgaactatcctaaaaatcttctgtgctctgcatggctgctgcttct

SEQ ID NO: 1241 - DNA, 1212 bp, Mus musculus
cgcggccagagggaggagtggagcggatcgcggagcctgagagtgcagcggccacagaggaggcggcggcaggcggagcggcagcggcaaaggctcccggccaacccagcgcgcatccccagtgccctgagctgcagagagctcggaggagcgcgggagcagcgacaccggagtggacaaagcaagatggcagggatcttagcctggttctggaacgagcggttttggcttccgcacaatgtcacctgggcagacctgaagaacacggaggaagccacctttccgcaggcggaggacctctaccttgccttccccttggccttctgcatcttcatggtgcggctcatcttcgagagattcatagccaaaccatgtgccatagccctcaacatccaagccaatggaccacaaactgcccagccaaatgccattctggaaaaggttttcactgctataacaaagcatcctgatgaaaagagattagaagggctctccaagcagctggactgggatgttcggagcattcaacgctggtttcgacaaagacgcaaccaggagaaacccagcactctgaccaggttctgtgagagcatgtggagattttccttttacctctatgtatttagctacggagtccggttcttgaaacagaccccttggttgtggaatacaagacactgctggtataactacccttaccagccactcacagctgaccttcactactattacatcctggagctgtcattttattggtctttaatggtttcccagttcacagatatcaaaaggaaggctgccaaaatggcaaattacgccaaatttcagaaaatgtgtgatctcctgtttgtcatgtttgccgtggtttttatcaccacacggctgggcatatttcctctctgggtgttgaataccacattatttgaaagttgggagatcgtcggaccctacccttcctggtgggtttttaacctgctgctcttgttactacaagggttgaactgcttctggtcttacctgattgtaaaaatagcttgcaaaactgtttcaaaaggcaaggtatccaaggatgaccggagtgacattgaatctagctcagatgatgaggactcagagcctccagggaagaaaccacactcttcaacaaccaccaacggaaccagcggtaccaatgggtacctcctcactggtccttgttccgtggatgattaa

SEQ ID NO: 1242 - protein, 397 aa, Mus musculus
RGQREEWSGSRSLRVQRPQRRRRQAERQRQRLPANPARIPSALSCRELGGAREQRHRSGQSKMAGILAWFWNERFWLPHNVTWADLKNTEEATFPQAEDLYLAFPLAFCIFMVRLIFERFIAKPCAIALNIQANGPQTAQPNAIKVFTAITKHPDEKRLEGLSKQLDWDVRSIQRWFRQRRNQEKPSTLTRFCESMWRFSFYLYVFSYGVRFLKQTPWLWNTRHCWYNYPYQPLTADLHYYYILSFYWSLMVSQFTDIKRKAAKMANYAKFQKMCDLLFVMFAVVFITTRLGIFPLWVLNTTLFESWEIVGPYPSWWVFNLLLLLLQQCFWSYLIVKIACKTVSKGKVSKDDRSDIESSSDDEDSEPPGKKPHSSTTTNGTSGTNGYLLTGPCSVDD

SEQ ID NO: 1243 - DNA, 293084 bp, Homo sapiens
ctagtttcttccacggttcccaggataactggaatacagctgtccctgtggatcccacctattccttacacatggctcaaattcagtttcttggtctcctgagattcaaaatccagctctataatttttctaattttcttcaggttacattctcttaatttgcttgtttgtataaactgccaatatcaaaacccagtctctttacaggtttccacaaaatgacactggatctaagcagtttgtgtttaagatgtttatagtagctttgtggcaaaaacatcctgaggaatcgcacagtagatgcatgggcttctgaaacctccctccatccccttatctctcccttccttacttcgttcctcactttctctgcccagtaaaagctaattctattcatctcagaaataacagtcactcattcccagatttaaaaggctcagcctaccttaaaggcagattatttcaacaaagtctgggtcttcttttcctaaaacaatgaaatgttcatcaatttgttacaatacataataacaataacttcctccttttaaatgttaaacatgttacattatctcatttaatcttactttaagcccaggtggtaacaatatgattccctaggtttcaagagctggagtagtttttataaggaaaaatacattactactggcaaaatccggcccttaaacctacattttctttttaactccaaagttggtactcttaacatggttactaaacatctcctcaggatttccatatccctcaccattgtgattgttattcattggataaattccattcaaacaaaaagtgttcctttaaaaatgtggcctcctaaatgaatatagtctttagccatgaacacaaggaagtaactgaagtttgcaaacactggccaatagataaaaagaaggaagaagaaacgagaatttgaatccctgtaaaatcttcagttcatgaatattttcttttacctggcctgtttaatttattttgtttcctgtctggctcctgaagtcatctgagtttgcaatccctacttttaaataacatggcacattcttggcttccaaggatttgatagttacagttataatccttcccgagcaacccaataggtctatgacttacggtaacttctaaccttgctgtggaatgaatatgaattgcctgtcctctaaaactactgattggcataaagtaattcagcaaatgagtgcacctagaaaactacccagcttctacatatgacatgacctttctattctctatttgtctttacattttttattctatacagaaaactatatgctataaggtcattcatgttctgtagaattcatgaagatcttaaaacttcagaagtttccacttttctctgaatcaacactgctgattgatgatttctatgatgcctatctgttaaaaaatttttcaagactgggagcagtggctcacacctgtaatcccagcactttgggaggccaaggcaggcatattacctgaggtcaggagtttgagaccagcctggacaacatggtgaaaccccattctactaacaatgcaaaaattagctgggcatggtggcaggcacttgtaaccccaactacttgggaggctgaggcaggagaactgcttgaacctgggaggcagagattgcattgagccaagattccatcattgcaaaaaacaacaacaacaacaacaacaacaacaaaaaacaaaaaaaccaaaccaaaaaaaattcaagtataactgaccaaaaatagcacaaaattcatccgaactcactaggcaaatggttgataattctgcaggcaagttaggcttttgttgttgttgttgttcagaggcaaggattccctgggtgacatggagtataactcagagatatttctaatgtcttcatgtaggagtgattagtcaaatacatagtgctgtgatttgttcaaggtgatgataccagacgtgaatcctgtcgttgaattctagatccatctatccaacacaaaaatactattcctattttataatttgaaaactaagatgattttgctgggctttgcaagatcattgtctttattaacagattttctcatagtcataggtgtgaaaaatagaatgggtcattctgtgaggtagtgagcttcttgccatcagagatgtttagtcatagctcagatgatcacaaaagatgaattgtactcattggtatatgaggtcccttccagtcctgaaattctttttctatataaagtcaataatttcaagcaatatttcaggttatttactcttcccataaattggccagataattgcttttctgtttctctttgattataaaaacctttgcataatggaaagtagaacttaggcattctggctcataaatctaaatgtgtccccaaaagtttgtgtgttggaaatttgattgccattgtggcaatattaagagatggacctttaagagatgaacaggccatgagggctctgccctcaactggattaatgctgttgtcttgggcatggattagttattgccaaaagtggattcgtgattttaaaaaggggtaagttcagccccattcatctctctctgtcttcatatgtgcttgcttgtcatgtgatcccttctgccatgcgatgaccctcaccagatgccagtgccatgctcttggatttcctagcttccagaaccatgagccaaataaacttcttttcttgataaattacccagtctttggtattatgttatagcagcaggaaacagaaaaagacacctgccccctaaatgctatttacctatatgtatatgcagagaatgccatcattgctgattatgtctagcaggtggttgaacatatgcataaagttacagatatataactaggtgattttaatctctaactggatagcccacagtcagatcaacctagctgtttctcacttttctttggtagtcttgcaacacatttggcctggttaaaattttaatgtgattctaacacaacattagtaggttgaagaaagttgcaaggggaacattaacatttaaatagattttgattattagagagaagtcagaaaatctagccagagatttggtttagttagaaataccagagtaattgatggctgtcagtattagaaaagattttccagaggtagaaactgtcaagataaaggagggaggagaaagatcttcaacatctgacatggttgtatgaaagaatgcgagcataggagggagcaagtcctgctggagaacttccagcaataacatgtactcaattcccgtctgggttacagaccttaactcagcctaactccaatgctgtgagttaaatactcatttccttatgttaagatggcaggagaggctgcgttttctgcactgctatcagtgatcttcatattgtggggctaaatcctccttatttcttgcccaaactagtcctccccacctcccactcaatattgtataaatgaaaactcaagagattagtacatggaccacaaaaatgagtgtagatttaagacagttttgccaaccacagcaaggaggttttacacttatgaaaaacaactgtacaaataaaatttagcaatatttccatattattctcagtgacaaccaggttcctttaaaatcaatgaattgtgtgtttaaactgagtgcttacctttagtattttcctggtgttttaagcaacaaataacttttatttgtatatatttttaaaacctacaatagttgagtgtgtattatgtaccaggcatcatgcttattgctatgatcagagataaaatacagttctcactaaataaacagaagtattcctttgcctcatcctaaaggccatttttaatctggagtgccagcaatgttttgtttattgtccttcagcaaatcttcctcactttctacctttgatcatgccttttcaaatcttacttattctttaaagtctgattcatttttgtgtcttccttgaagttcccttgatctcttcaaaacagaatgtctccttcctcctttgagcaggaagcgcttcttgtctgcagtatttgcacacttgtcacatactgttgagggccatcttcagtggtgttggcatgtattgttatctagcttttcatgtgagcacatcctgctccccaaatagcttttatgttctttttgtagaacaagtactatatagatttgtgttatgcaacccatagtggaaattcatccaaactgctggctgatctcctgcatctaaaaagtggagactgcagctgggcgcggtggttcacgcctgtaatcctagcactttgggaggccgaggcgggcagatcacgaggtcaggagtttgagaccagcctgactaacatggtgaaaccctgtctctactaaaaatacaaaaattagccaggtgtggtggcacgtgcctgtaatcccagctattcaggaggctgaggcaggagaaccacctgggaggtggaggttgcagtaagccgagattgcgccactgcactccagcctgggcagagcgagattctgtctcaaaacaaaacaaaacaaaacaaacaaaaaaaagtggagactgcttacaatgtgaactcaaattaagacctgggtgtggacctgagaatgagagataaagctcagctttgttgatattttccagttgcttggaaatcagggtgtattctcaggtgatgttttctattcagaaaacaaagcatgctttcctaatatgcagtgtaactggtgtcacttcccctgaacacatttttttttctccccttttctcttgccttgtccctttaccgaccagctacttactttctcactgggctacatattagtctgatgcataaattgtattttggtttcctggggcaccaattagaagtctttcctgtacatttacaaagtagctttcttgagaggtatgctgtgctatccccctcctgtgactaacttccctggggcctcagctgagctcaggatagtgttaaagacatgtactcttgctgtgcacagtggtatgcacctgtggtccagctatttgggaaggaggctgaggcaggaggactgcctgagcccaggagttctgggctatagtgcactatgccaaatgggtgtctgcactaagttcagaatcaatatggtgacctcccaggagcaggggattaccaggttgcctaaggaggggtgaactgacccagactggaaactgatcaggtcaaagctcccatgctcatcagtagtgggactgcactccagcctaggcaacatagtgagaccccatctcttaaaaaaaaagacatgtgctcttagagtaatgtcttggatagtgggatttttttgcaaactgaaatagcagcaactcaacccaaaagcagaatttatcaagctatgaggctgttccacagaacctaaggatgagaaggtagttggcccctaggtattaaatggaacctggagctccaatgccaacaggactccctgtgtgtctcttacctttaactctgcaggtcttaactctacaggtctgctttattttttttctcttgttgtagactagcttctgctttttctagctgtgtaatgaagcaagggggccaacagcttctgagttggaatccttgaatctaagcatccagagaaagacagtcttgacccgactcacaacaccggagtaaggcttttattgccatgttaggccaattgtccatccctggatcaataaaatgtgatcatatttggaatgatagtttactctaatatgtttctggggtaaacgtttagatgcaaagtggtaggaaggggcattggctggaggagttctactagacagatgaggagtaggtgtttgctgaactgtacatgggtatagagaagaatagtttacaagccctttctcatatgttatcttatgtgagcctcatgacagtcagtgacagaggcaagacaggtactgttgatgcacaaatcacacaggagggtattaacacgctcttagaaacaaaggaacttatggaagattcatagaaagtactaaatcctccttttactgtccaacaaaactcacccttcaaaatgttcctgaaatcccaccaccttctcaaagttgatgaatgggagagccacattatcttttgttctcctattagtttagcttctaagttccagggaagtgtagtttcagggaagcaggaatgagagaaaaggagagtgagatgagaaagaggagaggaaatataagggggtgaattactgagtgggtcacaatcttgaaataaaatgatgagtttatatcagggggtgagttactgagtgggtcacaatcttgaaataaaatgatgggtttgtagcagggggtattttcagagaggctgtttgaagccattgtgtgtgtccgaggggtggggaggaaaggaataaaaatgtacttactgtcttcattgcccatgatcaaagtcagatcccagggcattaactcaccaacagtattatacatgcttggggacatagaaggagctgctggagagcacagaagccatggagtaggaagcaaggtactatcaggtcatacaggaaggagtgacatgagaaaccaggggtagtcacagaagaagtctggctggcccagaaggccaggctctgacatgtcatgacatgtcatgacatgactttcggacacaaagttggtgagaggtcttaacaaacctctgtctatggcctacgagaatgcagctggtgccaaggcatgttccagtgttactgagaagctcaccacatggtctagagtggtgatggcgacttctactcccaaatgaagactcacttcaatgacacctcacctccctcaccccagaattgaccaattccttctttatgcccacactattctacacacgagtctaacatggatatataaatatttaacacaattattcagattttttttcttctccttgagaagactttttggggttggagtaatgttgattcatttattcagtagtttattgagtatctacaatgtgccgggcagtttttttttttaagtgctaggaatagaacagttgataaaataaatacaaatcttttaactttctgaagcttacattttagtgcatgtctgtgtggatgattgatgaagatataggtacaatatatcttgtgttgacggtggtaagtgtcttggagaaaaacaaagcaagataggaagagtggtggtggggattgagggatgtagattaactagggtggccagggaaggcttcagggagaaaatgacatcagtacagagcaaacatggatgttcgtgtaaaaagagttccagggacagagaagagcaagcacaaaggctctaagacatagctggtgtgtcccagtaagggcagggtggccagtgtggactcaggcagagtgaaggagagagaagagtaaataagtcagagttaatacggaaccaaatatcacaggtcattggaataatttggctttcacttgggagggatgaggaagaagcagggttttcaccccaggggtgatctgacaaatttgcataggatcacactggctgagaatagactgtagaggggcaaagggtgaaactgggagttgggaggttactggagtaatgtgaattagaagtattggttgtttggaccaagatggtagcaggggaggtggtgagagatggtgagattatggttttaaaatggtgctgatgggatttgggatggattggaaaggaggtatgagagaaagagagaaggggaaaaaatgactccacatttttggcttgagccaagactacaggaggaagagatttcaaggggaagattaatagtttggtcatgagatagcttttagacatctgagtggtggtgttaaattgccagtggatttaagagtcagaaggtcaggaaaaagttcatggctagagatataaatatgggagctattagcatgacattggagggcatacagatgtcattaaaagccacgagactggataaaatcaccaaatgaatacattcagatagaaaagtgaagaggaaaaaagactgactcctaggccactataacttctaggggttagaaaagtgaggagtaaccaggaaggagactgagaagaaatggccatgaaggaggaagaaacccagaagagtgaggtttctggaagccaagtcaagaatgttttaagacacacgacctgacaactgggccaaatgctactgacagaggtgttgtgaactgctatgaactgaatgtgtgtgtcccccaaaattcatatgctgaaatcctagttcccaatgtgatagtattcagagacagagtctttgggaggtaattagctaatgagggtagaaccttcatgaatgggattagtgcccttataagaagatagggcactaatctgtgtttcctctttctgtgctctctgccatgtgaggatacacaagaaaacagctgttttcaaaccaggaagaggatccttgccagacactggatctgcctgcatgttgatcttggacttccctgcctccagaaccgtgaggaataaattctgctgtttaagccacctagtctaagcagcctggactaagataagaactgacctttgtgtttagcagcatgaagatcacaggtgaccttgggcagtttcaatgcagcagaggagacaaatgtccaaatggaagttcaaaagaaaatgaggggagagaaattggaagcaccagtataggccattcttcagtttcactttcaagagatagagtggaaagaggggagggaagagtaaaagaaactccctctctctgtgtgtgtgtgtgtgtgtgtgtgcggttatatgcccactggaaaggtttagtatagcctactggcagcaccaggcagaaaatgaatgtgagaaaaatgaacaaaaatgccccagaaccatgtatacatgggccatggaatgaattcacacatggctcctgtatcaatggggaaatgcattgcgggagggaaggtgcctgggttaggcctcacaggcctaatgccttaaaggttttagattcaaaaggcagaaataatgagcctgccgagtagcacagtggaggttctcatgatgtgccaggtcaaaatgtggtctagcagccttttcagagaggttagttgagaggggtggttttacagaacgctgcagttgctatcatcatcatcatcatcatcatcatcgtcatcaagtagcaattaataatcaaatagcaattaagtgcctaattttttgtaccacctcataaatcaatataggggggcttgttccctgggggagctactttgatgagaagcagcagtataaaagaccggaaagtcaaagattggggaaaggcaggcgtggggcagaggcagaaggctcttgccaaaccatcctgcctcagttcctgatttttcaccctgcctctccaagcgcgggagtggaggatcctttccctcccacttcctcctttgctctttacccctccccctccccccccctttttttttttttgctgtcctcctggagcagggctggttctgaagcttggcggcagcccctacctgctgacccaccgcctccgggcgcacgggaagaggactgagagccctgaaaccccagcggggcaggagccagcattctgagcatgtgcgagccagccagggggctagggcggatttggggggtcgactttaggtcgtcgccctaagcgcaaagcgaaagagcggtgagagcaggggcgggcgacactccccggagcggtgcccctgcgcccagggcgcagcgactgcgccctgccctgcgggtgtgggcgagttggccgcgtgtgtgcctcgctgtttgacgcgaagacgagccaatcagggcgggcggcccgagctgccatgtgacgggcaaggcggcccctttccccagcgcggccagagggaggagagaaccggggctcgccgcgagccttcgagagcagcggccgcggaggaggcggcggcggcgggcgggagcagcggcggcggcggcacaggctcggggccagccgggcgcgcatccccgggcgccctgcgcggtggagagcttggcgggctgcgggtgccgcaggacaggagtggacaaagcaagatggcagggatcttagcctggttctggaacgagaggttttggctcccgcacaatgtcacctgggcggacctgaagaacacggaggaggccaccttcccgcaggctgaggacctctatctcgcttttcccctggccttctgtatcttcatggtgcggctcatcttcgagaggtaagaagggctgaagcccctcctcccctccccctgcgcacacacacgcgcgcacacactcgcgcgctctctggcgcacgcccccgcgcccccaacgctcgcgttcacgcctcccaacctttgtgttcggggaggggttgctgacccccctgccccgctggctttctgggagccagaaagggtctggcttgccacggatttcctcccgggcgccggggaggagccgcggagcgttagggtcgccccctgccctcctcctgggccctgctctcctcccggcaagggcaggcgaacaaaggtgagcggtggtcgggctcaggacccgccgcattccgcggggctcgcccctctccgccggcgcgccacgcaaggctgccaggcagggcttcccgccggggcccgcgccacccacctgacagccaggaacgttccggacgcgcggcccggagggaggaggaaccgcgcacacttcaatctttatgctccggcacacggattgtaggggttgtgcttcaaaagaattcgccagggacttcctggcttctggtcgctgtttggtttttatccgtgaaactatcaggcccacagtcctggcaaataggggataatagcatttcaggttattagcggtttctttaaaagaggatgtgacaggacgggtccacatcctgcaaaatggtgatattaaactgataaccctgtcctgtgaataatcataaacttcttttttggtactcgaaggcacttaaaattttgaggaattgtcatgcaattgtatagttcctcggtttggttggatatctccattgtgtcacatacaaacttgtgttattctcatggaattcgttttcgtcgcgaaactagattgtgcctgccatgcattctctgggtgctactgaaagaaaaccaggacagcagcacactttttttttcgtaacagaaaatattatcttcccctttcttgtaccctccccttcctctgcccaattcatcagtaaaggctgaatttcttagatcacaaagtagagtttagattgcatttctcgcttccactccgcctttcttccccgccttcaactcaccttggttttgtttcttaagcttttgctggtacctcatttgctgttcctctttgcctgaaaacgactgttgagggtggcagaacgcgtcttttgagtcatttgctgctggacgaggcaacaaagcttcatggggacaaaaagtatcttttgtctcaggaaggtatatttttcaccggacagtattgttgcttgaaaacgaagtcagctgttcgcctgcagaaattgacatgcacaaagcaacagactttaagacctatgtttaaattattggaatctaatacagatgtgtcattgatcctatacaaaaaaggatcaaaaaagtcacagcagtgctgtgaaaaaatgggtgtgtttgcaggtgtagagttacctctagagcaaatgtttggttacagaaaatatgaactctatacagttttgcaggctctccaaaaacaagcagactcagggatagcaggtttgctctatgttggcacatagtaggggatctacacacaattgctgaattatgataaattgtgtctgataaattctggctgggctcacttttagatagataatgcatttgaaagagatgtgcagtcttatgtgttggagaacaaaagcatgatctgtgcacaaacagccgaattttcctgacatcctccttctctatgctgattccaggctgttcactgtgtttaaaaaaattaagttgttagaatggagatggctttgtacttagattgtctctgcctctaaaaagataaacactaatgtgatagttgaaaactggaagttcatttttcctctttctaaacattttttattttctttctttttttccataatcccatgactcgacttagagtttacatagaggggtgagctgctttcaattgtcagtcacagcaaatgtcctcatattgatataaagtgagttggtcagtttccttcaggccattgatctaagtagaagagatttaatggcctgtatggaaagtgaaagtttatggttaatgttcagaataataatccaatatggcacatatgtcacagaatgctactgacttttggaagactatctactttgtttcttcctatgatagctctgtctttaaccattcagaccttctcaattctctgaaaatccacaatttagttgtatctagagttagaagttctgcatgtttctcctcttctcaaacctaaatgacatattctgggatccaacctgtgaccttcatctcagtagcatccatcaagggcctgaatcaataaaacagaaccattcagtattatcactgctacaactcacattcaatggccttctagcattttgtatatacatccttttcttttgcagtattctataatgtatacgatgattttaaaagcctgttgtgaatccctttgtagaatgaaatgcttttgtaataggaataattctctcaagattcttctctttgtatgctttgtcatttatttcaaagctgagaccatacctaagaaatacccgattatccaagtctttattttacattaagtgaagtcagtaatgtccttgttgaggctaaaatcgtgaatttgaatgccttcttctcagtcttaggtatttctctctactaagagaaacatcaaagaattgactgaaatgggctttgcccagttaaacagtcctttctttttattttcatcccggctgttgtggtgtggatagtggaggcattggtagccagaacatgtcactttatgacagcatatggacagcaatatggaagcccagcatggttggtaaaaaatggggcagcctaaggtcaatgacttttggctgagtctgtgaagatctcaaagcttggtggtttttagcatagcctttataccatacttaactccgggtaaggaccaggaccactgtagcgaccaattgattgacagagtaaagtatgtgggtttttttttttcccccaactgggctgattctcttagaataaaaattgtataccattatattatgttaacttgatcacaaagaacaaaatgttatttattaataatatagcattgtcatctgtttgatgaattttcttgatttaatgcttgtttagattcagtaagccattctcaggaactataataaatgcttcttccaacttcactttttcaaaaatgtgttttgctgtggtatttataaatgtggaaattgtgctgaatctctttagaaataaaaattctttgagttattgttacaaatgttaactttaatgctgtggatttaggagagatgcaggaagtatagatcgggaatcagaacactcaaattctagtcaaaacttacactggggcagcctcctaatttatctctgtttattttctcatttatgtgttgaggcaaatggcctttgtaacttattgttttcaccctcctgattctttgattcctgtggatcgtctgtgcttgaaaattactaattattatctgatgaaactttgaagcggctgaatgtcttttttttttcttttctttttttttgagacatgttctccctccatcacccatgctggagtgcagtggcatgatcatggctcactgcaacctccacctcctgggctcaagcagtcctctcacctcagcctcacgagtagctaggaccacaggtgcatgctaccaggcctagctaattttttgtaattttttgtagagatggggtctccctgtgtttcccaggcttgtctcaaactcctgagctcaagtgacccgcccaccttggcctcccaaagtgctgggattataggtgtgagcccctgcacctggtcaagagattttttttttccacagaaatattgtagtcaatggttttgtttcttgtatttttcagctgtgttttgagtcaaaagaatcatttgggctgttatcatttatgctccaaaaagctacagtatttcagaataaccaacaaagattctatagagaaagcaattgttccgtttccttagacctcttttaggtagaacccagagtaggcctggcacctcttgtgatgactgggtaagaatgagaagctaattcctgccagattggctctcaaaatgctaggctatgtgaggagtgtcatcctttgggaggctgacagcaaagtctggcttcactcactcagcccaagaatgatctgctgtcccaaaccttcaagaaacgacagggtctcagttgtgtctgagggaatgtctggccagcaggctttttcttttagatttattgtccactagccttgggtgaggccttctaggatagttgagagagcgagagagagagagagtgtgagagcgtgttcctggttgctggtacttagggggaaaggaggggagtgagtgaatgactactaggaaacagtgggggtatcaggtgaggttcattactgaaggaatttgttcctcagtgttcctatagtgtaccttgtaatgaagagactgatctgatatattttaaaagactgtttgggaacaacttgcatacaaccatggttttctcatgcaatcagtgctggatgttaaaccctataagtgttccttatttagcttgttaagttatatggcaatattcacattaaaactatggatacctgctttgccagagactagtgtgtgaggcaagagtgggcttcaggccgggtgcagtggcttatgtgggaggatcacatgggcccagggaggctgaggctgcagtgagctgtgattgcgctactacactctagcctgggcaacagagtgagaccctgtctcaaaaaaaaaaaaaaaaaaaaaagtggtctgcagacataaatagcttctcatagtttctgaatgacagtggatgttttgttggagaacaacctaaaatcagagggttggcattctttgcagaacttagtacagttttctcatctagtaaaataaaaagttttgaatttacacagtgaagtagtttggctatttgttataggttaatttatgggtaaaaggcataacattactgttaaggggcagtgccttagaatggtggaggaggtaggtgagataactttaaattatcaccatgatgtaatgtcatctaggattatgaaattaataccctgagttcacttatgacttctctgttgaaaatatttgaattctctatggacagggctagttttctcttggattcctggttgtaaagtgtttcagaagtggttgctcttctgtgatggggaaggacaggtggcagcagagggaaaatgggatttcaggtgagtttcctccatcagcataccagttccatggctttgtcagacattgctgcaccatcctcaggctgccctcttgtattttactaacttgattaaaccttgttggtgaacactagaacctaggcccatgttgtatattaaaagtttcaaatgttattgcatacacttacatttcttcctcttaccaccaggtgaaaccagattttttatttatttcttacatagtcgggactttcaaaattttattattttttttccttgctcatcttcttttgattaatttcttaaacacttttgaatcagaatactggagttccagattgtatgtctagttgtgtcacttaatttttcttaggaaccattttttcatttcgttttttttaaaggtaaacaggattgcctcgtatagcacagtgatcctttcatattagcaatgccttgagaatctttattcttaggattttattctttggtttcttccccctggccaccttttaaaaatgatttcataagttttttttggtctctctttcctgacaccataatctttattgacatctatactgtagcatgattgaacacaaaaggatgattcttttatttatttacttgttttttgggacagggcttcactccgttgtccaggcttgagtgcagtgccataaccttagctcactacagccttgaggctcaaacaaccctcctacctcatcctcccagtagctaggactacaggtgggtgccaccatgcctggctaatttttaatttttttttggtagagatggggtcttgctttgttgtccaggctagtctcctggcctcaagtgatcctcccatttcgacctcccaaagcactgggattacatgtgtgagtcactgcagctggtcagggtgattcttgcaatgtctttttggggtttcttgttactaatgctgtggatgattggatgcatggtctgaagctatgacttggtgcttaccatttattttgtttgatgtttgactattttgaatgactgccatttttaatgaacaacttttaaaattttgaaaacaatagtaacaactaatatttattccttaatgagttttttactttacgtggttactttatttaatcctctgtcaggccctgtaaggtggatactaatttttccccattttatggatgaaatttaggattgagaatttaggaaatacacttaactttatataacttaaaatagcagtgtaggaatttggaactaggtttcttgatctaacaattttggtgtctcctattttaaagtaaatatcattcaatcatactgtatatatatggttttatatttagccttttgccatttaatgatataatctgaatactttccatgtaattgaacttattcaaaaatatttttaatgactataagctattctacactgtggttataccataatttacttaaccagtgttcatgtttttgttcgatatttaggccatttccagtttatataagtcttttaattcttgatgatttcctaaggaatgtttcctagaggtggcatttctgagcccaaaaggataaatgttttagtgttcttgatggatacaaattgccaaattgttgtccagaaagattatacccattcgtatttccttatcagaatatagattattatcattggaaaaaatctggaggctgagcacagtggctcatgcctgtaatcccagcactttgggaggctgaggaggttggattgcttgagcccaggaatttgagaccagctgcggcaacatggcaaaaccccgtctttacaaaaaaatacaaaaattaactaggtgtggtgttgctcacctgtagtcctagctacctgggaggctgaggtgggaggatcactcgagcttgggaagtggaggttgtagtgagctgagatcacgccactgcactccaatctgggcgccagaccaagatcctgtctcaaaacaaaaaaattttttgctttgaattgaaagaaatgttactgttataatgtgtgttcttatattgcttatgataaacttatttcagatattaataattggtatttaattttctgtgaattcaggtatattttcatatggggatgaggagatgtagtttttatcttttttctgtaagaaattggtggccttcaggttttttcttacttcttaatgtggagtggtcttatcgtggtctttttctctggtcacatatttatactttttgtgtgtgtgtgtgtgtgtgtgtgtgtgtgtgtgtgtgacaagggtctcactctgttccccaggctggagtgcagtggtgtgatctcagctactgcaacctctgactcccaggttcaagtgattctcatgcctcagccccccaagtagctgggattatgtatttttaatagagatggggtttcaccatgttggccgggctagtttcgaactcttgatctcaagtgacctgctcgccttggcctcccaaagtgctgggattagaggcataagccaccgcacctggccttatactcttttatttatttcttcctcccgactcttccccacatgctaagtcactatcatcaggaagggagcttctcagattttaaatagtggaaggaatacactcaagaggatgatgaagtaactgatattaacactttattatggagagtgaggcagagagaaagggctgggaggaagactgaggcatcaagattgaatgggtctttatgagggaaagagggatagagcctaaattaaaaaaaaaaaaaactactctactcctgtaatggattatctaaattctgggtgagtgagaccccatgtcaaaaaaaccaaacaaacaaaaaaagacttattattagactaatcactagggaactacaaatcaaaaccactatgagatacgcattaggatggctgctatcaaaacaaagaaacaaacagaataacacgtgttggctagggtgaggacaaattggatctgttgtgcactgttggtgggaatgtaaaatggtgcaactgctatggaggttcctcgaaaaattaaaaatagaattgccatatgatacagcaattttacctctaggggtgtacacccaaaagatttgaagtcagggtctcagagatatatttgtacacccatgttcatcattcacaatagccaaaaggtgggagcaaccaaagtgtctattgatatgtgaacagctaaacaaaatgtggcatatacatatgtctccatttgtttgggctggtacaacaaaatactgtagactggataattcataagcaagagaaatttattgctcacagttttggaggctggagagtccaagatcaaggtgtgaacagatttactatctggttagggcccactttctgggtcacagatggcactttcttactgtattctcacatcacggaaggggcgaggtggctctggggccacttcactaaggtcactaatcctattcatgagggttcaacccttgtgacctaatcacctcccacaggccccacctcctaacaccatcacacttagttattaggtttcaacgtgaattttggggggacacaaacattcagaccatagcaacatacaatagaatattattcatcttttaaaaggaaggaatttctgctacagcatgaatgagctttgaagacatgcttagtgaaataagacagtcacaaaaagacaaatactgtaggatcctacttatataaggtacctagagtagtcagattcatagacacaggtagtggagtgatgactgcaaggtgctggaggttggtgcagagtttcagttttgcaagatggaaagagtcctgcatggtggtcttggttgcacaacaatgtgaatgtacttaatgacatagaacagtgcacttaaaaatggttatgatggtaagtgttatgctatgtgtattttaccacaattaaaaaaaatagaagatttgctgacttgaaaggtcactagaaattactgccttcattttcttggcttgacatttttctagttaggaacaaacatcccagttctgtttatctcagtttcatcaagcactgcttttttttttttttaactgcttaattcccctcaaatctaggagagcgcctcttctttccagaatcgtctggcataggtgggtgggaggtgaggggtgatagaaggaaggttttaaacccagagagctcttaagtatcccgtttttttagaaggcacttgaactgagcatatcatttcaagtccatttgttaatatgacaacttaataatagtaaactggctgcatgtgtagaagaggagagcaaagtgtctgtagaaaagcacattgcatagtttcggaggagtctaggattaaagtcaagtcaccctggtaagtacacaatccatttaaagcaaaccaggataatgagataaaactctccttagcagcctaggccacaggtatatcctatggaagctctgggtgagtgaagatcagatttcatcttcctccctagctttcagtttaattttccatgcattttacaagcaaatgattcaaacacttgagtatttaaagatgatttttctcaaatgctgcatattataaaaacaatctgattagaagcagtcaggtacatattattcaacagtagtttttgaagtttaatgtttggtcattgtacaaaatactgttttccgtaattcatctgtaagaatgttttgggcagtgctgtttttcttctttcttcttttaaagaagaacttcctttttctctctactggtcttcaaagtgggcttctcttggaccactcctgccttctattcctacttttgcttttactattataacttagaattcggttgtggggcttgtttttgacaaggctgaggttagagatacacaaatggtttttaattgcaggagagatgcattccttcactaggtaaccttttgcacacagtgacctaagaataacatttgtttgtaactcgccattgtctacataaatgtcacatcttatctttgaggttttcaggttacaaagctactgttgctctcctgaagctgtgattaagattgtattttctttctttcctttcctcgattcctcccccaccttccttccctctcttcttcctttgtcacttcctcctttcttattattactgatacagaccctttcttaaagacacggggaagtctttgagagaagaggagcagcatagagttaagagtgggggagggtgtttagaaaaccatctaaaatcttgtccagggacacagtttggcaagtatcagagtaaaagctgccagctagtctaagtggctctgtagatcttgttttaatagctcaccatttcaaagcagaataaagtgacttggtggtttaagcagtggcagttttgcacacaatagcttgagtgaagaaaaactgagaatgaagcaatcagtcatttgggcattatggaaaatgggagactaaaagggctttgtatgtcagtgggtgtgtgtacatctttgcatggatagacttgataacagtatatttaaattgtgttgctcttttgtatatctattgcaattaatagacatgtatatttatttctagctagaattgaaaggaaaatgggtgggatatcagaaagattacagaattcaggtttaaattcaaacagtgctgtttatcacctgtgcagtaatagacaacatattctctcaaatttggtgtcctctcttgtaaaatggagaatatgccactttgcagtattgagcactctctgcaaaaatgtacataaggggattcaatgaaacctggttcgtaaaaatacacgttgtgtagaaaataattgataccagagtacagtattgagtacctgcttgagaaatactgttctgtaatttgattttctaaaataaaataaatgggtatatgtgtgggggggcccaaggacatggggtcatggtacaacttgtggaagcagtagggcctgtttacatagttgatgctggacctggaggatttacttgttctattgaagagtaaatatttagagttttagacaggccctgaaaccccaatcttttcagcattgtgccagtttagggagggaggatgcttttaagccttttcttctcaacagttaatgatgtgggttgtatactggggacctgtggaaaaccatttctaatggtggagtgttaaacaagtggggggccgctgtgtgccactgagagcctggcctctgctctggcttctgtgcctttggagagagacccccatccccaaagatggtctccctctgggtggagttttctctggaagctgcctttcagtgatatgcagatatctccacctacttcccctggtctagccccagtgatagttgtttattgcacgcagtctcaagggaaaattgattgggtatttgaccactggtaagggcacacatcaagtttggcatttatattgacttaagacctgggctgtgttttggccctgccacttgctagctactggtctaggggcaaattacttaacctctgcaagctcagttttcatgtgaaactcatagggttgctgtgaggattaaatgagataatatttgcattgtgtttagggcaatgcctagctcagtgaaatagtgattacttgttcttcaggtttattcacacacacaatcactttctgagtgtttgttgaaactcttattttcagaaatgggacttcactggccttacctttacatcatagacatttaccatagacctctttcctgcatagatccccattttccctagttagggctgtctgtgtacagagttttactttccctattctcttttcccttctctctctttttttcctctgaggaagatgttgattcttcttcttgtagctggcagaaaacacccctagcagcttagtgaggaatggggctttgtccacttcacactcatgtaatgcactttgctgagggtgtacattaatatttagacagctcagaaacatttttcctaataagagcctcccagaaataggacagcctcaagacagacatttattgatttctttcagaattttaagcctagtggattatcttaatttgatccttaagaaaaaagaaattcagtctagtgacattgggatcacatttatgaaaatggaaacattcaaaattagctgaaaataatatatgtatgtattttttttctttaagagaaataaacctgcacccccaaattggaacttccattggtgtgaatgtgacgaacctaggctgactaaattaattcagaaggaatttgcacctgctttcaactataggcacttttccagctctgcatagtttaaatataatttgtaagtagttagccatgtaaataatttaacaaacctgctcatttcttaaggctttgttagagacatcttagggtgatgaaaggggacatttgtggtgggttgtctattaaatgaggaagtaaggcaaagatgaaaccacaatgctgtataacgacaaattaccaaaaattgcccctgttttaattcagtcatcatttagggtcatagactttctactgaaaatggaaattgaaacttagtgattcagagatctacaagtccactgtgggtcagacaacagtggtgtcctgaagtggggaatggtgggagtgatctgctttgggtacacgcagtaaggtgatgtattagctgtagagaattaaaaaaaattggttaaaagttagtcttttattggcaccatgtgaagccagttattaacacagaattgatagaagtgataaaatactcctccctaccagggtacactgttcctacccacccccacaactgcaataccactgtcagacactgtttcatggcacaggtgaccagaagaccacactttgagaaatactggcagagataaaaatactactccacctcccactttggatatgaagatacgcagcctaaagagatgaatgaagtgacttgtgctctgccactcactcaggtcctggcagagcctggctgacctggaaccctagcagtgccattatagagtaaccatttcatcctgatttgagattgtctcaggaaatgccatttcagggaaaattgaaacagctggtcactctacctgactgctcagcctattaaacccatcctgaggtcaggacagtaactcatgcctgtaatctcagcactttgggaggactgcttgagcctgggagtttgagaccaacctgagcaacctagtgagaccctgccaactctaccaaaaaaaaaaaaaaaaaaaaattagctgggcgtggtggtatgcacctggagccccagctaccccagaggctgagatgggaggatcgcttgagctcaggaggtccaggctgcaatgaactatgattgcaccataagaaatggcttctctgtctcgccctaagggtgacttagagtgtttgtgggaagaagcttccttggtgactgaggggtgttgcctgcccccactgtccctgtgccacatttcatggcttttttaaaaggtgattaaaaggctccccattaagtgtgggttggagcttctgagggcagaactgtgtctgtagatagccagggtcagttcctggtgtgctaattcatccttagcatgcctgtgttactgagaccataaacttttttgttttccttctgccttcacccagtgtgtgttaagtcttgcttgttaagctcccacacttaaatggctgcttgcagaattgcaaagggactagggagagaacaaaaacagatatgcaggtggtggttgttaaccagacaggatttctaaggagggttcaggcagtcaagtggttttgtgtatgtgttttatgttcatagttttgagttttacaatgtgtgaagcttacttttgctagcattaggtatagtttatttgaaagaatgaggctcctgaaataaacatgccagtaaactatatcttagagtttaatgagaacagtgctaggaaattccagctcctcccaaggctgcctcgctcagaggcaggcgttagctgtgggtctctaagctttaaacaggcttaccagtgtcaatacttgtgatgtccctgccccaggctgtccacacctggttagtgtcaagccatctaagattgggcagaaggcaagtaaaccaatttaggaccatggcttaccgcttatttgactgctgaatcctatttgcctagtgctttcacatcttcttaccttcccctctttgccagaacctactctgtcttaaaaatgtcctgggtaaaaggaatctcctcattgggaaggggatcccttttaccttttggccctgagccctggttaccagatggtctgttgttctcacatttcccagggtaataatgaatttggggcaaatccacttgcatatataataagagctttcacctcaacttttgctacactttcaatgttatttattacatactactttttagttttttggcatttaaaaactatgtaatagcataaaataaatgttctttctgttctcaaagataacgtcatggttttaggctgtttttctgatttctaaaaaggaaataaatttgagttatttggttccacaatttaaaacaactgtttattttttggtaagctgtttccccctttttcagagttaaagatgagacaaaaatactgcatttaaagcagaaccagacctgggtagccgctctctccgtcaatcgccattccacttgccagccaataactaattctttattcaggggtcaaatataaggaatttctttcctttcagattgtctaaagcttttctaaattgaatgcgcttagctgctagaaacttccaccttactttaaaagccaatctaagagtccggctgctgctctgaatgagaactgccaaagtaagtaaatagtatatgattatatattttgggtgttgagaagaggttacacttatctttgcaggtaaagttgaacatagtctttttgtttctgaggcccagttcgaatctgtggagagagggagagatgtagatgagagtgtgagtgcagacgctgattgacccatgtgtgcacaatgaaagggagcatagattcctgagttgggcttaaaattccatcttggagaaacgctgattcagtcaccattataccctagtgggtattagctctaaaccccagcactcaaacttgcttagcaaatgttcatatggcattgttagaaaaatgctatttttttctaaagcagactttttattctccctgtatagcattcatactgaaacacgcataaaagtataccttcttgtacagctcattgaattatcacagcaaagtgaatacaccatgtgttcattaatcagaacagagatcaaggatcagaacattactggtaccccagaagctttaaaaaccgtttgcagtatgaagaggaaaggcctaatttatgcagcaaaactcactattccacttaaggaatagtaggttccttatagaggacgacagaagctctggtacttgtcattaccaatagaaccttctttctttgtgttaagtctgtgctcatgcttagatatgtgtgtgtgtgtttatgtacaaaatctgattggtatttggccatcgaatttaataaagaaattactgaaaaaggaatgggaagaggatgtcagaatgtgagaaagtaagagaaaggccatagtcagaacatccattttcttttccaccttatttgattaatatactgttttataaggataggcgctagtaaagagacaaaaatacagtatctttacatctttttctttttaaaagataaacagattaaggatgttaaataggataggtgtataagtttgttgacaaactggatcttgttccttgaatatagatggtctcactcaatttgtcatttgagacaatggaaacaaaggtatccgatactttggatttgaaaaaaccagatattttgaacacaaaatattggtttgtgacattggaatactttgttttgcaaataatgtctttaaaacttgcagtgcttgcatttgaaacattatgctcaccttaaaaacgtatcttttcatctcaatttttcttatttaagctttttgttctgtctttggatctatcttttgttccttttatccttctcttcttcaggaatatcagttatacatatgttagatttcctttgtctgcctttcatgtctatcatcttgtctataatcattttaatattattagttttttccatgtggttttattaatttttttcacacctgcctaccatgtatcttttcactcatgtttgtttaagttttttcttttgttcttaatgtttctgtaatcttaaaaaaatttacccttttattgtgctgctatctctgtttgcatttttttcagttttataatcactttactaagtcctagtatctctacaaaaagggcacaacaacattcttccaaattattcatgtttaagatgattgttttttcaggctacttttaaatggaaattctgaattcttttcggttttcctagaaatgtaatgacacaatatataataaatcttagtgcattattgtgtcagcagtaaccgtttgttagtttctagggcattaattttaatttgtggattaaaaaatgtttcattatctaacattaatgctacaaaattgtgtttgaaatatttagaatatgatacctcttgatttaacagttattttaaaaattactaatgatatgtctatagtctcattaggaaactccccatacacgaaaaaaataaaaaaataaaaaaacacacagccagttctccattttcactgtttcttctatctcactttcttccctgatgtgtccagtattagtagttgatatacatgtccttttggacctttttcaatgatttgtctacatatgtatgtatatggaaagataaagtttgtttaaaacatgaatgatgccaggtgtggtggcacgcacctgtagtcccagctactcaagaggctgaggcaggaggactgtttgaggctaggagttgaaagctgcagtgagctatgattgcacctgtgaatctgtactccagcttgatcaacacagcaagatcatgtctctcaaaaaaacaaaagaaaatatgaatggtatattctgagtcttgctctgaaacttatttgtcttttttccacgtaaggccatgtcttggggattttccaatgttggtgaatgtagagccattttctttttaatgtgatggcacagcatcccgttatgtgggtgtttcctagttgatttaacggcttttccataaatgctataggaaacaatgcagtaacttcattcctatacagacttctttgcatttaggtgtttttgcatttaggtgtttttccctaaactgacataaagaagtagaattgctggatcagagaatgtgcagagttaaaattttgataaatgcattgaaaacctttcaagaaaaattataccaattgacatccctaccaacgcagtatgaggaaacgcattcctcgtgtcctcccaaccatgacttatcctgcagcaaatagaatgtaattttggtaaacttaatctataaagaaaacaactattttaacatgatgacttttccaaagaacagaaggttgggatgctggttaggaaggaaatttaataataccataacaagacattttgccactctttctttaaagaaatgggaatgataatcataaaatacagtgagaaattcaagtttatactttgaactttgcaacatctattgcaaacatttatttaacaaacatatttcacccttcccaactcattgccttagggttacttagctaacaggaatggtgagtgttgtgttatattcctttacaacaaataaaagtcaaccataagttaccttgaacaagaaatcagtaatgaagaatatctgtccttgtatggggcttcctaataatttattatcagaagaattaccttatgattaagctattctgatggtagaaacattttcattcagcatgtaaacaagcaacaagtaaccaagattcagcaacaactatgaactgagaactcaaaaagactttaaatctagaactaggttgttcttcagtacagttgattgcctgtcccaccctaccttttagtcatcatattatctcatcgtgcttgtctacttgggaaaagttatttttttataccaataggatggcatgtattaacattttttgacttttatgaaaatgttcaaatatagagaaaagctaaaaaaaagtgccacgaacactcatattcttgccaccagaattcaatgattattaacattttatcatattttttctgtagcatgcaaagtaaatcgcagctattatgacgcatcaccaatgagtagttgagcacggatctttaaaaagccatcctagactgtctctaagaataaagacattctaggatggctttttaaaagtaactttttgaaaagcaattttatatcgtgggatttattttttctcataaaaatgtacagcttcaaagtggtagagaacttactgcgtatggatttggtgaaatgacagggtagaatcaatgattaaatttaatggatgtataaacaacaaggctagcagtaatagtttagtgaaaaaggagtgattatatataatatttttattggtattttatggaaattgtatccaagggtttgaattgggaaaccgttaagtttactagaagtagctagtttcttaataatatttcttggttttagaaaattgatataaagcacattggctcataggtcaggctgttaggcttagttacagcaggcaaactttctcaagattattggctcctgccccagtgtggtagtgtttgtgttctgtgggtcgtgtttggtcttgcaacatggtggcttcaaggcttagaatcagacatttgttaatgtcgaatacaactaccctctcacatgcaagtccgggctcactgtttttgttagctaggtaagcctaaggcactaagttggaaaaggttcaaatatatgacatatgtttatgaaataaatgatcacaatagatgaagggttcaaaattacaaactaaaataaacttgtgtattattactattgtttctctttctgaggtacagagaaagagttgcaaaagaggttagcctatcttctcaaaccagttgttggacagaacaaggaatggcagcttccagccagtacattaattatgctcctctctggcatcctcttttttttttttaatcacccttttatcaccttgctctgtgtaattctttgagaaggaagctaataaagaaaaaaaaatcaatgcatgcatattgtaaaaaagtatcaaacaataaaatagggtataccatgaaagataaaactctctcctcagagacaaccatttgcaactgccttctggaatattttctatgcatgttcaagtatatatgtcttagggttgtgtcttagggttctccagagaaaaccaataggatggatggatagatagatgatagatagataaatatgttagatagattagataggagatttattagaggaattggctcacatgatcttggtggctgagacgtcctgcaataggctgtctgtaagctggagtccctgcagcatcagtaccttggctcagtctaagtgaaaaggcctgagaacgtagtagggactgcttttgtaagtcctggagtcccaaggctggagagcctggggtcctgatgtccagaggcgggaggagaagagtgtgtgctagctccaggagagacaggaaatccttttcctctgttttttttctatccaagaccccaggcaattggatagtgtctgcccatattgagggcagatcttccccatttaatttgctcagagtcacatactaatctcctctggaaacacagtcatatacataccccaaaataatgctttaccagttctctaggtatgccttaatccagtgaagttgacacccaaaattaaccatcacaggttgctatgacaaaataccatagactggtggcgtaaacaacagaaatttatttttcatggttctggagacaagcctaagatcaaggcaccagcagatgcagtgtctggtgaggcacctcttcctggtttgcagaggctctttgtctttttttttgtatactcacatggtagagtgagggaggaaaggaatgagggagagacagagagagagagagagagagagagagagagagagagagagagagagtctcatagggcactaattccattcatggttggttccacccttgtaattgcttctcaaggccctacaccctagttccatcacactggggttgtaggcctcaacatgcaagtttggggggacataaacattcagtccatagccatgtgtctctacattttatttaacacaactatataagctcatttgcactttgtttttcacttactatatcttgaacatctttttatggaaatattgaaaagtcaacttttttctagtaaatggttgtgcagaatttttaacattttatatagcatataaaatgcatatatttatcataatttaaccactcccctatcagtgcttcttgagatcatttccaatcatatgctattaaaagcaatgtcacagtggcaacttttgtacgtctttctttctttccatgtgaattaccttaaatttctattagtgtgaagtggctgggtctgtttgaattttgatagatattggagaattgtccccttaggggattgtacgtgtttatatatttctgctcactgaaggaaagtttctaacagtatgattgaacttgcaaacgcttgccaattgactgtgtgaaaaatggtattattttaacttgcgctttttaaaagtgaagttaagcacatttttatatgttttaaagccacttgtatttagttttccacgaattaatgtttttgtcttttttgggagtgtttattgttttataaaggcttcctatgcaaaaagaaagaaatatgctctttttcatgtatactgagaatatttgcttatgtgctttgtcttttgacttcatgatatttttccctggctgaaggtttcaagttttatgtagtctgatcattcagggttttttttttgtttgtttgctttgttttgttttttccttagagtactttctcttgaactagtcagtttccccagagaacagcttttctctagcctgcttgatggttataagcctgctgccactgttctgagagctgagcagtgagatgaagatttatcttaatcctgttttggtcactgtactcagtgtcccaaaagccaggtcctctgtgattcaaccttcccaggagtaaaccacccctctctgctggggctggggagagcagtcacctggtttcggggacccaatctggaggtgttcatgttccttgtacagactttggaccagtatcctgttccagctgaactttacaccctgacctccagaggtatctggtgcctacagttgtcaaacatttctggcattctctagtctaaagcctctctactcaaagtgtgaaccatagaccatcagcctctgccccatcaccagggagcttgttagaaatgcagcacttcaggctccaccccagatctgttgacttggaatctgggcatcaccaggtgattctcgtgcatgtgaaagtgtaagacatctttctttgatttccatccctggagacttttatcactggagctggttaggcttcagctatctccacttggcttaatcagttaccctggcccttctgtcttgggtgacatctcttatttgttatcatcatcattagtccttttagaattttaccctgtttaatttaatctttagtgacttaggtctcaagaggtcttggagataaaaacatttactttatttattatgtttaacaaaaattctctctgaatatttcattatgttttttgttaaatttttgagccatcttgaattaattttggtgtgagagatgagaacttcgttaattttggtgtcagaaatgggaactccagattttgttttcttcccccagttggctggcaaatagtcctaacatcatttactaaataatccatatttttttctctgatttgaagtgctacctcgatcatattctaaatttctaccatatgatgacaattttaattattgtaactttataatttatcttactagttagtactaatttctattcatttttagagacagagtttaaaactctgagttaaaataaatgacttctgtatttcccatttattttcatctgtatttttatttattccattttatgtttacttgttcaaaatgatagggtcattgacatattttcatttctaactagatttttaaatatagcaagtagatatgcatgtgtgtgtgtatatataatgtttaaattacagactttattttcttttttcacatatgacaaatttgaagccattcctaggagaatccatttctttctatcttttgggaagggcacaatgtaagtactgttaaatgcaatagaaagtttaatgcatgcttatggtatggcaggcaggttgagtgttgcgatcacttgtgcccaagcctgagatgttaaataccctttcttttttattttgttttgttttttgagacagagttttgctcttgttgcccaggctggagtgcaatggcgcgatctcggctcactgcaacctcctcctcctgtgtttaagtgattctcctgcctcagcctcctgagtagctgggattacaggcatgtgccaccacacccagctaattttgtattttcagtagagacggggtttctccatgttggtcaggctggtctcgaacttccgacctaaggtgatctgcccgcctcggtctcccaaagttctgagattacaggcatgagccacgaatcccggccttaataccttttctggtctttactagcgtgcctgtcctaagcaaaggtcttacatttgaattcttccaccaccatttgttagagctgtgatgctgggtaagctaaagaaccactctgatcctgtgaaatggtgatcattttttcctttcaaatagtgaggattggaattaaggcagtaaagtgcttaactggatccctggcccatagtaggtagcagccactgggttttgcttctttaaacttgtgagagaaatggatatggatgagtctttgagtcctttaatcagcagggcactaagttgttcatctagatatgccagtggagtaaaagtatagggagtcttccccaatgtctttgccttagcatacgtaattgactttcagttgtccacacaaatggagaggagaaatggcagagtaaataacaatagataatgtgttaaacctttatatgtctttatatgtctaggaattaatctgacaaatacttttgcagaatataataataaaatttcatagctggaagagaactttgaaattataaaacctcttaatgttagagatgaaaaaaacagacctagagagttaatgactcatccaagatcatacagtggtgtgatcttagtggcagagctagcatcagaaacgcatatgttaattccaagttccgggttctttatttaccgtttaaggttatgtttgctttaagtgcatatctagagccactaatgtgtctgagaactggcatctgggacctcagcctagtgtaggaaaaagaacatatgagcttggaggaatagaaatgcttttgaacttctgctgagtttttttgaagccagatattagggtttgagccactaaatttagggtgaaaacctagaactggggaaagttatgtgaaatagagtagacatatatctaagtcagaataagagggaaatgttggaaccctcagacaagccagagtctgttgaggacataaattgtggatagaagtcttgagtagcatggggagtccatgttagaaagatagccgggaattaggggcacgcttctatcatgggctagaagtccaggcttactggtgctatgtagagaaagcatgcaggaaatgaaacatcactctgaaagttgctgggcaccaacctgggcttgactcgcagagaggcatctgcagaggatccttgaggagcttgtggtttgaaagagggacagttggccaggctggccgggcgcagtggctcacgcctgtaatcccaacactttgggaggctgaggtgggcggatcatgaagtcaggagatcgagaccatcctggctaacatggtgtaaccccgtctcaactaaaaatacaaaaaatttgccaggcgtggtggctggcacctgtagtcccacctactctggaggctgaggcaggagaatgatgtgaacctggaggcggagcttgcagtgagctgagactgtgccactgcactccagcctgggcaacagagggagactccgtctcaaaaaaaaacggacagttacaggtcatcagccgcaagctgactttgcaactgagcaacttttttttgcctgtgctcagaaagtttctgatttcctggtcaagtcggatcatttgcagctgattggggcttctaggtgtaaacactgaatagagtgaataaagtaattgctgggtaattcctgacccgtcttcattagctccagatctgaagctggcctttagaatatcataaagctcttcaatgcccaatgtttcttttgactttagtattgagaaataaatgcttaatctgttatgtaagtaggaataacgttgaaatcatggcttagctgaaagaccagttgtttctcccaaatgtgggtttacttattgagctaagaaatcattcctatgtaaatatgaacatctattatcctcttgtgtcttgatgaatttgaaatagtaccagcatgaatacatttgatttaggagtagttttggtttagaagttatttccctttagaaaacagcaatttaagcttaggttgaatttttgaataacttcagaggaaatctttaaaaacatttttcaaagactttcaacagttctgttatggaacccttataaatccagtaaatatgaacaattttgatttgtagaatttgtagttagagcacaagtgctgaaataaattatggcatttaaacttgaatcatagtcttttagggaaaaaattaaatgaggttttaaatttggacttggatgaatcttgaatgatgatggttagtggaccttagaaactaaaataggttttcttgagtttatcttgatttaattgaaatgaatttaaatgcatgctaatttcccatttactagctggattaaaatcagttatggtggactagatcaatggacttggaagttcgtggaacaaagccactaaaagacaagtgagtgagtctgtgcagttgttgaagccattagctcttgtgggttgtgtagccatagaagctaaagtaacctctcaccatgtgcctctcacctagttcaggaatgttggcttcccagaaaatgcacagtacaagttgtgccttcagctttctcacacaatgaggcatattatgagtggtcttgcttctgttctgctgtagtgcataattcatgcaaaaaatttgatttcaactgcgtcagcttcaaagggctgcaatcaggcatctatctggaaggatttgctaagagaaaagtttctgttttccatttatacaactgggggactcacattatctttgattagtgcagtggcacggagctgaaggcagtttttcagtttgcaggcttatttttaagccttttgttttccttgaatttctagaagctctgcaggatgaaggctgtgtacatttgatagaattattgggtttatctttgtaagagctcatctctaaatcgaaataaaaactaagtgtctaatgattggaatagctgctaataaaatagccatctcttaagtactggtggtttaatctcttgtaaattccatcatagcccaaaagataatgagttcatgtctcttgcatgtgatagtctggacagtataaaaagtctgaaggcaggagtaaagagaaacagtaataggtttaaaaatgcccagttgataatggcagtagtgttttaatagctgtagtggtggtggtgtcagtatcaaagattatggttaacatttattgtagctgtgctactgccactcactattcttagagccttacatagactatctcatttaatcctcacataaagtctgtgaagtaggtactatttttacttctttttttatagatgtggagattaggctcatggaggtataataactcgtccacgattacatagctattttttttttttctgaagacgcttatagcactttgcttggagtgtagagtggaagctctgtgtgcttattggttgactcatcttggactggatactggttactggttactcaaaattccgagtttcagctttcttctgtgcaaaatgggaggttgagggagggccaatctctttctagagggagtctttgaattttttgtttttaaccgagaaaacagacttggttcagagttggcatcaaatatgtgtctttttcctgacttaaaggaagacttgaatgtcctgcccttgcatggtagggaagcagggatcaagagatgaaatacttaactagctgttctaatattatgagcacgaggagctccctggagccagacttcaccaaaaatttagtccagtcaactttgaatccctggggattgaagtaacgcttcatattctctcacagtggaatagaatgcaccttctttgtaaaaataaatgaataactaggcgtattggaacttaatgagaaaatatttatgaacatctcgaacagtggctcttaaatttcactgggcatcagagtcacctggagagctcatgagaccagaaggctgggtcccacctccagaatttctgaatcagtagatttggatttgaattgcatttttaacaagttccctggttatgctgatgttgctagtccagggaccacactttgagaactactggtatagaatatctctgtgtattcaaaatattgtaccagtatgttcaaagctaaaaggtagactgtgcttattaaaagcacaatcaagaggaagttctacatgtcactgaatacaacaaaaatgctgttgtttttagtacctatttttttctttttctttttcttttttctgttttttttttttttttttttttttttttttgagacggagcttcactcctgttgcccaggctaaaggacaatggcgtgatctcagcttaccacagcctccacctcccgggttcaagtaattctcctgcctcagcctcccgagtagctgggattataggcattcacctccatgcccggctaattttgtatttttagtagagacggggtttctccatgttggtcaggctggtctcgaactcccgacctcaggtgatccacttgccttggcctcccaaagtgttgggattacaggcgttgagccactgtgcttcgctttgttttttttttccaaatcttgaggagggaagaaagtaactgtctactgtaaccacactggtaaggtgacatgtaccttcatagacacataatcattaagtgtcctgaactgagtgctcttcctgtttaacagctggaaatgctgaactgcttgttgatggtgttttgtagggagaatttatgctcacttgtgttttaacgtaagtatgtatgggtttttttcccttcagattagaacaggggctttagtgtctttttcattccaaatttttctcattagaggcatttagcatttaagtcctgatatgttggtattttcagccttgtgaatactcattggaagctgccctgggtccagctttaaggggatgtgaagagggctgtttccacaggtaaatccctggggactgaaataacgcttcatattctctcatagtggaacagaatgtaccttctttatgaaaataaacaaatgaataactaggcatattggaagttaatgagaaaagaaggcatagaaaatgtaggcaggctctcattaggtggttttctatttcagctgtttgcctcataatacagttcaggcttatgaaattggagaaaatgaaaatgtcctttggtgccatttaaaaatcttgacccttaagtaagatacaaaaacacaaaaggtgacacactgccttgcttttttttttttttaagaagagttaatagattattgttttaatcagttgtaggtttacaggaacatgaatggcaagtacagagtttccacattactcccctacactcacattttcttttttattaacatcttttattagtgtacttttgttgcagttgatgagccaaatggatacattattattaactaaagttcatagtttacataagtattcactctttgtgttgtacgttccatgagttttgcaaatgtatagtgaggtatatccatcattacactatcagaatagttctactgccctaaaaaccttctgttctccatctatttatccctttatgcctccccccacactgaacttttggaactactgatctttttaccatatctatggttttgtcttttccagaatttcatttagttggaatcatacagtgtgtaaccttttcagatttgcttctttcactttagcaatatgcatttaaggttctcccatgttttttcatccattgataattcattttgtatggctgagtaatattccaccttatagataaacaagtcacagtttattcacctattaaaggacgtcttggttgtgtccaagttttggcaattatgaatgaagctgctataaatgtttgtgtgtaggtttttgtgaacataagttttcaaaccatttgggttaatacctagcatgatttggcaatcatgcagcttgattgccagatcatataataagagtatgtttagtctcatcagaaactgcaaaactgttttccaaactggttgtaccattttgtatttccaccaacagtgcatgagtttccattgcttgtcattgtcaccagcattttttgttttagtattttagatcttagcttattaggtgtgctgtggtatcttatcaatttaatttgcattttcttaatgacatatgatattgaacatcttttcatatgcttaccatttgtatgtcctttttggcaaggtgtctgtttagattttttgcccattctttctttaactaggttgttttcttattattaagagttctttgcatattttggataccaggtagtcttttatcaggtacttgttttgcaaagattttctctcttgtccttttattctcttttgcataacaaaggttttaaattttaatgaagatcagcttactgatttttttctttcttggattatgcttttggtcttgtatattttaaatagtcaaagccaaactcaggatcatgtagattttctgttatcttccaggagttttatagtttttgcattctatgtttggatctgtgatccattttgagctgatttttgttaaaggtgtctagatttggttttgttttttttttttttgcctatggctgtttaattgttccggaaccatttgttgaaaagacaatcgtttttccacggaattgcctttgctctttggtcaaagatcagttgactgtatttgtgtgggtctgtttctagactctatactgccttactttttaactgcaaatttgtagtacttgctttgggttcctcctgtgttgatcctccttatcttaataatataggtcagtgcttatacccatgactactgaaggtttcttcttgtttgtgtagttagcatttcactcctccaaacattccttgtgacacagtgaaaggaaggaccagcatttcacatctccttgtccttatccacttattcattgctagctttcaccgctaatgtcaaacctattttagtaaatgaatttaataaattccatatagtccacttaatgatttttttttcagtgtgacttccaggaatgaactgcatcataaaggtgaggggtgctatattgataaagcactttttgtctgtctgttgcctcatttataaaatagaaataatattcctcttacctgcagcagaatgattttgtttttgtttttaaatcacatcacaaaatgtatgttaaaacacacaaggtgaggaagggtattgatgatccacttgtactgcagggtgcagttcttttctatgtcttcattttattctttctccttatttatctattcctatagttttaactataactgcagttttcattgaagactctgatccatgggtcttagacaactgatgaatttccattgtagaattttccttcccttgcttaatctccttgtctctctcctctactattttaaagaaatgactggcagagaggtggagtgcctccaaggctgcaatttcatagagagaatatttgggtcaaaatattaattggaaggacatctgtcaggtataacccccaaaacattattttcatcaaggtgtaagactcagtgatccatttaatgctattgctaatctttataagtctcatacaattataagaggcttatctgtatactgtataaccttatgcttactttaggcttgcttacccaaaatctacatttagttgcttctgaaaatatatttttttcttaagctacttttatgtgttttccttagtattctctaaaccacataagctattacttttgattttttaattttaatttttattaagagacaggatctcattctgtcacctaggctggagcacaatcatagctcagccaatcatcctgccttaaactcctgggttcaaccagtcctcctgcctcagcctccaggtagctgggcgacgtgtgtgccatgacatccagttaatttttaaatttttttttgtagagacagggtgttgccatgttgcccaggttggtcttgaactcctggcctcaagtgatcttcccaccttggcctcccaaagtactgggattacaggcattaaccactgccctggcccagttgtaactgttagtgaggatgccatgccattcctaaagcttatacaatcctgtgtatataggaatttagcacctttgtcaaacatgcagtgttttagatctatttgctatattttgcttttgtttttaaaataactgttgcattatattgtcttagatggtaagttcataaagtgaagggatatgttgatatattttataaattgttgatgaacacagcttaatactctggtaatgtttttctgagtaaagaaggaatagccactatgtataaatatgttagcatagaggaatgaaaaattgggaaaaacaagaataggattttggatgaaattaatatagccaatctatatattaatgtattaatagatttattttgattattatatgacgtagtttcttcatcctttacttttaatctgtgtaggacttgtatttaaaatgggtttcttgtaggcagcatatagttggttcttgtaattttgaaaaatcttttttcatgggtgtgtttagatcatttttgtttaatatagttagtgacatgattggatttagacacaccattttgttatttgttttccgtgtattccctcagttatttgtttcttccccctttttctgtcttttgggttatttgaatctttttagcattccctcttaatattccatattagctattttgctatctttaaaaaaatttttttttggtgaatgctctgggagttataatataatacaccaaaactttcacactctactcaagagttaatgttatattctttaagtaaaatgtagactctttatgatagagtttcctttatccttccccacttacctgtaggttataatcatgatgtatattacatctacatacattgaaaccccaccagtgttacacattttgctttcagcaatcatataaattttaaagaacttaagggaaagtagtcttctatatttaccgagatatttattatttctgttttttgtgaagattccaatttctttctgaggttatttcccttaagcctgaagcacgctccttagctttttgtagagcaagtctgctgaaaatgaatacttttaattttcctccatctaaaaataccattatttagctttctttcctgaaggatgttattgatggatatggaattttaggttggtggatttttttccttcagcattttaaagatgtttttctattgatttcttgcctgcttggtttatgatgtgaagttttcagtaattcaaaccattcttcctctgtaataatgtgtaactttagccattgtgaatactttatttttgcttttaagcagttgactaagtgtgactatttttgagcttattctgtttggggtttgtgaacttcttgcatttgtaaatttgtgtcttttaatgagtgggaagttttgggctattatttcttcaaatagtttctccaccaatttttttttttttttttctggaaaaccagtgacatgaatgctagaactttgtgatattttcctgcaggtctttgaggctcagctcatttgtctcaacaaatttttttttctttgttcctcatattggatcatttcactgactcttcaagttcacttactctttcttcggttatatatatattttgacttgagctatcccatgaatttatttcagatattatatttttatttccacaatatgcacttgtttttctagttttaatttttctgttgagaacttctgtctttccattcattccatatcaccatggaggatatttataatatttgtcctttgggtttctcagagttggaatctgattgcttttttccctaagaactgatcatattttcctagttcttcgtatgtggaatgatgttggattgtatcctggacattgtgtatgttatgtggtatagattctgggtcctgttctaatcttctaaataatgttgatcttttaaaatttcttttagcaggcaataaacccagctagattcaggttatatttctgtctcaccttcttgtggcaagtggtactaatctcagttcaggtttcaaagcctttgtgatgcaactctgggtctgtcccgtgtgtgcctctcaggggcagtggtttctagacttagttcagttcttatagctgttgctatactgttctagatctgtgtcatgcatgcacagcttagggtgaagccaggaattgtgctgattcatgttcagaattaggggattcgcttctccattttctttctctccgtgattcccccatcctctttggcctgtgagggctccttttccaggttcctgtggtcataaagactgggtttcctggagtatgagtggctcaggctgctgtcctgctgctctgctgtatagtggggctctgtgactgggtcctgctccaggacatagctgccagaataaaagaaaaaacaaaaccaaacaaaacaaaactggaaactcatctccttgtagatcatttctttacatttgactcctccagaattcaccttgttaacatttcagtcctcagttgttgctctttgtattattttggtagctgttgagtatcgagcacatgcttctgctaagtttacaggatatgacttttctcactcaggtcacaacccatacttccctttgttgctcatctctgtcccaggcactcagctctttttgtggccagagcttttagttttaaaaagcgagagagagagagaggctctactgggcttactatcagagaggaactggggctccctgcttttcttttgtttctgctttacaaagtacgtctatacctcaaaggagagaatatatgatgatagtgtgtataatgtcaacagaccttccccgcagagtttgcaaagaagatccatattttgctaccaagtgacactttgacatcgggctaacttaaaacagcaattttcttcttttcactgttttgtgagatgtactttgtattcatactttggggaggcaggtaacattttctgaggggaaaaacgaaagtcccaaaagaactgggaagcctagaagcaaggagtgccaaagaggtgagggaagagcctcattgtctgcaggcagttgacagtcacgctgaggatggagtctgtgacctggctccagcaaactgccattgtcagcttctctttccaaatgactgtttgaaagaaaacagggttaccacatctgcaaaagaagaatatgaggaaggaaagaggattaggttaaaaatacttaaaactaaggagtgcttcttcctttgttcatatagggctttgcgcccatgtttggctgtttttcattaaaagcagtcttagtttttactttgaacttaatcatttccaagtgacagtcttggcttctttatatttgactttatatttaggagtcagcaaaacaactgtaatcctgccacttatcatattagtatattttctgtgctatttgttcttttctaatctttgtttttttttcaataatgaaagtgataaatgcttattgtaaatactttaaacaataggaaagtagacacagtaagaaagtagaaactgactccttagggttaactatggaactatggttaatagtgttcaagttttctagcttctcttttttttaaaaattatactttaagctctgggatacatgtgcagaacgtgtaggtttgttacataggtatacacgtgccatggtggtttgctgcacccatcaactcattaggtatttctcctaatgctatcgcctcccctagcccctcaccccccaacaggcccagtgtgtgtttccctccctgtgtccatgtgttctcattgttcagctgccacttacgagtgagaacatgtggtgtttggttttctgttcctgtgttagtttgctgacaataatggtttccagcttcatccatgtccctacaaaggacatgaacttatccttttttatggctgcatagtattccatggtgtatatgtgccacattttctttatccagtctatcattgatgggcatttgggttggttccaagtctttgctattgtgaacagtgccgcagtaaacatacgtgtgcatgtgtcttgacagtagaatgatttataatcctttgggtatatacccagtaatgggattgctgggtcaaatggtatttctagttctagatccttgaggaattgccacactgtcttccacaatggctgaactaatttacattcccaccaacagcgtaaaagcattcctattcgtccacatcctctccagcatctgtcgtttcctgactttttaatgatcaccattctaactggtgtgagatggtatctcattgtggttttgatttgcatttctctaatgactagtgatgatgagctctttttcatgtttgttggccacataaatgtcttcttttgagaagtgtctgttcatatcctttgcccactttttgatggggttgtttttttcttgtaaatttgtgtaagttttttgtagattctggatattagccctttgtcagctggatagattgcaaaaattttctcccattctgtaggttgcctgtttactctgatgatagtttattttgcagtgcagaagctcttcagtttaattagatcccatttgtcgattttggcttttgttgccattgcttttggtgttttagtcatgaagtctttggccatgcctatgtcctgaatggtattgcttaggctttcttctaagatttttatgattttaggtcttacgtttaagttttctagtttcttttattgggagaggaatatgtagttaaaattattttgtattaaaaagtttgtcctgtcacagtaactttatagcttaagcattttcaccatttttatacataatgactctaaatgtaattttgttttaatttttaaattatgtataggaaacaattgagtggtatacaatgagtgttaaaatttcctcttaatcttcttctttttacttctcaatgggatccattagtactattacttgtttttagaatgtatacttctgtcattctttgctctttctctgaatatgtgaagattattagaatataaatttttctccatttgttacaaactccttgcaaacataattttttatgctaaatttctgttcttttgaaactggatgttttggttgcattccattttccttattgtacttttaaaatgaaaaaaaattttttttctttcagatcagccccagtagcttctcagatccaccttatctgaaacatctgatctctcctagccacttaaataaagtaacttgtgaaaacacctaacaggctcttggaatgaagtcatgagatgtatgtttattcttctgcctcctgtctactcactcttttaactcctcagctaccaaggtagggcagatcaactaactagcccagggttgaagagctaataaacacggaagctgaggcagtctgagtccagagttcaggctcttaaccactgcgctctataaaaggcacagagctaagcactgggaatctaccagggagcaagacagaccccatctctgtcctctctggatcttacctgctagccaggaaggactggtaaagagcagaccatattaacaatgtaatatggccttcagatcaaccatgataggaatcaattttagctgaacaccaataacccacatgtgtattacagtcttattgtgggtgagtacttggtattaggtggttattgtcaaagtgataagaccaggttcctgcatttggtgagacacccacataaatacaaatacctaaacctttcataatgtaacatacagattaatgtaatatattaatataatatacattaatatatcaatatattatatataacatataatgcaaaaagatgacaatgatgacaggtggaagcgatctaggagaaagttttttctaacagccagactggtgtcaagactgcacagactaaggatgaattctgcctctgtctttcacctcttcttgctaagccagaagagcctcctttctacaatggaatattattcgttattttccagtgttgtaggaggaatcgtcgagggctcagggaatgtttctcttgtccttcacccttgtgtttgtgcagctgccccatcacttttccactgtggcattttggcaattgtaattacattgttaatatggtctgctctttaccagtccttcctggctagcaggtaagatccagagaggacagagatggggtctgtcttgctccctggtagattcccagtgcttagctctgtgccttttatagagtgcagtggttaagagcccgaactctggactcagactgcctcagcttccgtgtttattagctcttcgactctgggctagttagttaacctttctgtgcttcagtttcatcatctgtgaaatgaggataaaaatggtgtgtatctctttgggttatgatgaggatcaaataaattagtatttaaattaaaacatatatctaacactgtaaatgcttgttaaataaataacagtttctcaatatcttcaaaggaaaaaataaatgggtctttgtcagccctttccagtgagctgagtgtgtcctgctggccccctatcgacttcactagggatgacaccatgttcaagagaccgaagaagagacccagagccagcgaacgagtcatagagttgattgaggggacttatatacagggtgttccagtggtggcaggctggacaggagaaccactaccctttgttaaaagcatggaatatcgatagctttttcacttagcattctccccctagtgacctccacctggcaatcttcatttaacccaacacaaagggctttgattccctgtatggcttgcattctgtggggtgggccaggggttcagatgttccttatagataaggaatgaatctctgggttggctactcctggattccttagcttggaaccttgaacacacattctttttagaccatagggtcattctgagggtatgtttaagttattgctgtcaggtgcatctgccatgcagggtagaatattgcagtcctttgctttgacacatagtttggcccatgggatggctgaactcccatgaacaaaattgtcctcattgggaacatattaaccaagaaacatagctttatacttgtgatagtctgactctcatgattgtgaattgtacctagtcaaagtcattaatagcagtttattgatagagcgatggaagcggtgaggagtatgttaaaaaatttaactcctttctattctaccattctccgctgaacctgtgcaacattcagtcaaaagtaaagtgttttatttaaagtcaaaacaatagtcacctgaggtttaaatttttgggtgcttaacagggatcagaaagactggtcggagttgtaaaaatgcacaatgcagttttctgctttcagactgtccctgtctctcaggtccacttggttccatctttgcttcaaagtctaggtggagaagcaaacgcaaacctgttaagacaactaaatgacaaagacaacaaaacaaacaaacaaaacttcccaggagggtgaagggccaatccttgtaagtcttgaacgtggttggggcatctagcagtatttttgcatttggacaatagtgtaaagagcactgaaacttgaaagtgagaaaattaaatggcagttatttccccaaggtagtgatgactcatgtgtgcatgctcctttctagtttccagtgtattttcacatatagtgtcatatctgtctcattctcctttcagggggggcatgattgtttccattttgactttgcccttgtgcacctatctggtacagtggttatttatgtacatttgtctgctacaaaattcaacaggtacaaaaaggtattccccaaaacttaagtctccatccccaccctgtctcccaactacccaggtgatctccctggggataaccactatttatttgtgtcctttgcagttacaagcacatgcacacatgctttatttggtccccactgcaaccttgcatgcaacacaatagatgctgttctgaactgggttcttttcactctttatgtatcttgaggattatcccatgttggtgcacacagacatgtgccacatgctatatatcagttgcttagtatttcacttattcaattaatctcccactaaaggatacttaggttgtttctagtatcttcctatacaaagactgttaacagtgaataatcttgtatatatatcatttgatacctgtacaatgacactagtatagtagttttaaaagctatttggttgacagagaacttggaagtcatgattttttttttttgtagaaaaaaatggtaacatattgtatgtaaaacaactaaagatttgagctagagtagagattgccttatacttagatataagcgggtggtctgagtttaaggcgaaaatgataggaagccatcaggctccatgagaggggattcttgtcttttgggtccccacactatcaccagcacctgggacacccgcacacagagttcagctctataattctgtgtcaaattgatagtgagcacaacactttcttacctgcctactcacagggttgctgtgggagtcccatgaaattaattttttttaataaacctgaaagtacaacatagaagatatcatcattatttgtagagtacttatattatgttgctcatcttgtttctagtagtagctctagattttaaaggaatctctagcatgatcagtgaacatgattgatgtaggaattttctagattagtttggggcttccatttaattctaaaatgaaaattttactttcagcttcatgcctaacaagcagagtttgatgtacctagtctaacatttttctgacaatttgcagccatcactgtcaacattgaaaaatctgtgttagatagtgaggcttttaaataatgccatcaatatacctgtctctaaaagtcttctatccattctgccatttctaatctagcctaggcaggaaaagcagacctggataattcatcactgtgtctcaagtgtaagtaaactgctttgaaccacagtttatagggggcgtgggtagcctggaaaggatcactctgaaaggagtagaatactctcttagagaaaaagaaagtgtggtagacagaagggatattcaaagtataatggtggtgactgagttatgtgttagaaacagttttgtctagtccgactagaaggaattaacttggattttcaaattcaacaaatattgactgagcaccttctgtgtgcttcaggcagttagtaaactatgagaaaataaaatgtgtcaggtagtgataaataccacagcaataaataaataaataaatagggaaggaagggagagaaagaaggaaagaaagaaaagaaagaaagatagatacctaagtacttgtatgtacagaggaatgggaataccataggtgagcttgcatgtaggtggtcagggaagaactccctggtaaggtgacctctgagcagagacctgaaggaggtgagggagccaacagtaagtgcagtggccccatggcagtacctgcataatctgttccaggaaaaggagagggagtcagtttggctgcagcagggtgagcaggtggagaacaggagcaggcaaagttggtgacatggtggctggctcatcacagagggccttgggaagccctgggaagcccctggcttttactctgagtgacatgggatgccgttagtaggttttgagcaattgagtgacatgagcttccttcttggttgctgcatagaggggagatgcagaaaaaccagttaggagactgctataaaatcgagactggagatgaaggtggctctgaaatatcagaaccttaagatgcttgggtaagtggagaagaccagttagggagacccttactaataacaatggaaaacagccattgatcttcaaaggaagactcctgataccaagcctcctgcatttctcttcctgataggctattctagccagcatcttcacggccctatttcttacctggcagaagaaccacaatgtaaaacgctgttatcagtaagcttcagttttgtaaacaccacaatccccaaaatagtcatattgctaaagtgtttgccaacatttaaaacccttttctaaggttattgataacctctttgtcgaatttagtggcacttgttcctttttaatccccctccacatcttcttggacttctgtcatcctaatgctggatttttattctctttctcctgaatcctggccttttggtgtgtgctgttgactgaaaaaaatcacaaatctgtaaatttggaaaggagggctttatttctaaaagagggtaccacaacctgcaggcaggaagcagagcctctggcagaaactgaaaagcaatgcttccaaagaggggcaaaaggaacaggaacttacaccaagcagggtggccgggtatacatattcagcaggttatgggggagctatgaatattcacgagagggtggcctgcacgtgtgcagtaggctaacgtgtatgcaacatgtgtcccacgttcacctgggagtggagacttaacgtaaatatattacagttaggctctttatatcaaaagatgaagcaaaggacacaatagccgtttgtgtgcatcctccgtagactggccagaaccacgccgtggctggtggtctcttaccaggaaggagtgctggtcagtccttgcgctgaaacgcagaagggatgggcagcgtcaggtggttggtccatatcagtggggatgtcttttgaaagggctggtttctatttagcccgtagggagggaagaaagcctaattgtggttagtgaggagggggtataatgaggtgtgtctgacttcccccccacatctcgttatgaccgtgaacttagttttcaaggttactctggggtccccttggccaagaggaggtccattcagtagggtggtggcttagcattttatcttaggtttacattctcccccttttggctgagatttgtcagaggcaacagtgatggccaaacttattttctcctgtaacattgccagagtgatttggctacctgccccaggtcctgtcccttgatgggacccctatggtcaagggacttagagccaaaagacctacagccaattaaatattgtaggccagactggaatggaggtgggcaggcactaagtaacccttaaaactttttgagcaatataagagccgaaaccaaagccaaaaggcgaggttacgaaatggacttatctatatgtttttcatgttgagccaccataaacttggttttaggtacagacttgcaataattagttatatagaacacaagcattttgatcatcagaaaaaggaacaaagtggtgagttatgacattaccacacttacgacaagggtttgcaaggtggatccaaaccaatttccaaatatgtagggagccagctgtaagatcattgagggggtctgtaatgtgtagttggtacttcttgtaaccctttggcttgtttggaaattttttctgtatgggtttctacctcacctggtgttgatgtccgtacaacaggtggtttgagtcactgcacagactccttgtttggctagaagaaaatctcatgcagcccagtgatctaaaaccacttgagttaaatttcttggctcaatttttgtggtgctgcaatacgttttgtggtttcatcagcagtttttcctagggtggccaatagatttcttatcatgtctctatttgcataaaccccgtaaccgggaactgctatacccaaaaaggctctgccaccaggtgttttgatatcctcctggtaactcattttttagtctgtggaaagcaggaaacctctcattattgggctggatggagaagggggctgctcagtatcccaataaacaagaacctttgtgcaggctgtcagagcagcagtgtgctaccctagtgtgggtgggtcagatcctatgccacttataaacataatctgggggatcacaagtgatacccccaagagtatgttctttgatggactcattcataggaagtgcctacaatactaaatttaaaaatgggtcgcttctctcacaagctttccaaaatccattcatatgacattttaaatataagtattgttggcataatggggatgaagttttacattatttgcttgatctagactgcatttgtctacccagtagttcatagattgagagggtctcaaggtatagaatgaatgtacagcattagtaacaggagacaaattaaaacaaggggtggtcatatttggctgtgcaagcaattgtacccataaagttgacaaggaatggaattggtccaggtaactggtgacatcagggaaattggaaaagtccatgatggatattattaatggcagatgtttattgtgaatggatttaggaagcctgtggacatatccaacaatccagtgtttcctctggtggcaacactttgggacagtttaaccagagaattatcatgctatttcatatattgggttagggggacaattacaaggaggtgggagaaggctgttaatgccataagaacaaaggaagaaagggaaacaaacattaaaactatttaaagaattcaaaccaaaggagaaaccacaggttccatacaatctcaagggaactgtcagacaagctttggggattatctttgaagtaaaagagcacctgacttacaagaaatgaaataacagtgtcctcagagaaaagggtcatgaatcctgtctaattttgacagtgtgtgtgttggagggagtttataagtattttaactaactgtgggtatctaaatgttgggatttatggggttgccacaatgtggcctagcatatatagaattcctttataacaattaaagcgactataaagtagatgtagggctaggcatttagaagatggtggtgggtatttccccgtttacataaggcaacaataattgtaaaaattcctaaacctgaaacaccaagtgtgatagccaatagaaggggagtataagtgtttatctgaatacacgcctggccagagtcttatgaaggcagttcactgtcgttgttgccttttctttgagcccaaggatgaggctttggttaacttgagtttggtgttagataccagcatcaatatccatgattcagcaggggtaggtgccattttcggatgagatatgtttacccaggagtcaactccctataaattaacagcacaaggattagtcaacaatatttgataaggctgtttccagtggggctggagggagtcttttaactgataccttttcaagtatacatagtcaataggttggaggtcgtgatgctgcagtttttggcctgaatggaagctgtaagaagattctcccaccttgtggtggttgatccttatagcttttatgagcccctggcaataagccaggagttccccctataatgaggtcgaagaaatattccttggtctgagggaatggaccaaccagtaacaatttcaaaaggagagagtcaatgttctctggtaggagtggactgcagaatcagtagtactagtgaaatggctttaggccaggacaaaattaaaagtttttgtgacttttgccagaccagctgtcttttaatgatttcatcaatctgctcaactagcccagaggactgcaagtgataggcacagtgaaaatgctgtagaatgggccagatttttcaaactctttccagtacctggctggtgaaacgagttcccctatcactgcaaagttcaaacacaccagataggaatgattttcctaggtagtattttggccgcccgcagacctgtggcttattggcaagggaaagctgcaacccagtgagaatacatgtcaaccattgcaagcacatatttgttttcataccactatgggatgatggtagctgaatgaaatcaagttgccagatagcaagtggaccactggggagtgagaattggcctggagggggctttagggacttacctgggttgtactgggccaacacattgcgaagtttgtatacctgagacacgacacttgggcaaagtccccaatagttttgtctaccttgttggatcattttgtctggattccaatgggtcagattaaaatctgtctttgcagagtgctggctaaaattggatgttcgtttggaccttcctataattttgtctcgggggttgaaagaacaattttgttttatttacctccgtctttcagactctgaaactgtcttttgtgagacagtcagagtatggaaaggacatcttcagataaggaagagaacaagggagaggaggagtagaggtagaaagagaggtagagggtcaagtatccataagtggagaagaagtcactcacaggttatcgctaaagtgatagctttggctgcttcatctgcagcatggttgtctttgttgtcctttgtcttgtcaagggaaggtccctagactttgatattggctagggctcaaggagtctgaaaggcatccaagagggccaaaacaaaatctttgtttctaatagactgtccagaggaacttaaaaatcctctgtctccagagcatgccaaaatcatgagcaactccaaaggcacatctgctgtctatataaatattagccattttatcattggccagtaggcaggcccaagtgagggcatgtagttccccctgttgggcagatctggcccctggcatggggcctgattcagtggtctttatcagagagaccaccacatagcctgcccaataggaaccagcacggtctctgagaaaaaagatccatcagtgtaccagataaaatctggattggataagggagtctcttaaaagtccatgcagggtgagagaagggtgtcttatatggtttggctctgtgtccccacccaaatctcatcttgaattgtaatccccataatctccacatgttgagggagtgacctggcgggaggggattggatcatgggggtggtttcccccatgcttttctcatagtagtgagtgagttctcatgagatctgatggttttataagaggctctttctcctttgctcttgcttctctctctcgcctgccaccatgtaagatgtgcctacttccccttctgccatgattctaagtttcctgaggcctccccagccactgtggaactgtgagtcaattaaacctctttctttataaattacccagcttcagggaagttctttatcgcagtgtgaaaatggactaatacagtgtctgtgaaagcagtagagtcatggaagataccctcttcaggtaaaggcaagaggataagagggttaaggaggctgcaacaaactatggttaggttacaagaggaggagaagaaaagtatctcctagcaagttagttgactggctgaaagatgcttagtgtggtgagaggtgagaatgtggaatacatagtgagagggaattccattattaatgttttggtagccttaatgagggtggaaatggcagcaattgccctcaaacaggtggcagttcttgagctatggagtctgcttgttgactgtaatacccacttggctgcttgctgttcctgtggggctgagttagggctctcatggtgtttccttctggtttatggacaagaagggaaaagaggagatcataatttggctgtcctagagtgggaggtgaggtgagttgaccttttgggtctttgaaggcctgttagtttttggggtccaaataagggagtcaggggaggaaactttaaacaaagcatatagaagttgtgccatcaaagacaagttggggacccaagttctgcagtatcctgcaagtccaagaaaccctctaagctgtttcttaggggtctggagaggaaaggaaaagagaagggtcagtatttaagcctaaaggggttaatgtgtgtccaagaaacttaatagaatccagacaaagctgcagcttgtctttagagatcttgtgtcccttaaaggctagctggtggatcaagtgaagtatgtcagtaagacgagtgtcttgtgaggcataaaagtaaatcatcagggtgggcgtggtggctcatgcctgtaatcccagcactttgggagccaaggtaggcagattgcttgagttcaagagtcaagaccagcctgggaaacacagggagaccccatctctccaaaaattagctgggtctttagtgtgcatctaccaaccgtcccagctacttgggaggctgaggctgcagtgagccaagattgcaccactgcactccagtctgggtgacagagtgagatcccatttaaacaaaaaaaaaaaggaaatcatcaatgcattgtaacagggtagagttgtgggggaagatcatgccccttaaatcagcttgtaaaatgtgagaaaaacaagtgaggcaatctgtatccctggagaaggactgtgcaggtgaactgtttgcctttccacgtgaaggcaaagagaaactgacttcctgggttgacagggatgctgaaagaggtgccactgagatcaatagctgaggaacatcaagtgtcaacaggtgtgttaggattgtatgtgggtctggcgtagtggggtgctgaggtataacaatattgttaatggctcttaggtcttgagacctccatccctttccatttggtttctggacaggcagtatgggcatgctgcaggggctagtgcaagggactatgaatcccttggagaggaaatcattaataatgggctgtctaccagccaaagcttcaggattgaggagaccctgccttacattaggtagaggtttgttggggtctaaatgtatggtaataggtggtgctgagtgaattagacctacatcagtgttagatttagccaagtgtatcaggcggttctcttaaagccaggtgctgagtggcaactgagtaattagtgacagacaagggaaagacatgtaaggtcaattgatatggtttctgaaggagagacctgcagaatggtatctccctaatgagaaaaagaaatatgagcctggtcagatgtggtggctcacgcctgtaataccagcactttgggaggccaagcgggctattcccttgagcccaggatttagagagagaagcctgggcaacatggcaaaactctgtctctataaaaaatgcaaaaaaaaattagctgggcatagtggcatgcatctgtagtcccagttatttgggaggctgaggtgggaggattgattgagcctgggatttcaaggctgcagtgagctgtgattgtgtcactgcactgcagcttgggcaacagagtgagaccctgtttccaaaaaaaaaaaaaaaaaaagaaaaaaaaagaaatatgagcctgatgctgctcaaggaaatctctccctatcagatagatagaagcagagagaacaagcaagatactgtgatacttacaaggggacccagcagatcagtgatcagtgctgacttaaaagtggtcataggttgatgagtgaccctgaccgtttatatggtttggttactcctggatggggatgtataaaagagttggagttaagtactgaaagcatggcccccagtatctattagggctcagactgttcaattattaaagatcagtttctcccaattaaattaatttgttagagggaaaattccccttgtctccccacagtacccctattcttgtaatgaagtaaggaactggtctagtgtcagtctgctttggggaaataattggtttcttctagctcaatcaggattattctttaggagctgttttttgtatttattacaatcccatttaaagtgaccagcttccttgcaaaaataataaagagcattcttttgtatcaggcactgttgtgtcttttgctccttagattgggcctgctatttggcagaaggctcctgagctgctttatgtgtggggccatgagttttgctgtttcttcctgacatttgaatgtcctcgctgcctgaatatctttctccttttctattctttttgagaggcgatcagatatggatgccaattcatgcggccttctagaggtccagtcagcatcttgttgttgaactagagttctaagggtctctttgagctgtgaaagaaaaagcaaattgaaacgcttggctgtgattgtttaaatccttgatgcctgaattctgtctgacagttttttttcaaatcaattgagaaaatcaaagactggctcatcccttttctgaatacatctttgaatagtcttccagtcgacctgatgtggcaaaattaactgagatagtcttaatcagctctgtaatcacttcctcagcctttttaagagcctcttcttctgtaaactagatcagtgtccaggtgtgtccgacccacctgatttatccattctttagctaaaatgtttcccgccaacattaaaatgagctgataaacactgggaagttctggctgatagacatttataattaaactaaaatattgttcagattcaaatgagtttgtcttggggtttgggaagtttttgacaatagatatgagatcagttttagactgaggagttttagacttttgctgcttctgatgctattaaccaaatgacactttttgtcttcattcaaacttctcagtaaagagaatctgattggcaggctagagatgtagtaactttcacaagcagtaaagcattgtgtcatttaaaggagatttgtagcaattagattgctaactttccatattattaaatgttcgtggcttaaaaaatttggccagttttcatattgatatccttctcttcaattaaatatatggcataggttataataatatatattttcctagtggattaatttttaaaatgatttcaaaacgatttcaaacacagaaaagttgccaagttgaacaaagcattcctgtattcccaggttccccagttatcaacattttactgtatttgtcccatgtgtgcactgtgtgtgtgtgtgtatgcatgtgtgtgtgtgatctttagtctgctccttaaccttatgagagcaagctgtagacatcatgtcccatcacttctaagtgcttcagtatgcttttttccctaaacaaagatattcttctatataaccagtatatacaacactccaaatcaggaaataagcattggtacatcactgtcattcagtttataatgtcatcattgtgaactcaaaaataggcctttttcctatcttgtccaggatcctgcccaggaatatatattgcatgtaattttcatgtctcttcgaacttctgcattctggaaaagttccttagtctttctctgtcttttgtatccttgacagttttaaagcgcataggcctttaagtaggatatagatccttctggtgtttcctcatgactgggctcagttaatgcattcttggtggaatgctcaaaaatgatgctgtgttcctctaagagcattgcgttgaaggcacaagatgctgacttgtcctgccatttggtggtgataatctggatcacctggtcatgctagtgtatgccaggtttactgtttccctctgtgtaattgattagtattttgtggggaggtcttccaaggttttgccaacatcttgttccttatcaaatctctctccacccacatccaatgacaacttccacctgaatcaactaccctaagatgatagcaaaatgatgctttctactattttcatcattcttttcacatttattacttgacattcttttctgagaaagatctttctttcctcttctcttcctcccttcctcattctctttcttctctgggaaagttttttttcagatttataaccattagatatttcaagttgctaactgtgccttaagcataggtaatagtatatttaacacatacattaaaaatgagctgatatgggagtcatgccatctattcttagacagttacctatttaaagttgtatcactgagcatgaagggagttcttgattttttatttgcttttgtctgtccatattctgtgattgattctgattcactgcgttctaattatacagtggaaaaggatgatgctgtaagctggtaaatcctttctcagtaactgatggccagagtttggaaaacattgatttacaatagggttgtctaactcagtgtttgaataaatgtataactttagggcacctagtgttgcttccctgaaagaatcagcaaaatctgggtaaaatagcaaagcctcctaggttgaaacagttgggttgggctaagttaaaaattgatgaatgatctgtaaaaggttgggttaattgcatcctcaggccaacatattctcttaagtcaagttcactttctccctagatcaggcttgagtgaacacttttatctctgccttggagccactgcctctccttttaatcttccatcctttattaagcaccttcaatgcaccccttcttaaaatattttagtgtctaaaaaatggtgagttcatgtcctctatagggacatggatgaagctggaaaccatcattctcagcaaactaacacaggaacagaaaaccaaacaccacatgttctcgctcctaagtggcagctgaacaatgggaacacatggacacagggaggggaacatcacacaccaggccctgtcggggggtggggggtaggggaggggagagcattaggagaaatacctaatgtagatgatgggttgatgggtgcagcaaaccaccatggcacatgtatacctatgtaacaaacctgcacgttctgcacctgtatcccagaacttaaagtataataaaaataaattaaattttaaaaagtatcttagtgtctgaagtcagattactgttaagtgtttttagatttgggggccaatttgtcctttaggtgactttttatgtctcttatctatcttgagttaattgtggagttttactttctagatggtaatttaagtggtaatcccattttctctattgccatagtttttgtgtactcatactggctacagaagagttcagactaattcattcttggcagaatctctcttctaatttaagggttgattctataccctcagttgacttcttaaaggcccctgctgatttgaccaaatactccatttattggacacaaattcaaacattcttaaacagtatcacccaaaatgatgtatcctgaattacttttcataacatgacaacagcagtaaaacccatggagagcaataaccattttctttttattgtaaaattacctaagctaaaaatcacctttaagttaatgccattaagacaaccagtttcattgttgagcacattgtgaatatttacagccccaattttccacttaaattccccacatttattccagtttttatattgaaaaacaatgggtctatgaatcaggtgacatttaggaaggatagcggtggccagacctgcatcctgaccctgcctccatcattcagtagctctggcactgggagaaacttgtgttctagttctcagtcttcatctatgaatgggaatgtcgggttaatcatgtctgaggtctagctcttgtggtctatatattctaaataatggatgaaattatataatagatgatgaatctcagtgtttgtagagtatttggtatactggtacagtttaacataaagaaagactgcattaaggccagaccagcggctttctttcagaagacaacagtagggtcaggtgcagtggctcacgcctgtaatcccagcactgtgggaggctgaggcaggaggatgacttgaggctaggagtttgagacgagcctgatcaacacagtcagactctgtctctacgataaacaaacaaacaaacacagaagacagctatgtttagatttgtgttgttttagtttccaaactgtttatctctttatttccttatgtataaaaagcaggtaacaataacatgcccaaaaaatataatcacaagaaaaattttaaaaatcagtagtatattaggtgcagtacttgatattttataataattggtaaaaaaaaaaaaaaccaagttatctgatacataggattagattcttgcaaagcctagaatctgatcccatgtatttaaaaaaaagcatttttattcctccataaggattaagtggtttagacagtagttttagtctatacatttcagttaacagaacccagaggcttgttagaagataatttgctgataaaacaacagagcaacttacagtcctgcaagctccattcatggtaagtgccctataaacagatgtaccatcttttatgttttataaacagatattttaccatacattttctatattcggatgtgtttagattcacagataccattgtgttgtacggtaatgtgctatgcagatttgtgtcctaggagtaatagggcagaccacatagcctagacgtgtagtggacgataccttccaggtttgtgtgagtacactctgtgttgtttgcacgataaaattgcctgacagtgcatttctcagagcatgccctgatcgttaagtgaagtgtgactgtgttgtcatcaataagtatttgttttataaaaccaagagctatgattacatttcctttcttgttcagtgtttttttctttttcctggagtctgtgagtttttaaaatttatattgtttgctttctgcaccattatcattactatcatcttggccaacttttattaagggctcaatgtgctgggtaatttctaactgttttacgtgcattaactaacttacaataaaataaagataaaattttataaaaggtaaaataaaataaaataaagccttacaataaccttagatgagaagattgaggaatagagacaagctaagcaaagtccacagctatacaaacactaagtggtagagctgggatttgaacctgtcttgtgtggatatagcaccctcactgtttatcactttgctgtaatatctctctccacagattcagaatgctaaatttctcaaatctcctttattcttgctgcctctttccattctcctgtcccaatctggagtaattgattttctgcatatgctacacagccatcttcttaagtctccatttctccttggttgggtccattttttcctccatcctgtaccttctcctttcatgatttaattctacattttgttagagcacatctgtaaataacttcctggaaaaggaagtttaaaaaataaatgtcctgggtttttgtattttttccttttgtttacttttcttatccatcatctcccattgaattgatagtttggctaattggaagattctgggcagaaaatcatcctccttcctttgaaacttcgaagccattgctgtattgtctttttgcttcctttgtggctgaggagaagtcttccctgtctgattctctttcctgtgtgtcttattggtgttctgaaatttcccagtgttggacaagagttggttttgttttccattgtgctgagcatttgtgggcctttttaggctgaggacttagaaacctcagctttgggctatattctggtgttaattctttgaaaatgtctttataatctctgttcttttttctaaaaatggactctttctagtttgttggaacttctcaattaatcctgtttttcttatttttccgtttgtatttaaagtttaaaaaatttggagtataatttacatacagttattcattttagtgtacagttttataagttttgacaaatgcatttagtagtgtaaccaccaccataattaagataaaggattcacaatagccaaaaggtagaagcaacccacttgtctatcagtggatgaatgggtatacaaaatgtgagacatacatacccatatgtgtgcatgcacgtgcacacacacacacacacacacacacacaggaatatcattcaaccttaaaaaggaaggggatttgaatacatgctacaacaagggttgaacccttagcacgttagcctaagtgaaataaggcagtcataaaagaaaaactgctgtatgattccactcatataaggtacctagaatagtcagattcatagagacagagagtagaatgctgggtgccaggagctaggaggagaggaaaatggttagttactatttagtgggcacagagttttcagttttgcaaggtgaaaagagttctggagatggatggtggtgatggttgctcaatagtgtgaataatcttaatatcactgaactgtataattaaaaatggttaatacagtaaattttttgctgtatgtattttaccacaattaaaaaaaagatataggacagtctcatcacatatctccctaaattctttttctttcatatttttaaaaccacttcatcatctttttgttgtatatcctgagatttttctttactttattttccaaacctattggtttcttgtgacatttcagtcatcataatcttttttaaaacttcaagatgttttaatgtattctgattgttcctttttcaaagatccttgctcatctatcatggatgcagtatcttcttgagtctctatgagagtaccaattaatgatttttttctacagctattttcttttctttttttttttttttaaagacagagtctcgctctgtcacccaggctggagtgcaatggcatgatcttggctcactgcaacctccgcctcccaggttcaagcgattctcctgcttcagcctccagagtcgctgggactacagatgcccaccaccatgcccagctaagttttgtatttttagtagagatggggtttcaccatgttggccaggctggtctcgaactgctgacctcatgatcctcccacctcggcctcccaaaatgctgggattacaggtgtgagctgctgcgcctggcctctacagttattttcttctggggatcattttattgttggtttgtacttttctctcatttttaattctgcagtctctcctcaaatatttagttctccttggttaccctgtatatttgagattggggcactaaaatgttaattgtgagctgtgtgtacaagaatgaggtctgctgagttttttagaaaacctttagttttagaatagttttagatttatagaaaatttgtaacattagcacagagttcccatttatccttctaattatttcctatattgttaacctcttacattaatgtagcccatgttacaatttatgaaccaatattgatacactgttattaaatgactttcatactttattcagaatgtcttagtttttaccagatgtctttttttctgttccagggtcccattcagaatactacattacatttagtcacatcatcttaggctcctcttggctgtgacgtgtctcaaacttttcttgtttatgacttgagcagttttgaagagttctggtcaggtattttgtagaatgtccctcagttagggtttgtctgatgttttcgaaccatgactggactcagatcatgggtttggggaggaagaccacagaggtgacatgccattctcactccatcatgtcaagggcatataccaccgtggatgttgaccccgctcacctggctgatgcagtgtttgccaggtttctctgctcgaaagttagcaccgcctccctttccatactacagtctttgggaagaaatcactatagcagctgacacttaaggaatggtttctcttccttacctttctttgtctcttactctctctgttttcccttttattgttgctcctgaggctgttggaactggttgcgaggtggagccggaccagagctagggagagagagaaaaggtcattcttccaaatctcaccacctcccctcagctttgccttctcttcgtccctattctgctgctccctaggaagtgttatgcccaaaatacaaagtgaaaaaaaccctgtgcttgacactaccttgttatgctcaagcacaatttctaaaaattatggaggaaagggaaataaatgatagtaatttacggtgttgttatttgccattttcattcttgaccatttcatttgaggagtctggaaaaaattaaatgtttttctgaaagctttttgacagtttagttacgaatagtcagagtctgtcaggccaaattttaaacccttctttgctccccatggccttaaaaatttcccaaagaagtgtagtcatctgagtactgctggaaagatagacctgctccctcatgccagcccccttccttagtgtgtctctgttccttctacattgctgtcagcttcacctctaatatggcttgcttttcctagatttaattggatccaaccatctataatagccatttattgattacaagtaattcaggatagggccaagaaaaaggcacaggtgagatacatgctgtcagtcctgggggaccccaccttccccaccacacactacataaggtttcctttttaagccttagaatatgggacatgattgcaaattcaagtggctttggggaaggtttacttattagcaagagttcattgcttgccaaatgtgctcctccaaaccactaaatcagatgttatagacgagagagaagaacctgcctcccttgggttagacatacttctttggggtgttttttctttagaaaacaactgctcagataaagaggagcaatgagcagtagaaagtgaaaatgagtccatttccagtagaaattaatttctttggtgaagatagagaactttcaagaatggctatagaattagaagggacctgtgagatcatccagtaccttattttcacagttgaagaagttgaatcatatagttcactcggccagcataacaagactgactttgcagcaccatctgaaacagatcagagctcacctgggtcttagttctgagcaacttccaccatgatgagtgggttccagtaatgtatgtatccacacatgcatatgtgtgtaatgagaaaataatttctttgtaattggtttttgatattggaagctagataataggaataaaatgagattttagtattttagactttctccttaacctttaaaattgttactgccatgaacatggactcatgtaattattttactgaatagttcagttgtctatattttaagaattgcaagagaacatattccacaatttaatcattaagaatgaacaattatgtattttttgccagttacatgttaacacacaaaaacataactggattgctcaaattaatcccctatgtccaagcccggcatgtaaattaagaaagtaacttttgaccttttccttaagtgtaattttggtaatttaactatgtagtcactgtgggaaaaaaaaaaaggaaaattctttaaactttaaagatggtcctggcccagaatctttgagaacatttgaattctcatcaccaagtggggaggggaattgatgtggaaagtggggaccactttaagttcattgctaaacatgccagcaagatcatgatccattcattttcctaggcttctggttctcaggcttttgtctcaggagaaaagtaattggccctgttaaaaggagactttgacaagtaattttaagaggcatattttgagcattactagcaacagaaggaatgcggtattttagaagtcaggatcagtgggttccaacttgcttgtgaaattgggctactatttttgaaagtacttgttgtgccaagaagagaatctgtaacgaggcaattttgttggagaaattgtctgtactgtagctgacactactctgtagctttctgggatcctatctctggtgacttttttgagaagcaccagctcatggagatgactgtcccttgcagtataaaagaatggaaaagaaagaactcagaccctttctgttggacattctccaaatggaggtggaatgtcagaattcagcaaatgtttgtattgacagcttaagctccatcttgaaatttggaacaatgggccaaggcttccattttcaatactttagtctccttcttgcaggtagtttccagaatattcaaaaccacttacattttccttgattagaggtttgccacgtggaaatgggattggtgggcctagcttgtgggaagaacacagggctaagatgtcataacatcttcctctgcagttcagagaaccagactcacccaccatggaatcaagtcatagagtagaacagaaccctatagatcacttaggggagtttccaacttctgctggaacatgtccagaatcaggcagcttaataacaattttatatactatgtaatatcatataataaataataatattgttatttgatgtcagtaataataaattacaatagtggctgcaattttttgagtgtatagcgattaagggagcagattctagagcaagactaaatgaatctcagtgccatatttctttgccatacgactttgaaatcaagttgttcaatctccctgtgccacagtgccttcattgataaaatgagaaatgttgtagtcagtacctgccttttacagttattttggggattaaatgaattgctaggtgtaagtttcttggcggagcggctagcccagagctgttacggtaaatattcccatattagaaataaagtaagctaagagttgttatttgatatgtgaccttaggcctggaaagagctgggactgaaaaccaaacccgcccatgtgtgaagcctctaccttttcttatgctttctacatgttgcctctttgtgtcacagcagcccatttagtttctgaacaattcttgtggaagtctctttttatattcagttgaattctggcatcttttagttttgcactcttgatcacaagtctgtccaaatatagggctttgtcctaaaatggacaagaaaaagtatacattgaggctttctcctcccctcattaatgttaggataatgagccaaatgtttaatgggtgttgtttggactctggaaatcttatgatttgtagaaaagaggaacacctgatttggaagagtcttataggagcccaaatggaccagaactgggtctcttgttgaaacagtttattttctcagggaaggttactcttaggaggatgtactgttgggatcaggaggatgattataaaaacaagcagaggccgggcacagtggctcatgcctgtaatcccaaaactttgggaggcagagttggatggatcacctgaagtcaggagttcgacatcagcctggacaacatggagaaaccccacctctactaaaaatacaaaaattagctgggcattgtggggcgtgcctgtaatcccagctatttgggaggctgaggcaggagaattgcttgaacccaggaagcggaggtcacagtgagccgagatcatgccactgcactccagcctgggcgatacagcaagacactgcctcaaaaaataaataaataaataaataaataaataataaaataaaataaacattaaaaaaaaagtaaaaacaagtggatggtgtggttgtggaactaaagctgtctctactgttttaaaagggctattgaagcctttaatgcctcttggttttggctagtggggcaaaagtagcctcaacttccatggaaaaaaagagacacaggcatcttatcttttttaacttaaaaatcctgcaaaattttttcttggaactggaattaattttaaaaaaccataaaaataaactgcaggggtctgagagtgtaagaggttactccctttttgattatttgttggaagacaacctctaaaattttggaggggaaagtattcctttcatattttatttggcggatatatacagatggcacattccttttagactagagaaaaaattaagatgcgtgcccttaatcattgaaatggcacaatagtgtatgatggcgatagagcagagatttttctcatgactaattttgcagtgagtgactgttggtgatttgaaaatacataaccgttttaaaggacattaaaggacgtgtcataatttagtcattgttgtttacgttgttatctttcacttatttttcattgggaatctagtttagggcccaaatctgaaagtaagttgtatttttcttcctctgtgctgtaaaatcgagctggctctactacacaacctaacatttgattataaactgttttttggttgtttggacttgtaattctataaattcctagaaggtgggggaatacttttttattcctctcttaacagtagcataggctcagtgtcttctgaaattgtatttgaactacttatataggaagatagtcattaaagcacttcacccaagcataggaaaatagctttgcctatgtgtaagaaatgattcttgaaatctatgggatttctgaatatttcatagctaatgcttaaatgacttactccatactttgctagaaatctctatgtatatgtttgtcttcttctcttcctgcctcctgcctctccttcctcccactccctaatttttcctgcccttatatgactggcgtctcccaggctcagttctgggtactcacacagagctctccaagctctctgacgtgatcccttggtttcaaccaatacctctctgcctagtgttcctacagctgtgtctgtagggcctctgatcacttagtctttttgcagccaccacagttccagctgtcactaatactgacacattgaaaatggatctgtttctctccctgcagagctgatgtctttctaagttgcctttctctgttaacagatgggtgcatctctgaggctgaccgttggtattctcttcctcctttatgcatctctcccaagtgtctttgttccccgtggccctcctcccacccacctccttagcattttgcacagtcagcagttcccaacctggctgcacactggaattgcccggggagctcctgacaaagtcagtgccccggtcccacttgagttgagtcataatatgtttcaaaatcctccaggagattgtgttgtggagcagtgttgaggatcactgctgtaggtgtgcaataaggatttttaactaattgaacagtaattttatgtacatcataaatatgggttaatgttttggtgctggttgatattccttagaatgctggccttggtagcatttttcaaattgttttcctgaccatatatcataaattatattggttcttggcaatactctgccatatatagaaaaatatattggggagtaggagattcctttttaaagggatgtggtcttaaataaaaaagcaatagacatttatgatataattttcttttaaaaatttttttaaaatcttagattcaagggatacatgtacagttttgttgcatgggtctattgtgtgatgctgaggtttgggtttctaatgatctgtcacccaagtaatgaacatagtactggataagtcatttttcagcccttgccctcctccccaccttccccttttggaacccccagtgtttatggttcccgtctttgtgtttgtgcgtacccaatgtttagctctcacttgcagtatttgcttttctgagaacatgcagtatttggttttctgtttccatgacagttcacttaggataatgccctccagctacatcaacgttgctgcaaaggacatgatttcattctttttttatggctgtgtagtattccatggtgtatatgtattaggttggtgcaaaagtaattgtggattttgccattacttttaataccatattttctttttctaatccactgttgatgggcatctgggttgatttgtctttgctatttgactagtgctgtgatgaacatacaagtgcaggtgtctttttggtagatgatttattttcttttgggtatttacccagttataggattgctgggtcaaatgataattctatttttagttctttgagaaattttccacaggcacttttcacatggactaaactaatttgcatccccagctatagtgtataagcattccatttgctctgcaacctcaccaacatctgttagtttttgattttttaataatagccattgtgtctggtgtgagatcttatctcactgtggtttttgacttgcatttctctgatgattagtgatgttgaacatttttcatatgtttgttgttgctcatttgtatgtcttttgagaagtgtctgtttatgtcctttgcccactttttaatagggttgttttattttctcgttgattcgtttaagttccttatagattctggatattactcctttgttgcgtgcatagtttgcaaatagtttctcccattctataggttgtctgtttactctattgatagtttcttttgctgtgcagaagctctttagtttaattagatcccacttgtcaatttttatttttgttgcgtttgcttttgaagacttagtcataaattatttgcctggaccaatgtcttagaagactttttcctaggttttcttctaggatctttatagtttaaattcttacatttaactctttaacatttacaatatcctttttttttttttttttttttttttttgagaagcagtttcactctgttgcctaggctggagtgcagtggtgcacccttagctcaccgcaacctccgcctcctgggttcaagcgattcttgtgcctcagcctccttagtagctgggattataggcacgcaccaacacacccagcttatttttgtattattaatagagaaggggtttcaccatgttggccaggctggtctcgaactcctgacctcaagtgatctgccgcctcagcctcccaaagtgctgggattacagacgtgagccaccacgctcaattggtatactttgaattaaatactgtaaataaattttggaaagacttctatactcttctcctccctgcaacattaatattatttgtttgcttttgtttatgaaagcatgaaaatgctgtattctatttcttatagacatatacgtttctgtttttgatagattactaagtcaagtttggtagaattggtttaatgattctaccttcagagaataaatctgagctgatagaatttgagactgacaacgccgtacagtgataatactggaaagtaacagaagagatcccagatggtttccaaagctggggtcaggaccagcctaataaagcctgatagagttatgttctgtaagtgaaacgttacagtttaatgctcagtgtgggacagtggggaaaccagagccctttttttgttcctattgatttgacttttcaaatttgactgcatttttctcttctctaacagagagataacgcctaccctgtaagcttgatagatttgtcatgagttgatagatttgtcatgaagattccatgagataaagggtgtgtccctggctttgaaaaactggccaagttccaggtggaagaagaggaggaggggagggagggggcagagcaggagatggtgatagtaacacagctgcgccaggcatttcagtgagttcctaatgcagcttctagggtgcatttgaaatgaggcacttccagacagacgtcttgggttcttctcactgagtcagaggtgaaagatgagaagttgtcatgttaaactaataagtgacattagcaaggccagaagttgaaaataattctgccagtagcttgggagcttcccctgcaaagatttccaaggtctgcgagccaagagagagccttcatttctgacaggaacagtggaaagatctaaattagaaatggaatagcctttagaaaccttcaggccctaaggggcttcactgagcataattgtctttgaatggaaatataagtttataatttgttagaagcagtttttcaaaagtaaaatagaggcatgtagaggtttttattgcctttccacctccatcattgaaagcctatttttgtagatgtattatctttaaggttcgtgtgcctgggtagtgattgatttgagaacacagtgggaaaatttattgcgcaaatgatatatttttgtgactttgtttggttttgattcctggaaaattttaccgactatataggtctggatatagttttatagcattggtcttgaatactcaaaatgagtcacaaacctatggaaattataatttacacagatttggggatctgtgtagtaggcacaggtggtagagaactgggtggatgcaggtagagaactgaagaactgcaggtttttatgtggtttctgatatagcccagttacttcatttaggataaactattggctattttgtaatttataaactaccttttaaagcagggctcacttaatgctgaacattaaaaatttttttctctttgttactgcaagtgtaatttcttctgaacaattttccctgttatttaaaaaataatttagttagtaagctaaaagtgttagcattcattgaagttaggaattggctcttccctgtaacttaggtgaattttttttttttagacagggtctcgctctgttgctcaggctagagtgcagtggtacaatcatggctcactgcagccttgacctcccaggctcaagtgatcctccagtttcattcccctcccactgagtagctgggactactggcatgtaccactgcaactggctaatttttaaataatttttacttttttgtagagacagggtctcactttgttgcccaggctgggctcggattcctgggctcaagtgatcctcaggccttggcctcccaaagtgctgagattacaggtgtgaaccactgtgcctggcccctgaaattttgaataaagggagagaaaatggtggcaatgagataacaagaacttttgtgtgttttctaactactcaagtagatgaaactcaattagatagttatatctgaataaatagtcaaacatttattatgtgccagcaatgatactattgatagctgtattagtaatgcttttggctgaaagtaacagtacctgattgatactgactaggtgaaaactgatgatcttgtataacagaagcatgtaggtcagttgttctggttttgctgcactagctttacaaagccatagagacgtagagcctttctgcctctctgctctaccattttgggttttgtccttaagcttgtcacctcttgatcccattatccctgcttcaaacgacattatcttttaccgcaaggaaggaagcagaagttaaaggctgagtggaaaaatgaacagttgttctcttatcagggaagaagatttttttcagtcctttctagtacccccagtaaacttctctacacctgctagggaaacagagaaaacagatatttagagagtaagaatctgattttcatgattgtctgagatgaatcataattcagaattacccttcctaaataaaaggggtgttttgtttgtatgaatgaaagagaggtggtcgttgggtggaagagccacactgtgtacgacagtggcacgtgcagcacttttagagtagaaagagcaagctctggccattagggaccccactacctgctggtggagagaaggccaataaccaaatgactatagtgatctgtggaataactacagtgtcaagcaggtgacaaatacaacactattataggaagatttggagagaggcgtggaggttcaagaaaatcttggagaagatattatttgtgatattcactgacattttcaataggtgtagatggacaggcagtggcctttagacctctgcaaagactgaagccctgggtttgtatagcaggtgtcctaggagagtaatcagtgggcatatcgggaagtatttgcagcccacacatgccatggtggttgctgcagtgctgcattagacagcagtagatggatgaaaatataacttagtgtcctcttcagacttgtctgttctgtgccagttgcagtgctggatgctcctgcaaatagacttatcttctccagtagacatgctgatgtttttccccttcatgttcaactcattcaagggccaccctggactgcatttaaagttgaatgttgagttcgtgtgtgtgtctgacatctattatttgtaacctatagaagcaggtagtgtgttttatgcaaaaggaagtctcaaaggaccttgagtcacagctccaactttcttagtgtgatgtgataatatcatgcagtttaatgaactgtggtaggcttagaatgctcatgacttacattagtttcattttgaatgatgtttaataagcatgccaagttattttccatacaattagagaagtcattgagctaattttgctatataggaagaaattaaggaaaaagacgtggtgattgtgaaaggaatggagctaagtctcagtcttctctgaagtctctatccagatagctcagtgctgctccatgctgggtcaagctgaaatgagaatggagactcagatagagacggaattgagacacccaagtcacctttcaaaaaggggcatttgtggaaagaaaatccgtgtaacgaaatgataaacaataatattattgttgctgtagcactcagggggttgggatgagataagcctagtgaatgatgtggctgctaaaaacttagtgtctgtagctctgatcgttggtatttgacttctagaatgagacagatgatcattttactcttcttttagtaaatacggggttttatgtatgtgatatgtacttacacatctctctttaaaaaggatttatttcacacagtgactatgccattataatagctaataaaattaattatagtatatattaatatatattttaactatattacttgtgtattatatatctaaactatatatctgtgtctatgtctgtatctctagctatgtggacatttttcctgaagaaaaaaagatgcataatatcatagctatttttggatgttggaggattgtcatgtggaagaaagtttgtctttattcctcttggtaggaaaggctcagttggcagagctatggagagacatttaggttcagttctaaggaagaatttccttagggtggtgcccacaggtgcagtgtgggctgctttagagaattccttcattccttaagaccagtctgttcaagtccaggccaaggcagtggttctcaagcttcagcatgcctcgggattacctggagggcttgttaaacccaggttgctaggccccacgcccagagttgttgatttagtagggctgggacaggtccccagaatttgtatttttatctgcttctcaggtgaggctgaggctgttggtctggagaccacaccttaagaaacactggacgaagtacagcatctcaaactgcattgtgtatggcagttatttggggatttttgttaaaacacaaaatctgatttgagttggcctagaattgggcctgagagtctgcatttttaatatatctaccagaaaataccaatgcttatggttcttgggtcacaattcttgtaatggggtaaataatcccttgtcagtgatgacgaggcttgaggaaatttaaacattcaatgggcttttgggccagagggtattcaaagtcctatacaacggcccgagcccctgtgaaatgattttattttggtaagtccctaatggggacaaagaaaaacttgacttttgcctttcaaaaaaatttttatggtaaaatgcccttttcttacaattatcacaccatcattactagcattttatgacccttctctgcaggtctttaaataagaactcatttaagttactctgtgagctgttgccccttaggaaaatgcctcattgattgagtctaccactgagctttaaatggaaatgaccttcattttaaaaatttaattgagctttgatatttacttgcacatttggttatttctcataaatgctcctatcaaagaattttgagagtttaataccattatgtccactcagtgtgctttctaatgatgcccctagggttgtggctatttaaggattacaataaatcaagagaatactaatctcttaaaaaataatgtggatctgtatccattgtttgggtaatgcaaatttgcattaagaaaacaaaatgtcccccaagaggatatgcatgtttccttattaagagccaagtgaatatttcattctgttttctcctatttgctccttatgagtaagctgtgttttgcctttgttagcttcaaagtttgctctctaaggcctcttatttgagcttctctttgattttaatcctgtgagtttccattgctgtttaggttttctggcattgaggggatattctcctagaagcacaagcagttcatagaccaactggaagtacacgatgaagagctcaaaaaagaaaagctggttattaatagctctttaacttattgatatgttatttttctcatacaaagagaagaaaaccagcatttgcctgtatatgtgccaggcacttcacaccagtgtatcatttaattctttaaacagccatatggtccaggtgatataactgtattacagaaaaactgactcagggaggtaaactaacttaatatctcacagctagtaagtgatcaaatcaggatttgaacctatgacagcttgcctttaaagctgtttagctgctttttatacaatgaggcttcttaatacaaacagtaaattgtttggaatgcagatgtttccacaccctgtgcgagtggcctgacagcagaaggttttgaatgagagagggagaaaataaatgtcctggtcagttagtatctctttagtttcttatccagcagccttcaacaaattctgtattagcctgtgctataaaaagcaagtgaagatagatgcccagttggcaggagcatccccagattgaagcgtttgaacacgtgaagaacactctgtgctggttattaagccattatctcttggctccaaatccacccttcatattttgtttgtgacactggggctgaggctctaaaaccatgtttctcctttgccggcttcttccctatagtttctgtcaacagaaggttctagagggaggctgcttggctggaagaggaagactggacatgcttatcctgtttgcctcctttcctgaaagtatccccttagcatcagtggatttttcttctttatttaaaaacagactttatttttaagagcagttttaggttcacatcaagattgaattagaaagtacagagatttcccatatccctgtccctacacatgcgtagactcctttgttattaacatctgccagcagagagtacatttgttgcagtcgattaacctatgtcatattattatcacccaaagtccatggtttactttagggttccttcttggtgttgtacattctgtgggtttatgcagatttataatgccatgtgtcctagtccattttatgctgctgtaataaaatacctgacactgggtagtttgcaaagaattaaatttatttctcacagttctagaggctgggaagtttaagatcaggcactggcgggtgtggtggctagtaagggccaagtctctgcttccaagatggcaccttgaaggctgcatcctctggagtggaggaatgccgttcttcccatggcagaagaacagaagagcaagagggagtgaactcatttccttgagggcccccccgccatccatttttttggatttagagtttggcgctattgcccaggctagacttaagtagtagtatctcagctcactgtaccctccacctcccaggctcaagcaatcttcccacctcaacctcccaagtagctgggactacaggtgtgcaccaccacaccaggctaatttttgcattttttgtagagatgggattttgccatgttgcccagcctggtctcaaactcctgagcttgagtgatctgcccacctagaccttccaaaaatgctgggattgcaggtgtgagccatcatgcccagcctccatgagccctttttacatgacattaacccattcatgaaggtagtgccctcatgacctaaacacctcccattagtccccaccttccaacactgttccattggggattgtgttttcaatatgttaattttgagggacacattcaaaccattgcaccatgtatttactattatagtattacagaaggtagtttcactgccctaaaaattatttcatcagcagctgttctacacccagcaggagtgttttgttttcaatgattgattctggtttcttacttttccccagcaatctcttaaagccatctctagtggggggctgccccctcatcaggggtctgggttcttccccagtccctactcttcctcccagccctagggctggtggctgttcctacctcctctgtgacatctcagggtttcctttgtgtcttttagtactctaatatcaatttaactatttcttattttaaattctgttaaaataatttgtgatttctgttttcctgactagatcctgaccaatactctttgggagagtaacctctaagctacattgaagcatgtactgtgaacagatattgcccagtgctgacataagggagttaggcagaagttgtagaagaactagaggttcatagttttatagcatgagtcactgctgggatagcatgtcaaatatgagggaaacaaacagacaaacaaaaaacaggagaaagcagccaaatgagagaagctgtgtgttctagcaacagcttttctaataggtttgggagtactactttctctggacctcagtttcctcacctttaaatcttaggtaatagtgattgtgaagttaaatgaaattaagagaattgaaagtacttgtaaaaagtataaggccttgaattcaaataaacgattgtgacaatgaaataatattgtaatgccatcatcagacttgatctctgtctatataaaggagtttgctgggaccataggggttgttaagtgataatagggtgaggggttatggagaccaagccatcatgagggccactctgtcatggcatccattgtgccaggagcatgtgctgtctcattcaactttaccattttatagtggacaaactagtttgttgatgttgagaatcaactttcttaattattctccatttctgtcagtgtgaaggattctactgtcattgtctcattctttctgttgttctcagtcatcctcgattgtgaaacaggcacatggtaagtagtggtgttaggctgtcagattcttctggggggagttttagcatactaagagaccatgagttttaatgaaaacctttatggagttggtgactctgttttttgaaattctataaagtcattctgttatcagtaatccaccagaaaaataaagggcctcatcctcattaaactctgcatataaccaaaagtcttctgtggtagatcaggagtaaaaccaggtaccgatcattgatgaccaaattttgtgggttttgaggcaccaatggataatcccttgtagtattaatatctaggccaaaaggaatgttcacagactcataaacatgtgtcaccaactcaacaaagtcagaaatgttagagggctcagtccttggagcagaatgacaggaatctgtattggcattcatctcttcagtttttagttcaagttactgaaacaccagaatcttttcctcatttgtgaagcagtgatgataatatctatttgcttattcctcagggacattttgagggttgactgagatcaaatgtgaaaggacttggtgaattgtaaggcacctagaaaatataatggaattaaaggattaatgcattacaggaaggcttggaatcccacccccacccccaagacctgacatttagcttcaggggcaatttggggatttctggacaaatccagcagtcacaggggcctataagacagtctgtgtagaggcgctgaaggcctgcttctcgcagctatgtgtttcttggctggtcatctgaggaagatgaatgataagggaggcccaggcccccacacagagtgagctgcttgagggcagtgacagggaacgtgtctgtaagagtgccgaggggtatggttaaagggaattttgaggcacttcggatttgtgtgacatgtcaaaagctgacaggctgtgctggaagcagcagttagagatggagttgccaaatcgcattcagtgaggtacagtggcatggctgacagcaaaattctgtgagggtgcagttatatccttccatgagaggggcagacagtatcattctccatgtgcagagaagatactgccttactcagacattacagattcccaaaagattctttgacaattactgtaattttacaagtaccacaatactgtgcaaatattggctaacatatagtggtaatatcttaaagactttctcgacaagggtattttcgtatataaatacataccatgcaattgttcttctacaatttgatgtttttttatatctggttttatgcagaatacaggaacatatgtttcattgtttaagatgaagacataatttgtttgaattttatgagcttcatcctttaacagctagattctgtgtttctttaatagttgaagtgaactcataatgaaatatcttaagtctagggtactttttcctagaatcctgggaatgtgtagcaaggagcggcagttttgacatttctcacattaccttggactttccaaggatcccagctcttaggttttgaatgtgatggccttttggtctctgatctgaagtgatcaactcctcagatgaggttggtatggactagactgactgacctgtttattactgctatttaagattaagctatgatttttagaaagtttcttgtgaatcgtttttaactactaccacaaaaagcctttgccaatggttatttattaataaaagcaaccactgtctaagggtcttttccacttttaaaaaataataaaatgaagatagattcagaaaacaatccttaattaaaaaaaattaaagttagaaaagaaaaagatggatgaggaaaggtttataggattcaggctgtttattctggaagagagaagaatgcaagatgacttaatctgtgttttgaaatatttgaggaggttatagactgcaccatctctctagaggactgagaaaagaggaaatgggtttacatttcagcaagaaggaatgacacaggaagaacattttgagtatgatgaaaaactaaaataggacacttagggaagattaaaaaacaactttttattttgaaataattatagattcacaggaaattgcaaagaaacatacagggagatttcatgcctaaaggaagtttttgaatgctctctctagagaaaaatctggcttggagaaaggcagttggaccaaatgacatagtaagctggaagttttctggctctttcacaaatctgtgcatcttatgctcttcccataacatgtttcccattaaaagtcactgactgtccgggtgcggtggctcacgtctgtaatcccagcactttgggaggccaaggcgggtggatcacctgagctcaggagtttgagaccagcatgatcaacatggtgaaaccccgtctctactaaaaatacaaaattagccaggcgtggtggcaggtgcctatacttccagttactcgggaggctaaggcaggagagttgcttgaacctgagaggtggaggttgcagtgaggcaggatcgctccactgcactccagcctgggcaacagagcgagactctgtctcaaaaaaaaaaaaaaaaggtcagtgaccaccacagacgagggcaccttctgatgtgtgaaaagtatgtttcttgtcatgaaaatttaaggagaaccagcacttgctgaatattttccaaatttgggctccattgtgagaggtgctcagacaaaatttgccaggtagattttattgtcttcattttgtaagcatagtaactagggttcagaaatattaaactgctttccaacaatctaggctcagagtaggtgcacctgggatatgagtttgcaccagaggaattgttctttctactatatgatgctactagagaacaattcatatttttcctaagaagaaaattgtcttcttactgcacactactctgcatgccatcctcccctatctctgtcccattccagttgctcccaaggtgccagtgatttagaaaatcccaacatgaaacagagtgtaattatgattttcgttatgtagatgagaaaatagagaagttctgtggtgtctccaggcccaggaagaagcaatttcttttctggtggcatcagagattctcttaactatatttatttagtgttgataacactttttttggagtaatttcatctagttgcatagtttcatgtcttttggtgttctcattgccttgaatgccatccttttttttctatctgaacaggtactaaaaatggccttttatttttattccatttgttttctcctttgtctcagtcacagtgtagccctttgctagaagagccccgtggagttagctaaattgtagctgtctcagggctttccatgttagatttttgtatcattgaggttttgagtcttacctgggatagagaccatcttgttcatctctatttttaacaatacttacttttaatttttggcattaaaaatttgaactctcattttaagatgttgaaaaatacagaaaaacattttttaaagaatataaagtaagccataatcccattgtttggcaacaaataccggtaaccttttaatatattttcagtttcttttatatggcagaaatttatatgtaaataaacagtgaccagatagacattgttttctctcatttctgagcatttttttatgttactaaatattcattgaaagcatttaagttatttacctttaaaataaatataaagtgtatataagcacaaatttaaagtagtacagaaaagtatgaaatacacattgtcttaaccctaaaaggttattgcctttaacagtttctcactactcttcctgataacaaattttaaaagtacctacacaagtggaatattatacttgttgtgtatcttgcattttatacttgttgtatatcttgcattgattttcgcatgaatgttcatcagggatattggcctgaaattttctttttttgttgtgtctctgccaggttttggtatcaggatgatgctggcctcataaaatgagttagggaggagtccctctttttctattgtttggaacagattggaatagtttggaatagattggaatagtttggaatagtttggaatagactggaatagtttggaatagattggaattgtttgacgacttcttttcctatttgaataccttttatttctttctcttgcctaattgccatggccagaacttctcatattatgttgaataggagtggtgagagagggcatccttgtcttgtgcccaaagggaatgcttccagcttttgcccattcggtatgatgagtttctgctgaaagatctgctgttagtgtggtgagcttccctttatatgtgacctggcctttctccctggctgcccttaacattttttccttcattttgaccttggagaatctgacaattatgtgtctcagggttgatcttctcgtggagtatcttagtggtgttctctgtatttcctgaatttgcatgttggtctgtcttgctaggttggggaagttatcctgggtaatatccagaagtgtgttttccagcttgtttccattctccccatgtccttcaggtaggtactccagtcaatcattggttcggtctttttacgagatcccatatttcttggaggctttgttattccttttcattctttattctctagtcttgtctgcatgccttatttcagtagggcggtcttcaaactctgatatgctttcttccgcttggttgatttggctattgatagttgtgtatgcttcacgaagttctcgtgctgtgtttttcagctccatcaggtcatttatgttcctctctaaactggttattctagttagcagctcctgtcaccttttatcaaggttcttagtttctttgcattgggttagaacatgctccttcagctcagtgtagttttttattacccgtcttctgaagcctacttctgtcagtttgtccatctcatcctccgtctagttctgcacccttgctggggcgacgttgcgatcatttggagaagagtcattcaggctttttgggttttcagtgttttttccttgattctttttcatcttcgtgagtttgtctagtttcgatctttgaacctgctaacccttggatgcggtttttgtggggctttttttttttttaattgttgatgctgttgtcgttgctttctgtttgtttttctttcaatggtcaggtccattttctgcagggctgctgcagttccctgggggttcatttcaggccctattcatctggctcgctcccccgtcgggacatgtcactcaaggaggctggagaacagcaaggatgggtgcctgctccttcttctggtatctctgacttcgaggggcaccaacctcaagccagtaggatcactcctgtatagggttcctgacaacccctgttggacggtctcaccctgttgggtggcatggggaacaacaggacccgtttaacaaagcactttgtcccttggtggaaggggtgtgcctcactgtggggaaacacagtcatctgggctgcccagattcctcagaactaccaggaggaaaggctaagtctgctggtccgcagagactgcggccacccctcccactaggagattaggtccaaggagatccgtattctgtccctgagcctctggctggagttattggagttcctgcagggaagccccacccagtgaggatcaggcctgaggaggcactctggctgcagtctgccacagccggtgtgttgggctgtcggggacacgtcttgggaccaagccgtccagcctccctggctccagcaggggaaaagcatggcctggagctatagtgatagatgctgcctttctcctgcccagggagcttagcatgttaagcagtgtgagtcccagtgctggctgctgcccctcccttaaggagctcatatggcttagacagcaggcagccgcagctgtggtgctggtcacccttccccctgggagctcagtagtcttaagcagattccagctgaagggctattgagaatccgtgtggctctggagttgggacgctaggccccggtggaatgcgttcacgagtgggatcttctgatccatgggttgcaccattccgtggaaaaggcatggattccctggctgggtagcatgttcacttactgcttcccttggttggggggagagggttctcctggctctcaggtgggccgccataccacactgcgcttccttcctctccgtggatcatgccagcctcctagtgagttctgatgagagaacgtggataccttggttgccagtgaaggattcacacgcttactatggttctttttgattggagcctcagatcgccactgtttatagtcggccatcttggccctgcccaacaatgttttgataccagtttttttttttttttttttttgaatgaggatgaccatcttttcatatgtctattggtcatttgttacttatttctgtatactacctttttatatctcgtgtgcatttttaattaaacttcgacatgagaaatttattggtattcttatttttccaaatcattggctatatttcacattataaaactcagcctgatgggcatgaaatggtcttggtacattttcctgatgtggctgaatatcttgttgtatgtttattgatgtttccatttgttcttttgaaaattgcctacttaacgtcttttgcccatttttctgttgatcatcaaaaatctttaaaaatgtgaaaatctaggatgtagaagagtctggaaattttcatcttcaaaactttatggttaatttcttgaagctttagctagcaaaagtgatcctaaattcaagtggcagagataatgcagatgcaagaatggatagttatcctatgatgacagagtattttagtggtcaacctaaataattcaattcttcagattcacttttgcttatatcgttgatatcataacaacatggtgggactttgatcagagttctgtactgtcagaaagggcccagtggctattttcttagagaatagtcccagtagcaagaaataagaacaacaatataatatgaacacacgtagagatctaatgtacatgaggcctgagttaacaacattgtattgttttggagattttttaataaaataaataaacctatttattttaaataagtagattctagctgcttttgtcacacacacagtgagatgatagatatattaatctgcttcactatagtagccattttactatatatgtatcctataacatgttgcacacctcaaatatacacaacaaaatttataaaacaaaaaaagaacaacagtgtaagtctttgtaaccattaaataccatgccctaccaggatatgtaattttctgtgggaaatattcacagtaggaaagtaaagcaaattataaatatatgtagtatgatgtaattttgtttaataaaaacatggtaagcaaagtataaagaaagatctggtagcatgtgggggagggatagcagaaaaatgttcaaatgttaataatggttatctttgatagcattccttgcgatttttaatattattacaagtgctttttgttactttctacacttgatgtaatatacactgcttttaaaattcacaaaaattacaaaaatgaagatagtagaattttgatgggcaataaacatttcttgagttcttggagaacatggactattgtgttatttgtaaatgcctttgctttgtccatagttctctttcaccacaagattaattatacctttataagctgtgccaccttttttccacatgggctttgttattactcaacaacaaaggaaacacaaaataaatataaatacatgtagtatgatgcaattttgtttaataaaaacatggtaagcaaagtataaagaaagagcaaagtgtaaagcaaagtataaagagcagggctgatacataatagatgctcactgagtcattttgtagtgactcattaagctatttaccattttccctctgcagataattgtgcgtgaaaatctttacatctgtggcctttcttctttgtctgactgattgtgttagataaatatctcaaagtgagatttctgagcagagtgtatgaccatatcacaaatattttaacaatgcctctttaatttacttttcttattttagggagagtggctaatttcctccggtacagcaagtgttgtttttcagattttattctaccacatactttattttacagtttttataaaatagcctgctttaaaaaaatcaatgtattatagattttcatgttttgcatattttatgtaaatatccttttcagtagctatataatatttcaggggtttctttgtactcagacattaaacattggagtcaccttagggtttatttcttgaatctcctcccgtatttatttatactcacttcccaggtgatttccttgttcttatgggctttatatgtcatctatatgttgatgaaaataaatttctatcccttgcccaagcctaaacttcatactagcatatccaactgcctactggacatctccatttataagcctagtagcctaataagcataacctcagacttaccaggcctcacactgaagtcatgaacttcagcccaacccccatgccagggcaaaaccttgttgttacctcttattcctctcttgcctcatcccatccatgttcagtctgtcagtggatcctgtgagtccagtcttgaggatagttccaggatctgatcacttctcactgcctcttttgctgccaccacctctggcctggataattgcagcagcctcccagttagccttgctgtgtccatccttgttttccccttctgtctgctctcaacagaggagctagtgattctcttaggacagaataaatcatttaggttttcttcacatggtcctgaagaagcttcctacctcactcagtgtaaaaaccaaaaaaaaaaaaaaaaaagtccctaaaatggcctagaaggcactgtgtgtggctgcctgctgctctctgaccccacttcattcctcctgtactggctaactctatactagcctctctagccttctggatatgccttcagcatctcaatcagactccttctcagagccttcattcttggccgctgttccttccagaatgtccttcccccacttatctttctagtttctttccttacttccttcagggttctgtgtactttctcattggggtcttccctggccaatctgttttaaatgacagccctacctaggtagccctgtccttcttagcaggctgtatttttctctctagcacttctcaccatctggcatagcatacactgcttggtttatttttaatctccctctgctagaatgtaagctccataaaaatgggattttgttcactgcagcatccccaacacctagagcagggctgatacataatagatgctcactgagtcattttgtagtgactcattaagctatttgccattttccctctgcagataattgtgcgtgaaaatctttacatctgtggcctttcttctttgtctgacagattgtcttagataaatacctaaaagtgggattactgagcagagtgtatgaccgtatcacaagtattttaacaatacctctttaatttacttttcttattttagggagtgtggaaaatattgtttttattaatagattatgttatgattgatcggatctaaattttgtctaagctatttaactacctttaagaccttgggcaccctcattaacttctttgagctttagtttatatttctgttaaatgaaataaatatttaattgaaagggttattgttgatctaaaaaagaattaaacattgcaaagcttttggcatatagtatctgtcaataaatagcagtcccctttctccatcctggccttcattccactaaatatttgttttcttgaaacagttttgtcttaggtaggatttaacaatatacagtcatgcacatatgcctgctcactcaggcacatgcacatgtatatgtctaaacatgcacctgcatattagctttcaaaatcagtctatattgttctggtcagttttaaattgataatacttactctgatgctagccacggcacaccattcctgacgaatattggtaaccaaggacgtgttagtagttcagcaatgcgttgactcagttacctctccccacttctcctttattgaatttttacttatgcataggtttttttctggcacagtttggtgtgggaatatgttatttctcataattggatttaactgtttcatctgttattaattggttgtgattaatttcaaagaccttgcaagcacttttgtatttaccaatatatttgtcatttctgatgctctattcatttgtaaagatctaagtttccatctggttgtgttgcctttcaacctaaagaagaacttcctttagcatatttgaaatgggaatctggaggccacaaatacccttagtttccttttcactttcattctttgaaggatattttgctgaacatagaatttttggctgacagttttttttttttccgcttccagtatagtcatgagctgcataacatttcagttaattatggggggtggagggttggaggggactctacatatacaatagtggtcctataagattatgattactgtaccttttctatgtttatttatttgtgaaggaaataggtttaattgactcacagttctgcattgctggggaggcctcaggaaacttacaatcatgactgaaggcaaagaagaagcaggcaccttcttcacaagacagcaggacagatggagtccttttctatgtttagatacacaagtaccattctgttttaattgcctattcactacaataatggtaatgtcctgtacaggtttgtagccttggagcaataggcaataccatatatcttaggcgtgtagtaggccataccatctaggtttgtgtaaggacactgtgatactcatacaaagacaaaaccacctaatcatgtgattctcagaatgtatccctattgttaagtgatgcataactgtactttaaagatgttattgcactgtcgttgagccttcataatttctgatgagaagagcattgtatttcaaattatttttccctgtatatagtgagccgttttgtctggtgaattacaatattttctttttatctttggttttcatctgtttgactgtattttgtgtaggttttcttcttttacagtttacttctctgtagggttcttgagctccttgaatctgtatgtcttagcctgttttgtgttgctccaaaggaatatctgatggggctgggcagtttataaagaacatgtttatttagcacatgattctgatgactgaaaagttcaagattaggcatctgtatctggtgagggcctcaggctgcttccactcatgatggaaggtgaaggggagctggcatgtgcagagatcacatggcaagagaggcagggagaggtgccaggttcttttaataaaccagctcttgtggaaactcatagagctagagctcacccacccctgagggacagcgtcaatccatttatgagggatctgcctccatgacccgaacaccttccagaaggccccacctttcacattggggatcaagtttcaacatgaggtttggtgggcacagaacgcccagactataacagtatgtttatgtcttttaccagattttggaagttacagactattatttcttctaatattgttccccctagtttgtctcctttttccctgtgactctaattacccacatgttagattttgaacaattgttctacaagtcttcaaagtctgtttatttctccattttttctttctttttttttttcagattgcatggttcaggttcactgaatttttcctttgcatgtcttttctccttagagtggatcatattttacttgttcttcatcaacctattagattatgtatcctgggcatggtgagagttattttgtggagatggtggatttttttacattgctttcaaaaatgttgatgttttgttaataggcagtttacttagactcaaattgtagcctgtcatgcttgcagtggacagtggctttagtctcagataaattctttaaaccttagctcctatctgcattcagtttaccttgtacattcatggttcagaagtcagctagaatcatgcttagtttatatacagaattagggtttgcttctttggcattgtctcttctatagttctctagtcattctctgatttccccaggcttttttccctggttcctgcagctagaaagaggatgtgtttttctatcaaaattttgcttgctgctgtgtctgtgtctgatctcagggtagagctgcagaataaatatataaatgaacagagaggtcactctttactggttgcttgctccaacttggacacttccccaaagtcagtttcctttttttcagtctccagagccctcaggtagtgtttgtttgtttttgtttgggtggagagagtgtggtgttcatatgttgtgaaatccattagctcattcctacacgacaaaaagagaatgtccctttcaattatttttaattgaaatccttattgagacagttgtggattcaaatacagttctaagaaataatacaatgagatctcatgtactctttacccagttacctataatggtaacattttataaatttctagtatggtatcagaaccaggcttttgacattgatacaatcttccgatcttaatcagatttccccagttttgttaatacttgtactcatttatatatgtgtgagatttaattctatacaattttatcacatgtgtaggtttgtgtagccaccatcacagcatcccaactatttttggaaagcataggaagtgttacagtttgaaaggactgaaagcctctggccatgctacccacttgagatgattaaatattttaaagtagttagaacaatgacatatgtttattttttttaataaccacctttccagattgtaaacttcattgagtacaaggttcatttcatggttttcttttttttggggggtgttattttttttggagatggagttgtgctgttgccaaggctggagtgcagtggcacaatattggcccactgcagcctctgcctcccgggttcaagcgattctcctgcctcagcttccagagtagctgggattacaggcgtgcaccaccacacctggctaattttggtatttttagtagagatggggtttcaccatgttggccaggctggtcttgaactcctggcctcatgtgatctgcctgccttagcctcccaacacgctgggattacaggcgtgagccactgtatctggcccattttacgttttgactatatctctcaccacactactgcccagtgctttcttccgtactttgtgcagagatgtttacctcatgtttaaaatacaaatacgtgttgccaaatagaattgaaaagtagcagtgtcttaggtttcttctctgctttttaactgagactagtatttttcaaagtttacatccttattatgtttactttcaaatatagtacatgaaagtactttatagatgtttgatcttttgaaggtggtgttgccgcctttgattaaaaaagtaattaggtgagcatttccttatagaggtaaccatcaaagcttgaaagcacatatttcctttcaactattacatttgtcgatgtgttacccccatcccccatcaatctgcttctatctctgactctatctctttctctcaaaatgttatgaaagacagcctttgtgaacttatttatgttagaactggcattaaaaaaaaatccagttttttacatggtctaatggaccatgataagtcagtgataaaattatagtagttgtgtcatggatcttattttgtatctaaatatgctctctgaaaaaaatgtgattcacgcctttttttggagaataaacacaaaatttatattttcatataatcagtaatacctatttgataagaattacatgctcttgttttttcttctttcatttggggttcactttttctgcctatcttatgcaattttaaaaaaatcttgaaaattaagtgtttggctcccagtatgggttatgttgaaaaagagcatacctagtgaggggttggtaaagcctacgcaagtgctctttcaggcaactttgacattctagggacaataagtattaaagaagtggcttcttgagttggagtggtcagtctcctaccttctgggtcccaaatgaccctgagtagatgtggatattcaaggaaattaaaatgcaaagcccctttggaaaagttagtaagggtacctaccattgtattttacttgatggttttattcattcattcaaccatcaaatactcactgagtacccacagtgtgccaggcatataaatgaaaagatgctatgacatcgttcaaagaaagatgatttatgcacatacctaccatgggtcatttaaactttaatggacttcaacatttaaattgagttaaattctattaagtttgtctgttattcttctctctctctctctcactgtctgtctctgcatcctcagattttggggcttagcctgtccaatgaatcagagtggggagctgattataacaatgacccttctgggaaagaaatatactgtcttctgcttccatttccctggaagtagaggccactgacatctctggtcctctctgcaaagtggggataatggtaatcccgcttcatctggttgagggaggtttaaatgagattgtgcacagggctctggagatgtggacttcgttaaggcctggtcctgctctcttgggggccccacacacaggagagggatgcacctgttacaccaactcttctgtgggaagtgtggccacagcattctgggggtcattgggttggataggggagctggaaaggtttgggcccttagagaaggccaggtgtggatgagcttagaccccgttcacactgctggtatggactcactgtggaccggcaccaggcctggggtttgaggatgagagtcaccacaattttatgtccacatgggaccctctgcttttccttttaactgtggcaaaataccagacgggggacacttttgtcagtgcacgtggtgctgggacagttggatggagggtaaactggggcaagtggttactcgaccagatgtccctggtttttttcagtgcctatcctgacatctggtctcttttttctgcttctgcttggtataatactttcacaacttgaatacacatggcttgtttcagtgtagctgaggctggtgagccgctgggcccaggaaagtcatggtttgtaaatgctatgatatgaaaccttacccatggctcctgtcaaacattttaggcaaagagactctatgatatgatttttaaatacatacatgtatttgtagaaacacatacatgtatttgtagaaacacacgcatgtatttgtagaaacacatacatgtatttgtagaaacacatacatgtacatatataattataataattttttcacatatgaggagattaaggcagagagagattaattcctgtagctaaatctccatagccagatagcagcagaaataattcccaccctatcctttggacattgctgtaaaaatatgttaacaaagcatcatatttatttgataattttgattattgaaatttgataagttgtcaattaagtggtatgctgttgcattcattcttggaatttaaagaaaatagagttttaaaagtggtttgaagcttaaaaagagaaggagagatgtatacattatgttgtataacaaatactaaaaattttttttgatttttttttttttggctgataacagaggtgaggaagttgaagagacagtgttgagtaaatttcttgactcccctactgcctgcccatgcattgtgacagggcacacaaagaatgtctgctaacttgtccgcagcactcaacaccgtgatagcaacaacaaaacatatttactgaagacaaccagttgattaaatgtcttgaccccctcctgtgtatgcacaggcattgtcacagggcatacaaagaggaaatgatcagcttctgcattgagactcagtgctatttagatgaagaaagaagactgtactggaacagcaggctgttacaaggatgatgatgacaaagtcggaagggaatgtgaacacaatgtgtcagaggtgtgggaaggggaggatgagggagggcggggaggagtccaactggaaagactagaaagaaaccattggaacagttgtgtccttcacaccaaatgcattttgtggtcttactgtttgcttttgctggaccgtatgtcttttcaccccgctctgttgtaccttatgatgaggggcaaataaccacaaagcaggaaaccttgtcaaggaaacaagttctagactctgtcttgtggtcattgcccactaaattccttctttcatcactatagccatagccccatgattatcatttatagagaagggccagagtcgttaggaaaaggttatacttactgtcaagaaggtagggatgtaggtaatgcagctcagaaaattttacattaaacagaattgagaatgtagaagtttggggaaaactccagtttctagaggatttatatatcgggaaggggtgattcttctttcttcccaactttgtcccagagagcccagtgtaccaggtattacggtgcattttctctgtcttatctttcctggtttaggcttgcacgtgtacaatgttccattttcctgtttaaataaatttcttcacttttacttgaaataggacccagtaggatattatgtggtactttacatgtaagtttcattggtcctactttaaaaacaaaaacctttgtctactgttctttaatctcatcaactgttattaaggaagcttcatctaagatttaattatggtctgttttgcatatttatcaattgttgcctttgaccaacagtgaattaatttgggtaatactttcacatgatatgaaattatcctgtattagtagaaaatattaaatgttactactgaaaatgaatatttacagagttttatttcttgagcatttagtctaaaacaacttttaattttttttgttttacacagttttattagcaatgtccccacacctttggggccccatgcacttcacctgctccccttcagcacctcattcacacagcaaatgcgaccagaaagaaggctcagtcctcccattcctcttgacgtaggcattggcttaggataaaaacagttttgtggatgttcataaacacttgcgacttttcatcttgtctgggacatcatgcccttcgacatccttcattactctttatgagaaacaagcaaataaccacaaagcagagaattttaagaagccatgagggattggggctgaatttagcacactttgattatagagacaaaaattgccaagtttatgactacgggtggtcaaagcgctctctctgcatggataattagatgcttagtaaacgttttctcacagtaaaaatatgactattgctctgtgtaagaagagtataagttatattattttgaaatcattgttttatttctatcttatacacttatattttcatctcatagtctttctagctttgtctcattagaacttgaggattggagggtttaaatgttttaaaaggatttcttttttaatgttactgctgggggctaacagagagaaaaacggttaagtctgccttacagttactgacaggagtgttgacaatgtacacccatgaaatcctaccaacactttattgggataattgagtaatgtgtaactggtggcattaagaatcacatagaaagaataaattctgaccttctacttttttctttttgtaatttttagatttgtagccaaaccgtgcgccatagccctcaacattcaggccaatggaccacaaattgctccgcccaatgccattctggaaaaggtcttcactgcaattacaaaggtatgattgtcctttcctggggtatagattgtccccggtcaccattctcagcctgctgtcattcaatttgtccccttctgggtttggagaatcaacttttgcctagccttatgctggagaacgtgttgtcagaaggaatgcaagcgtagtagaagcggaatgaagatgggcttgtcttagacttggtagtttacgctcaagttgatttttagtagctcacctgagaatagtcttgactaaataatgattagtctaattctgtgcctcttttaatcacatgtgaagcaagatgtgactagaagcaagatgagggctgggagggactttgtggaggtgactgggtggagctgaagaatgtgatttatgtgtgtgcgaaaaaagggacctcttggcttgtagcattgtccatagattctaggagctgtgataagtagacaaatgtaaacaaaaacaacaagaaggcataactgcaggataaaagattgtaccatgaagttatgaagaaggagggtcaggagagtcttaagtgaagagataggttcactgtggagaataaaagggaggagatactcaatctggtgggagctgaagcccaaactaggagtgggaggaagggagtgggagagaagtgggtagaagagaccacgtctcctgcctctgcccccatcccaagttcagatctccttcagaacaaagagggaggagaaagctggaagtcagaaaccctcagttgaaggccataggaaaatagagcaaattaccgagtttttatatatcttaccttattcttgtttggacaagaaagaagaaaagatcaggagaaatacaacattctatgagaagtattgtgtgttcatatattaaatggctcattttctccctttcatttttctgggagaattacccaggcttccaagatgtgatttgacagaattaagcaaattctatttcttttcttggtatttgtgtttctagccatttgtactagctatctcgtcttacaactattaattcagatatccaaacacttttatctattttatggtcttcatttcttccaaaattctctagagtttttccctctgtccttttaaaaatgtttttccctcaaaaaattaagaaagtaccaggtgtttttcatatctctgctaggaagaagagaagaatgaatggaattttaggaaaagctcttttgatggtttttatggggtaatttcagattgccaggttcctgtctgaagggacacatatcttacagtatttaaaagaaaaaaatataaagaaaaagcttgcattttcatttagtgtatcaaattacttaagtgaaacaactttttccctcttaaaaaagcaggtgtgtagggacttctcaggttcatttgtaagtgtgattataacatatttggagtctctttgtgaactactctaagtacattaaacatacagtattctaaatgaataataaaatgaggtgttttttttttaattttgttttttgttttctccacatttgatgcctctccttaaaaatcctgcagtggatgtttcacttcccttgccttatgttttttacagttactggagaaatttcctccataaaggtaataaaaagattttgcagccaggttgacttttctaaagaatacttgctttggctgggcgtggtggctcacgcctgtaatgccagcactttgggaggctgaggcgggcagatcatgaggtcaagagatcgagaccaccttggccaacatggtgagaccccatctctactaaaaatacaaaaattagccaggcgtggtggcgggtgcctgtagtcccagctactcgggaggctgaggcaggagaatggcttgaacccaggaggcggaggttgcagtgagcagagatcacgccactgcactccagcctggcaatggagcaagactctgtctcaaaacaaacaaacaaacaaaaacaaatacttgcttctagctaatttgaatgatcatattcttttagtttccaaggtgattcctttggaggtttttacatgattaaaacagaagcgtcatgtaaaatataaatgcagcaaaagttggaactgttttcccttgtattctttgtagttctccggtcttaattgtgatatgaaatgtaaccaatcagttgactggaataggaggggcaggacttgggagagcttgaacaaagtgtgcgtttgtgtgtgtgtgtgaatgatcatccagtatcctggccttaccacggtttgagctgcctttttgtagaagggcatgattataatccttcaagtgtgagagaggtacccttaaaatctctgtatatgactggctacatagtttgtggggcccagtacagaatgaaaatgtgggaccccttgttcaaaaagcacaaaaaaagtgccattaagcatacaaaaacataaagctttttccttcctccctcagtctctctctacttgtcaaggtgtttttttgtttgttgtttttggttttgagacaaggtctcactctgttgccaaggctggagtctagtggcataactgtagcacactgcagcctcaaactcctgggctcaaatgatcctcttgcttcagcctctcaagtagctggaactacaggtgtgggccaccacacctggctaatgtaaaaaatttttttggagagatagggcctcactatgttgcccaggctggtcttgaactccgggcttcaagcaatcctcctgcctcagcctcccaaagtgttgggattatagctgtgagccaccatgcctggtcaaggtgttttttatttgtcgtgtaatgtcatgttccctaatggcatggggagactcttggagaaagtgcagaccctcacaggtagctgggggccccaccctgtgacttagtgtgcacatgacccaccagctgccaggtttcccttttctccagccactggctgacacactgtaccttggtcaggggagcagagaaatacagtcaggcctctcttcaggcccactgccccaacccatgggtgatgaaggaccttcaagtgcattgcaacctctatgcccagattcagggctacacaaaaggctcagccctaccgagtcgcccaccacatgcactggggtagctgcctccatcctctctgaaactcgatcccccactctctgtgtttgcactcggccctccactgggggctgaaggcagcagcagtcactaggaagtggggagacagggaggctggtgagtgctacaagccaggggatgaggaactgggcaaccacacacacatttggcggaagtggtgggactgtgtatgagccaagaatccaagctcctggcacatgctcctttgccccattggacttcattataataagcacaaattccatgataaaactgttaagaatttcaagatggtgactgcagggtttccaaccccaaatgtggacccttctgaatgggggtccctgtgtgatagcacaggtcacatgccctatctggttctcctttgtgaaattattaatagctgaaaaatttgaacccttatatattctgtagcagtctttccttttgaagtaacacctgtcttcctgttgcctgtctctctctcctcccccatcccctgtctaaaattttataaacactttatagaaactactcctattgtaaatgtcaattagaagtcttggtgtttgagccagttacacctggatatttgtgttggaacctcagctctgctgcgtcccgtcattgtggccttgggtgagtttcttaacgtccctaggctgcagatagctcatatgtaaaaatctttgaataaccgtctcacaggcgttcatgagggttaaataatcatgaagctcatttgtaaaaatctttgaataaccatctcacaggcgttcatgagggttaaataatcatgtaaatcattcagtaaatgatatagcatcttttgtctcattggttcccatattttgatttgcatttaagattacctgagagttaaaatgtagagtgttatgtcatgtttctatagattctcctcaactgtattggaatgggaccaaaacttctacaattacggattgtcagacccattcaaatgaacagaatgattatttctctttagtgaatatttttgagctcgtgtttcttaactggttatgttgtttcttaactggttatattcagaattatctgggtaaatatgcttttaacttttggggattctcctaccatattatttgtacatacctatgatactaactacctcacttttctaatcaaatcagtgcttaagccatgggggtgagaatatatgtcaggtataaagccaggttttatgatccagggaaataataaaattaacttttggtatgttagagtaaattttaaagtgataggcagatttcctacaatttgtttttcctaattctcctcaataatctatttcctttcatttttattttatactttccttcttcgcctcccagtactggttaagattaatgttattaatattaacctaggtgtttgtaatatataaatgtttatgtgagtctccattattcatttctttgcctggaaatctttcaaaaaaacttacggagaataataaggaaagaacaataagaaacccccaccctacatacagagtatacacacacacacacacacacacacacacacacacacacacactacacacacaaacacagagaaagaaaaaatgaaagaaaatctcacaaatgtcttatttggcaaattaggagatgcatatctctagatttcaaaacatataaaggctacctagattgggcagaaaccaagtatgaggaagtgaaaagcatgaagtgtgtctggagggccgtgtgggggtgggtgtcaggaaagccagcacaaaagcacttctcaagagttgaggagacaaaagaaccacccactgtttgcaacaataggtgcaggaacaggtgagccaggctggcaagagtggaggagggacacataaagccacgtggagggtatgttttcaggagtccatctcccttcatggcagccagactggaagagcatccttcctgctccccacactggaagtagcaggtcaagaaaattcaactaattcaaagatgattaataaagaagcaactcacacaatatcaaagacaataaaaagaaagtatagcaactcctgttaacaaaattttcactagaataatgaggctaaagaggcaaatgaaaactgtgattaaatattttaccataaatttaaaaaaatgaagcagtaactctgtgaaggaagatcacagaggaaatataagaactaaagaaagaaatggttggtcaacaagaggaggtggaatgtgagctggtagagttcagagaaaagtaccaaatccatcacagaaaaaaagacaaaattgggaagaaggcaggaaacactagtcactgcagaaaactcagcaaagaatatggaagatagaaagaataaaactgaattaaatgaaagaaaccaaaaagagctacaaaatggatatataggccaagcagatccagcatctctgtaataggaatcccttaaggaaaagcaaaataaaacaatgaattaaaacaacttctgagatataattcaagattttttcctaagataaatggaggtttattttaatatgttaataaaaatatagtgaaaatgggcccagaaagttcaacactaaaacttaacattgttaaagttgctggacttgataagtaaagaaatacttcactgagcagctgggcaaaaaatcagatctctttttttagggaaaatgttatgtgattgtaggcctttctatagtaacattttcaatattcccaaggaaaatgtgaactaagaattttatatctagccaaattgtttttactctgtaaaggttatagacatcatgttagacatctttgaacatgaaaaaatttagggatattattccatgagtctttcttgaggagactctattaaatcattaattttagctgaccaagagatcacttggaatgtttgtaagttttgaatatatttaaactgtagtactaagaaagaaatctaaggaatggtgacagacagaatgttaatgttctaggttctcacagtgtagaaatgatacagcaataactgagtagaaggggaagaaggtgggaggcagaatcagttcactgattgcatgatctctaagaggggagtcaaagcatatcagtgaaagctggcaaatcattacaagtatacgcatatttaatagtaccagagtaaatgctaagaaagataatattattgactattgtagtattgggtggtggaggagaaggaaataaggctactttaataaggtggaggaaataaggctactttaaatattgctcatttgaattattagagatggaaaagaaagagtcatatggataaccactagaacaaaaattactcccaaaaggaaaaaaaaaatgtagtgaaatgttttttaaaatcatcaaaatggaaagtagaacataattagaaagaataaacttataatcatattaatacacataaatggacttaattcatctaataaaaactaattcaggctttggttattggtatgggtcgaattattttcttccccaaaatgtatacattgaagtcttgatccctagtacctcagaatgtaaccttatttggagataggatctttacaaaggtaaattagtcaaaatgggattattatggtgggtcctaatccaatatgccgggtgtccatatacaaacgggacaattggacacagagataggcatgagggaagatgctgtgaagaaacacagggaaaagacagccatctgcaagccaaggagagaggcctggtacagatttttacctcacatccttcagaaggagcaaaccattcaacaccttcatctgggacttaacagcctccagaaccatgagactatacacttctgttgttcagggaactttgttacagcagccatagaaaaacaatgcagtcatgaaaaaagtatgtgaggagcaccttaagacaaagtagtaataaatgttgaaaataagagcataggtgaaggtatacaggcacgtataaataacaaagtaggatttctaaaagcattaaatgaaaggaagaattgactttttattgtcagaggatacaattcatgatgaagataaaatagttatgaatcatatatgtattaaatattagtgtgtctgtatattcataaaaaggaattgaagaaaaaatggaaacacaatagaaagaaattctgatttacctctgaggcgtgatagagtcagtgagaaaatataaaatagaatatagaaattctaaggagcataattaggaagatctaagggggtacatttataatcctatattctgaatgtagagactgtactttcttttcaagtagctattaaatacttacaaaaattgatgctgtattatgttaaaaaactataatttttaaaaattaggcacgatttaataccagaaattagaaaacagaaaaatcagaaaacaaaacctcttcctcctgaaaatttataaatactgtcttattaactcttgggtaaaattgaaatttcagaatatttagaaaacattggtaatgaaagtactacctttatgtgctatgctgcaaaagtgctcattgaaaactcatacagatatgaaaaaaatagccatttggttaaacattagaacaagaacaacaaaatgaatggagataagcagaaggaagaaagtagtaacgataagctaaaatcaatgagttagcaaaactataactataattttaacttatataaaaaaattaatccccaaatcctacatttatttatttttgttttaccaaaggcagctaaatcgactaagaaaaaaaaagcaagcacaaataaacgttatgatcaataaccacagaaacaggaaaattaagagagtggggcagatgtaatagaaaaacttgactaaaaaatttattctaggaaagtataattgactctgtgtgtgtgtgtgtgtgtgtgtgtgtgtgtgtgtgatgtaaagatcaaattaaaagaactaaactgcaaaaaagtaccaggctcagatgctctcacaaaagattttgtttttcattaacccaaagtgtttattgaacatgtaggtatatatttttttctttgcccaggtgattagcattttaaaggtatgaaggcctaaattcatacctataatatcaaaaattatatgtgctttctctccttgtttattgtgaatatttaagatgtacaatacaatgtttcagtatatttacacatggtgacatggttactatagtcaagcaaatcaatatgtcatctcataaaaaattctaacatactcttaacaggagataattctcttaaactgtatcaaagcatagaaaattaagaaacccatccagctctcttttaatgtaacaataagacattaacatcaatgcctgacaaaaatttcaataaaaaacaaaagcaagactagagaccaaattttgttgttaatattgataaagaaatcctaaataaaaaattagtgaactgaacctagtaacacattaaaagaattgtttataattggatataaaaatctatataattcattttattagtagatctaacgagaaaaatacatcacactccatggatgctgaaacctgacatctttttgattaaaataaattgtctaagtggggataggtggtttctgctacatgacagatgtatttgtatcatagtcccaaaacttgccccttactttctatatctatatttctgtattgtgccaaattttacattgaactagcaagagaaagaaaataaagtcataaaaattggaaagtaggtgacaaaactattgctattgtgaagaattattcatacttcataaagaagtatttattgagtcttgctataatctaggaatcagtgaaaaagaatactaaaaatttattttgtttgtggagcctacatttcagtaatatgctattatattattatgtacctgaaaaatgaagggaatcttgtgaaaaactaccacagatataaaattttagtacaaagttaataaccagaaaccaatagtttacatatataaaagcaaacaataagcattaaaagatctaagaggctgggcatggtgcttcacacctgtaatctcagcactttaggaggctgaggtgggaagaccgcttgagtccaggagtttgagaccagcccaggcaacatggtgaaaccttgtctctacaaaaaaaaaaaaaaaaaaaaaaaaaaaaaaggcatgttgttgcacacctgtagttccagctacctggaaggctaaggtgggaggatcacctgagcatggagagatcctggctgcagtgagccgtgatggcgccactgtacccagcctgggcaagagagttagaccctatctcaaaaaataaaataaataataaaagattaagaaagtaccttattctcagtagaaacctaaaagaataatatagctaggaataaacatagcaaggtatgtgcaagacctggatgaggaaagttttcaagcactcttgaaggacacaaaagacaaattaaataaagatgttaattcaccctatgttatgatcttaatgaaatagtatgatcttcttgaaaatactaacagggttccttgtgtgaccatttgtttattttgaaaatagataagctaattctgaaattcatttagaaaaagtataaagatttctgagaaaactagctgtatagtactggtactggcgcattaataaatagaccaatggaagaaaagatttggatttttgatggaaaagatgaatggtatatgagtagccatctggaaacaaataaagttagattcattcctcctactcaataccaatatgtattccaaatgtactaaagatttgaatataaaaatcaaaaccctacatttattaaaaggaaacctgggagaatcttttgaacattgggaatgagggaggctttgctaattatgacttcaaatgtagaaactataacagaaaagattgataaattcaaatatatttttatcaaatttctggaagtaaaacaagcaaaaaacatcataagcaaattctaaaatgcaaatgacatgctggaaaagagtatgcagcttttggtacagagaagggtttaatcaccctaacatatgaagatgccttacaaatcaacaaggagaataccaaggaatcatgaaaaaataggcagtagatatgaatatactcttcataaaaaaatggaaatacagttgatttttgaaacacatgataaaatgcttctctcataaaaaggaaattgaaactgagatcctgttttatgtattagactggaaaaaatggaaacgtctgatatcatagtctgttgaagaggctttggaaaatgggcgctcttgcttgtgagtataaattggtaaaatcactagtaagaataacttttcaatttcaaaattatattacaaatgcatagaccccttcgatctacaactttcactttcaggaacttagagagaaacatgtataaaatggcccaggtaaggttatttattgtagcattgtttatagaacaagctcagaagctgcaaaatgtccattaatagcagaatggataagtaaattatggtatatctttacagctctacaaaagaataagggtgttctatatatagtgaaaaggaaatattgcaatatacattgtaaggtaaaaaacccaaagcccggacaaatgtctgtagtatgcaactatttttgtgacaaggggtgatataataatatatattcaagtttgcttatatttgtgtaaatactggaaagaaactgatttaggctgggcgcggtggctcacgcctgtaatcccagcactttgggaggccaaggcggatggatcacaaggtcaggagatcgagaccatcctggctaacatggtgaaaccccgtctctactaaaaatacaaaaaattagcagggtgtggtggctggcgcctgtagtcccagctactctggatgctgaggcaggagaatggtgtgaacccaggaggtggagcttgcagtgagcagagattgcaccactgcactccagcctgggcgacagagcaagactctgtcacacacacaaaaaagaaactgatttaataataactatggttatctgataagaaactgatttaataataactgtggttatctgacaagaaggggagaatagggattgaaagagccagaacaaagttggaaggtgaaactttggataattttaaatttttgcaccatatgaattttttctttattaataaactaagaaaataaattgaaattaaaaatgaattccattaggataatggtgtagccaaggtatattgtaggcaatgatttttctccttcccgtatttttgattaagagagacatcaaaggtgagtgtagatggtgtcattactactactaaaaaaaaaaacccaaaaaaccccaaagttggcaaataacgtttataggcacaaggtcagcacattttgtaccctacagtgatttgctgtgttttctgggtgtgtgtctgttctagtcagttctgactgctgtaacagaatactatcaactgggtggcttaaacaacaaatatttatttctcacagttctggatgctggaagtctgagatcagcatgcagatgtggctgacctcttggtgaaggtcctcttcctggttggcacatggccatcttctcttgtaacctcacatggaacagactgagagagacagagagcatgcaagcatgggcaagctctctagtgtctcttctaataacttctaatctaatccgagaggttcaccctcatgatctcattacctctcaaaggctccagcttctaataccatcacaatgggcatgtgggtttcaacatacaaattttggggagcgcagcattcagtccatagcactgaccccttgagctgcttgagctgcttttagaaaggtattatatatatatatatatatatatatatatatatatatatttcacccttattacttgaagtttggtcattgtgccttctccttacccctatttttcctgatcacttacattaaagcattagtatcaaatcaaagaaagattaaataaacatagttaatattaagcaaagatataataaaggaatggaggtcacgtggcttagttttgttgggtagtagatcaccctcatgtgattgttggctagacattctctaacacattgaatagaggggagggatagtgtattagtccattttcacactgctgataaagacaaacctgagagtggacaatttacaacaagaaggaaatgtattggacttacagttccacatggctggtgagacttcacaatcatggcggaaggtgaaaggcatgtcccatatggtggcagacaaaagagaacttgtgcagggaaattcccctttttaaaaccatcagatcttgtgagacttattcacaatcatgagaacagcacaggaaagatctgcccccatgatttagtacctcccccgctgggtcctgtgggaattcaagatgagatttgggtggggacatagccaaaccatatcagatgggaaagaggaaaattaacatttactgagttgtacatacagtttcacatttggttcttgttgcaatataatttaggttggtaaacaaccttttcttttttacagatgaggaaactgaggctcagagaggtcaatggagtgaggaattgaacaagtgcctatcatttcagggccatctcttgccgcttcaccaagtgtacttttttcaagtaatgcatagtcttagtaaaagactcgatgtgggatacagttaaaaagggatgaccaagaaaacgaatagaagaggaatgtgtgaaaaatggggacaaaggatatgagaaggggaagaaagataaactgtgtttgataaaaattgtaccttaggcttaaatgaggcactttaggatttttttccatgctttttgtctctactacattatcctgatatgtgatgattgggtagcatttgttgttgttgttgttgttgagaaagtgagatatttgaatgatacctctttgcaaatttaccttcaatggactcccttcctttgaaggctgatgaggctgagtcagtttgttggatgttccattgaatctttgttgcccttagggaagcacattgctgatgaggagaagtgcaagcattagagcaagattcatgtttctaaatgttgtttcatgagtaacttcttttgtcctagtggttatttttgttcatgctgctagtggaaggcctcggtcctcagaggtaaatatagaaatctcagtagcagatagtaaacaatagggggaaaaaaacctctcagatatagacaagggcagatctgtttatagtgaaaatgaaaatggattgaaaattatttttctggtaccttgtttcatagcatcctgatgaaaagagattggaaggcctctccaagcaactggactgggatgttcgaagcattcagcgctggtttcgacaaagacgcaatcaggagaagccaagcacgctgacgaggttctgtgagagcatgtaagttgctgtttttctttttgaaagaaaagacctaagtactcatgccaaccctgaggtgaaaaataaaagatctgtgcaggcttcagcagcccttaaaaagctgcaatctggtgggaaaatagttcaggaaaaacacaggaaacagtagtttgtaagaatttgtgacttccactttggatacagtaaataaatttcacttcttaatggagtttctacaaagtaagcatattataaaaggatctacaatggtctttttaatcagtcatctttgaaatacagcattaaaagttgttacttttatagatgtgggtagtttgaattttagtaaaggcaaaggcaacttaggttcttcctactaataaaaactgagatattaggatatattatcagagggtcgtgacaatcttctgtattcctggagatttaagaaatggctctattatatttctgggtgagtttaatgaagcattgcttgaagttgggggatggaattgaagtctcttccatctctgaaatgtgaactttatatagtgtataaattatatatcaataaggctgttaaatatattaaaggacccacagagagctcttccagcacagtgatattttgaagtagtgatacttcatgcacttacctataggaaaaccagagaaaaatacattgaaacattgagaacatccccaagaaagggaagacgtgcctggagagtcattaccctatgtggtcttcatcttttgggtgtaactcttcctatgtcttctaacagtccctcaatttcttctttcgggagctgtttcctgacgtctggtcatttaaacagtagtgctttcggtgtaactctcttagttgcaggccctttctctttggggttggagctgcattttcagctttggctttcaattatgtgaaaaaagtgtttcagtgtgaaggggtgaccttcccctccacacctgtgggtatttctagtcgggtgggatgagagactgagaaaagaaagaagacacaaagtatagagaaacaacagtgggcccaggggaccggcactcagcacaccaaggacctgcactggcaccagcctctgagttccctcagtttttattgattattattttcatgatttcagtaaaaaggaatgtagtaggagagcagggtgataataaggagaaggtcagcaaaaaacatgtgagcaaaagaatctatgttagaattaagttcaagggaaggtactatgactggacatgcacgtaagccagatttatgtttctctccacccaaacatctcagtggagtaaaaaataacaaggcagcattgctgcaaacatgtctcgcctcccaccatagggcagtttttctcctatctcagaattgaacaaatgtatagtcgggttttatactgagacattcagttcccaggggcaggcaggagacagtggccttcctgtatctccaacctggtggatacaatcagcaaagccctctcaataaatgaacttactggcagtttatgggagaaggatttatgtatctgggctcttggtcaaaagccacagttgcttcccagcttggccctgccatatatccaaagggcctgggctctggttttgagccacgagtctgagcaagggtgaagttgggtctcagcacatgtctacatgctgaaagtcatgtgccatctttccctcttctgactaacttctttggtgacttggtgccagcccctactatgctgagtctactccagtttctctcaaatactattgtatttgagattttaagataagcatcagtcacctggggatcttgttaaaatgcggaatctgatgtacttagtctgggatggcagcatttttaacaagtttctacatgatgctggtgccattggtctataggtcacactttgtgtagcaagtactaacattagagcagtgtctatctcttctccatgaattcagcaggtcattatgtgcataccacaataaataagacagtcatagttatgatcaattaaaaatgcttctaaatgattgctagtggtatggcaatgtggaggcacaatgatggggaagagatggtgcataaaataacatcatttcttccctcaagaaatttgtaatagtgttatggaaataagacataatatctgagtatgtgtaggtcaaagatagatattagaaaataaccagatatggggccaggtgcagtggctcacgcctgtaatcccagcacttttggaggccgaggcgggcggatcatgaggtcaggagatcgagaccatcctggctaaaatggtgaaaccccgtctctactaaaaatacaaaaaattagccagatgtggtggcaggcgcctgcagtcccagctactcgggaggctgaggcaggagaatggcatgaacccgggaggtggagcttgcagtgagccaagattgcaccactgcactccagcttgggcgacagagcaagactccatctcaaaaaaagaaaataaccagatatgtgtgttgtaggattgatatggatagtcagtaaagattaaagggaaaggatcaactgtaggttggggtgcacggggggtttgctgggattagaactgggtcaatgtcagtggcctttcatctttctgttgtatgatatagtattgatgaagttttgttttgaaactctcttcttccttggtttctgagttgccactagattctcctgcctttccaaggtcttttgtttgcatcatttattctgtgtttgctgtgtggtctttaatgtgttaatgacactccagatttagtcttcaatctcatttttcccttgccctaccttccattctgtgtgttaaaatcatttcctctcaccagtttcttccaaagccatgtgtacagtgcagatgtttcttctaaggcatcgttctgcgggctccaactggcagttctaatttgcttccactcctgactttatttttcctattgtttttatgcttccgttttgtcataggctggaaactcaagtcaatcagccactgagttctattaattctttgtaaattcgccattatagcccaatatgctttcatatgtctccttattttttttatcttgcatacacatagacattttgtttgctaccaaaaatcccaaattatttttctaaaatactactatccccatgttgtgacactttaaaactttggtgattttaaggcaactataggataaatattaggtccctgagcctgataactagaatctgtcttttgcttgtttaatgtcagtcacccaaatgacatcttccttctagagggttgtgtttttactgtctgtgccttcttccttcctgccttgtgtatggtgttccaggccaggaacttcctctgccttacccatttatcccctcaccattcttcaaatcccaggccctctctgaagtgtggcctgactattggggctggagtgagcacagctacccctgcatcctgagagtactaggaatttaaccctgaatcacatgctgccttatgtggttacttaacttgcctatctatttcaattccaattctgtgttgcttgaagaccacagggtcacatcttgttctttcatttctcaacaggactctgccaaataaataatttgttatgactgtgtgttaaaatggcattgttttggaaagagttgctgatcacatttgtcactttgcccctataaatgagtgcctaatatatactgccttagcataaaatttgtctaggaaaattacctgactatggaaagctccatgacaattttaaagacagaaattcagaggaaagaatgggatggcaaaggagaacatttagagaacaccgtgagggataaagtagaattatagtggtctgtgtatgcaaatgtgtgtgtcatacttacttacctatataaaaaaagatctagaatagttgttattaactaaggatgcatttcgcaatcacctagtgatgttttcaaaatacacgtgcccgagccccatcccagggtgtcaggatgatgactcaggtggagtctgaacatgtatatcatggaaaaaaatgccccaagtgcttatgacacacatccctggttaagaagaaagacagttgctgttcagaaatactaaaaggtgaaattagaaaacgagaacacaaatttggagctcgttgcctgagggtcaaaatgtaaaggatctatataatttttctattatataagttcctatttttcaaaatatagaattccttcaggataattgtatttcatctttcagcagtgtggaatagcaccagtatgcaagccaaactgtgcttgtaagcatctgcaggcatgtccaatttctggcacacacattacatgcagatggaatgagtagaagctgtttagcgagtaaaatgctaatacattgacatgattttttttctcttgcttgaagtcagtcattcacagtcatgtcagttttgatgaatacttcttccagaagcattcagattcttattggcaactgaaatagagaatttcaagagagaatgaagaatttataaaaatgagatgtcatgtgagacatttgagaagcaactggttccgaatggaagcaggtgccggttgggattatgcctttgggctggggaagctgtatcatccttctctgacaattgcatccaagtggtgggtttttatcactcaggataatataaaataaataagatattaaatatatttgctggatgtaacagaagaagcagagataagatgtcagaataaatggcattcctttcatttggaccctgcctgtgctcatcatttttgagtatcgtgcagtacatttcatagcacaggtctgggaggaaatataatacagggcttttatttaagcagtctcaaagattggaaagatgaatctcccatatgtaatctgaaaatctactcagtgatttgaattggagcttactccctatgctgctgaagttacggagtttgttgagtaagatgacagcttaagattcccttttctttaggaattccattttagaattgatactgattaaaactttcccccaatgctgccatatttgtatgcttctgtatagtggcagcagactcatcaaaacctgggaccctttcgaaactgtgattatttctgcaaagaagccctgtgatttttcttagtttgtgattccattgaacacgagctaattcatcattgaaaaatgaatgggttaaccaattgccttcatgctactaacttggtcaccttgaatctaaatagcagtttttacagctgtttataaattatcagtgctatcttgtgaccttcatggaaagtggagcctaataattgatgacaggggaagggaagtgaggtcatataggaaacaagcagttgagtctcttatattcctttatttcagatcagtcttttatctgaggaaatagtatggggaatatgttcaacatgttttcataaacagccacctacttgcaaaaaaaaaaaaaaaccctgaatatttgtaaaccatttccatatattccatactctggtgatggacaaagttttgccagagagaaaattcaattttgattattttctctatcagaccatgacatgagcatcagttacaaaatttactgccaaaattctcctcataatgaatgcagtttttgaaggggggaataagaaactattatcttctagagaaatggcatctttgttttttcagtactaggatacatgatcagcaatgtgtaaatgctgattataagtctggggaaaaaatcataagattggtggacagtctctagttcttgaaaagtacagggttgagctgttttgtttctgttgtggtgatagttgtggttattttccattaatacaaaacagtccctggtttggagaacaacttctgtaattcaaagtacattgttatagtccaagtcactgctcagtgaatgtcttggtgtgcaagactattaccttaaacagttttatatctgtgggttgtattcaggtcagttttagctttgggacagaggtcagcaaacttttcctataaatggccatgaaataaatattttagatcatatggactttgttgcaattacaattctgctgcagcataaaagcagccagagatgatgcaaatgtgcatggctgtgttccagtaaaagtgtatttatggatactgaaatttgaatatgtcattttcatgtgttgtaaagtattatctttaaaaaatacattacaaaaaataaaagctattcttaacccatgggccatacaaaaacagatggcaggctggatttggccctctagccatagtttgcagaaccctgctttagggttataatactatttgtggttctttcagagtttcaaggaagagaatatcgtctcctagtgctaggcacagtcatccatttctcagagttttgccatttaatagaaaaatgtgaatagttctgtaattggtgtgcctgtctccagtattcctgggatatggtgccttgatggtgtgcagtttcatttagcctagccaggcactcttcaaagctgttagtatcctcaaggcagcattgctttcattacagaaattctgaagattgatgaaccggactatggacagtctgctcttttgcctcgagtaagcctttgaaaccttgtccccctcgttctattctagacctaccatctgtggccggtgaactcaggttttccatttagaacaagcctcacacattccttgatggcatatggctaggcctctaatgcatgtgtgttggctaattaaggaaaagagatttttgctaaaaatacaagacaggccataccttggtcaggctggctgcacattagctactgctgtggtctgcctacatttgagttgtcagttgttatgtaaagtctaaatttctaaaggctttttaaataatatttttttccaataattttgttcaacatggaattggatggtaataaagaggacagaatgtagaggaataactgaatttattaaggcatcatattattatttaacccagtctgttatttttgaacctatgtactatttcttgttgttgcttaatgtattttaaaagttatttgtttctgattcagagcagaatcatgcaaatccttataattgattttgattgtagaggatttataaaagtctacataatgttcatacagaattgtagggggaaagacttcaaagcgtaccatccagaaatacatcctttatcatttactgcttatacagtgtcgtatttttacaggtgcccacactaatgcttacacatcatgtgtgtctgtacttggcacctgcccttcttgaaatgtttttaatagaaccagcctcatcagagtgcctgaagacggctgtagaaaggttatgttttatgcttcatcttcaggatctgtaagtcattgacctgtgggcagtagtatagtcacttgtgctgtcatatgacatatgctgcattcctaaaaatggccacaccatgcaaaatcgcacaacaaaagaaaataacttagggtttgtgagaagaatgggttagggacacaacactcagaaatttcatcagtgacactttgaaaataagctaggaacctaataaaaacaggagcagttttatacacattaaatggctaagaaatacatagctactacaataaatacggcacttgaccttgaaatggacctaacatttgcttgtagtggctgttgctgtgttagctcagactgtcataacaaaataccgcagactgtgtggcttaacagaaatgtattttctcatagttctggaggctaaaagtcccaggtgacataagtttggtttctccagggccttctttccctggcctttccaccgtgtgtgcatatccctggtgtgtcttcctcttcttataagaacaccaatcatattggaatagagtcctacccttatgacctaatttaacctgaattaccttattaacagcctcatctcccaaggcagtcacattgggaggtagggcttcaacgtatgtgttctgggggcacacaattcagtctgtaacaatgtcagaagggtggcagtgagttactgtgaattgctggaaggaggaagatctgaaatcagagggaaagttgcaatgccggatgcgtgtggctcataactggtgtgactaaggtagcttggacatatttgaagagagtgtgaatgtgtgtgtgcgcgtgcacacgcgtgtgtgcatatatactcctaggccattcagttcagcctggttcagttctctgtgttcacctagtatttctggcagacaaaatcagatataagcaaatatgaaatccgtgttaggctcacattagaagacattcacacttttaccacaagcctggtagcaggaccagtgggtcagtatggcggtgaaggcagtgggctgtggagcctgggagtctgcattggagtcttctctctgataaaaacctctcgggtatttgggagggttgctggccactggattcgtaaaatgggcacattaatagtgtctgcttcatagggttgttgtgaagactagatgaattaatatatataaataaagtgtttagaaagatgtcttgcccatggtatgggggtagtgagtgtcagctgcctgaaggttgtcggtttctgttgttactcactttggggtatcaggagcagcagcaaatagctattagtctgtcacagccatgccctggccacatggcttcctcagagccacaagcatgctacctaagagaggtggctctgatgtcgatcattttgaggaggagagatccaagaagatgcaaggagagcagattctcaatttaggacgaagctctgattctgtggaaccctaaggaggcggaatccatgtggattcacaggactatcaacttgggcattactcacgcacaagaaaaagatgaaaaaccaacgcgagttcagagcctcagcacctttggcttgctactgtgtagcgatgtgacagaagtggatgaagaaaggtgtcctacttcagtagggagtgatgcccactgtgcctccagaagccaggacttttgaagcaccacatgagaaatgtcagaatacacagtgaatgtctttgaacttcagagattttaaatttacccaggtgattctgaagaggacacggcttgcctgcaccaggagggacagaggaacaaagcctggtcctctgtggtgctggctttagtaaagccacctctgctggggcctgaacagtctgatcagccttaggaggtcagcgtgacttctgggtacaggagtttgctcttaaatgtaatatttattggttacctcctgtgtgcaggagaagtacaagaggcaactgatcttgaacaaatttgagagtgggaatcgaatctacctggttcatggtctggctcaagctctgttacccctagcaagtcttttaatgttgccaagccccagatttttcttctgtgaaaggagaataatagctactatttataaagtcatttgggattaagtgaggggatgtttgtctaatgtgcatctctcagtgcttggttccctttcaaatgtggttgcaaagttgagtaagcaacaatttctgaccttgcagaactcacagggacaattgattctgcgcattggtaaagttatttaatatcttacagggagccatcaattgtaatactcaagcaaagtggtttccttctagggccccttccttatggctccagttatgggttattctgggccttgtgtcttactttgccatcaagagaattacattttagattgttgaaaaggaagcactctgttacttcctcttgggaatcccgtctggcttgccctctcttgctctccttctctttcatgcttccttcctccctcctttgcagtcacttcccattgttataggggtaggtgccttctgcttggagccggagtgtttgatttcctcctggctattcgccttgcggttattagctcatggtaaccacatcctggcaaggattaaaagaatcttcaaccattactaatttgtctatttgtcctaaaacttggcgcattgcacatggctcctgatattcgaatataacacctaggaatgtaagggtgaaggagtttgtgcataagatggtggtagtggaggatgggcatttggactaagtaacagggtatcaagccacttctcaagttggaatgatttgagcagattccaattgactattgaaagtaggtttgtgaggtttatttgtaggccttcccacatccaaattcataataagccctccacatgataggaaacttaactaaaagcaattggagccaactacttttattctatttgatttttaaaatttttgtaggtacataaatgggtatatgtatttatggggtatgtgagatattttgacataggcatgccacatgtaataatcagatcacagagtaaatggggtatccatcacctcaagcgtttatcctttgcgttacaaacaatccaattatactcttttaattatttttaaatttacaattcagttattattgactgcaaggtgagctgctggcaaattactgtagacttgggcactatttcttatattgcctatttacaatgtcctagcagtggacaagggaggctgtttactgctgttagggttcaactgtgtagaaaagctagtgtactgttccatggaggatatactgtgattgaggggatgttgcagcattaaacacttggtacaccatgacacacaggccaaggttaacagcaggattggcattagaggctcaagtcttggccatattccttaattctgcaaagttctctaactcctgtatgcctttagccacagttgtaatgaagttgcatattttcagcttacatattagtatgtaataggttttcttgcagatgtagtgggcattaatgctggcaggagacttagaccctgagaagggaggggaaagaagtatttattgaggtatttatacagttcagatgctgtgatggagcctttacatttaaataacaatcctttgtaatatgttagatattaaaagttcttctcacccacaaataaagagaagtaaagagaggtggaatacctgacccaacaccacacagctactaagcagcagagctgggatttgtacccagctgaagcacaatgttagagaaattcagtaataatataatattttacgtatatatataatattatgtattatataatagaaaataatgtattattttactgcctgcagagcaaacatggaaagggggcagtttggtcttttatttgctcatgacagcctcctttctctttcctttccacctccaacttatgaagggctggagttaaatttgttgctttctccttgccgcccatattgcacttttagttgttctctactagagcacttggagacttgccgtgttcgctgtttgcatccatctctgctgtttgaccgtcaataccttgagttctgggactgtgtcttatttatcttttcatccccaccactcagcacaatgtctggtgctttgtaaggccccccaaaatgtccagtgaatgagtcaattaactggacttcagggattgaagtgaatctctagggactagaggcctgactctaattagagaaagcttgagtttattctttcaaatggtcctagggaagactgagaagaggaaggaggaggcaggaaagggtttctggaggaggtgacactgctgaattttcaatggtggttacatggaccaaatggagaaaaaaggggtgactggggcaccaaaatttcacagatcaccacaaaagaacatactcatgtacccagacaccacctgtaccccagtaacctatgggggaaaaaaaggataaaatcactgttttctggtgctcagagtttaaagaggaatcaggcacaataatttagcagacagcaacaggagcatctagctttccctggggacagggctgagtcatcatattgcaaatgagtgagtgcttgttgggtagcaaaccagatttgaaatcaacaaatctaagaattggtcaatgtagagagcttcttgtgaataaattttatgatagatttgggggacagagttactattgaagtatataggctaagtgggttatattacaatttatattatttttatttttcaaaggaacagtgtttatctagtgatacccatgggacaagtgaccatcctgtagtaggattctgccagacattccaaccttggcacatataccattaagccttgcagtgtttatcattgttctaggtgccgggagtcactgagattggaaatgccttatttaggacctttggtgctcattatcagtggaacccagctttcatgcagatctgtcatggaaccttctctcagttctcctttccttctctgtgggtggctgggggtggagcaggagtaggtgaggggttggagcaggccccaatagtaggagtggttttggcttgtatcaggtcccactaagtgatctgaagcctgggatacggtttgcagaaaaatagaaactgagtgagaaattctcagtgtatgaggaatgtaggctatgtagtattttatgagaaggtaggaagggattaaaactgcacctgtagcactagttgataggtccaaacagatctccagaagtagccaaatgcagaatttcttctaacgttgtcctttagatgtacttttcagtggacactcgtatttcccttccattattcattgagatagtattgctctactgtttcctctcccattttagtcggggaaatgtgtccaacttgaactaatttcagttcttactgattctagttctgaaataagacttgaacttatgtgcatcatttccactggattgatttaaaaataaaatattgtcttatctggaattatgaagcgtttacatgaatcctggctaaatctttggcgtattaaaacccaaaagcttctcttactccatgacagtaagttgttctttctgtttctttccaatacttacgtggctcaataagttttgtgtgtgtgtgtgtgtgtgtgtgtcaagcatttactatctgctgggttctgtatttgctgctagatgggaaaacaggatctcttcccttgatacataaatggtaatatctctttattttatcatcatccttaggatgaacaaacaatccttcatttccttatccataaaacaaggcgataaccttaaaaacctgataaagttgttatttaatatagtgattaaataaaatgattcgtgtaaagcacctacgatattgccaaacacatagtcagagctcaagaaaactaattaattttgatcaattcaattagtattaagggctgccaaaatgaattgaattcacctacctaatcaaataataccattctaagcttgcttaatactcttgggtatacattagtaccatgccttttatcggggctttgtttctattaaatccccaaatgtttgaaggtataattatttggcagatttgatatgatgatttttgttggaggagttaaagctcatagttttattttcttcttcttttccttctttaaagaaaagcttcttgttgagaacatgattttctggctttctgacttttaaagtggcatgtaatttgaaactgtggttccttacttgtctaaacagtagggtgaggtccttgtggtagaactgggaggtttctatcttaggccaagaggacagctctgactgccagctctacctgcctgtctctagcactaaccagcctcctcagcctcgatttcttgaaacttaacctgagtcaaaatagtaccttgaatttaaaatggggccattagaattgttcaaaacacatagagcactggtgccttatgtattagtccgttttcacactgctataaagatattactggagactaggtaatttataaagaaaggaggtttaattgactcacagtttctcttggcttgggaggccttaggaaacttacaatcatggcagaaggcaagggaaagcaaggcaggcacgtcttacatggtggaaggggagagtgagagtgaggaagtgccacttcctcactctctttaaaactatcagctttcgtgagaactcactcactatcagcaaactgcccccatgaaccaattggctcccaccagatccctcccttaacatgtggggattatattctgagatgagatttgggtggggacacagagccaaaccatatcaccttgtaagcacataataaatgttagctattatactagtgatagcactatagtagcactgtgattgcctctgaagcaaagaagggccttctctgtgtggactcccttcttgaacaagtttttattcttttcctaagaattttatgagaatttataacaatccatttctctctggcttgtgctgtcaggtggggctgccatgcttcttctcaccccttggcctttgctcaagttctgcccacctgccccaacctgggatgcccttcccctactgtgacaaatacctgcctctccattaagactcagttcaccttcatttaggaaaccgtggatatttactgggtgacgactctatgccaggaatggtacttagtgtctaatgaagttgccttagagaggagcacagagcgtttatttgtggtaacaggaagggagtccaggcagggacatagggaggtagagttaggtaagtctctcctggttgtctccatcatcccagtgaaataggagacagggacatcagaggagagcaaatcataagctgtgtggcctcccctgctccatgaaggacgcctcctacccccattctctttttcccaagcagagttgatggtcccctcatttgtgtgcccctttaatagtaatggcaacagcccaatgctcttgcttaacatttcttttttatctgcagactgtaaattccttcatgacaaagagccagtcttatccttttttgagaacccagcacctaggactgatttgcaatgtgtttgtttcatttactgcccaaatacattttgagtgcctactttatgcccagcggtcttgtaagtgcttgggatatggtttacatttcactggggaaggacacagtagacaaattctccccattatcttcccttcaatttcttttatatttctatttctttccagatacagtccaatcaagatttgtacattaaagttctcttaatttttttgttttgaaacaatttttttattttgaaaacttatagagaagtttgaagaatagtataaagaaatcctgtataaacccacccagattcaccactgttaacatgatgccatacttgctctgatgttttttctgttccttctgtacaagtgtgcacacacacctatacacacatacatacatacatacacatatgtttttcatgaactgtttgagtggaggcctcagattacactttattttgaagataaacagaatcttctgggagattggttgtgtggtatgagagaaagtgagaattcaagaatgacgcttgggttttagcctaggcagttagacagaaggagttgcccttgagtgggttgaggaagcgtgagggaggagcaaacctggggagaagtccaggattttgattttggtcatgtgaatctggaggtatctattagatatctatgcagaggagtgctgtaggcagctggataggtgaatgcacagttcagggaggaggtgtggacttggcagttgttggtgaatagatagtgtgtaaagcctcgagacggtgcgagatctcaaagagagtgagggtaagtagaggaaacatctgaggatggaggcttgagacagcctcgtatgagaggttatggaattgaggaggagctgataaaggaggctgtgaaggagataggtgagtgaggaggccaagagaagaagacattcatcgttggctgtgtcactactcacagtccatgtagcaacatgcaagtcattcggtgtctgccaagagcagtttgggtggaaggtcttaagacaaaatggaggagagaagttgcaatgtgggaactctcgagaggtttgttataaaagagaggtccagaaaaagagaatagtcattagaggaggaatttggggttaaggatttttttttaacaagggaaaaatgatggcttgtttgtatactgatgggaatgatccagcaaagagggaaaaatggatgatgcctgagaggagagaaatggcaagagccgagccttgcccaggcaggaggcgctggggtgtggagcacagtcaggagttgccttagagaggagcacggagcattcatttgtggtaacaggagggaagtccagacaggggcatagggaggcagagtcaggtaagtctttcctggttgtctccatcatcccagtgaaataggaaatgggcatctgaggagagtgaagagggaggaggaagtattagcattttgaggagtggggagaaagtgtgaaacaattttctggaggtgtattgattaatttctttgtttggcctatctgcatgtgggtggcagatagtgagggcgagggacacaagtacattgtcgtttctggggaataagaggtgtaggtgccagtagggtgcggtcactcacaagtcactatgtcccagtccaaaagcccaggagtggggtggaaacttcacagtgtgatgaatcactataggaatgggaaactaggttgaaagcagcgttgggaggtttggagccctcgctcagatatttggtgcagattagctgcaggcatttgtcagaccaggctgtggaactgatatcaaccagtaaactttttttttttttttaatcatttccacattgtttacaggaagagagagggcaagtctcttatgtccctcagtcagtctgtagcttttgaagatactgaggatgtaaaaccaacctatggagcctactttgcatatgaccaccttgaaggaaaacgttaccatgttcataaagtacttttgtgtcttttagttcattatccagtaagctgctgaggtagtaaatttttgttaaattggatgatgttccattctaaactcccttctctcctaagaaattctgtgccacatactgaagatgcttaagctgccacatgaatttctcttgagttttagatgatttgatgcattagatgtttttatttaatttaagcttttaatttcaggaagcacatccagatatgcctgcagccaaccagacagttttctaaagctgtataaaaataagagagaaaggagagaaaagaaaaaaagcagcatgtttttatttcttttctagttttttctctttatactttgcatattatatcctcattaggtgttttagatccaggtttcttgcttttaaaaaaaggttttacttggaagacaaccaaataagcaaataaaaaccgtaagggatgcattgtaaaatcctatgggtgtaaattttcttggtgcctaaaaagtaatcctcggcctctgataattatctcaacatttttttcctaacattattaaatgtctctgtttacaagatatgatttcatggctgaactcaaatcagagacttatatataaatataataaagttttaatctgaacaagaacaaaataacaattcctttggttaaatataataaaggtttaatctgaacaggaacacaataattccttcggttatttttattatgaaaattttgattgcccaaaagaagagagaatagtataatgaattcccatgtatccatcatacagctttgacaatggtacacattctgccatcttcttatgatattaatttttaaagggaaagttgtaaaaattattttgaagactttggtatagtatatatttcttgggaggaaaagtggtggtgtgattgtcaaggagcccgtggagttgggggggcactggagagcagccctcactttttttttatagataaaacatatgggatataggttcaaggtaatgtatttaatatgggttggggctttcaaattagagacctagagcttgcaaaggtgtttttaaaaaaatcctgtctcttagttctccatggcctcaagtccaccagagtcaccaatacttcttttccaattccttccttgcgtgccatgctctagtaagaatgaactgctcagagttatctgtgcattccatcccagggacctccacacccccttttcttctacgtttgattcttactcatttctttgaagtctagcttaggcaccctttctcctctgagatttctactcatcaccccaacccttgcctggcacaggtatacccacctggagctcccatgagagccctccccgtctctgctgtgctctggattaagatccaatctggaaaccctggcctgcagggctcttcatggtccagatctgggctgtggacctgcctgacttcatctctcccagctcctctcgctgcgtgtcagtgatgtcaaggtgctctctgcttgctgggctcgttcctgcctcttggcctttgcgcttgctttcccatcatcctggaacgttctgctccacattttcaactttctgcatctccctagtgccccccaatccatagtccccttgataatcacaacgccacttttccgcccaagaaatatactctatgccaacttctgcgctaatcattgtcttagtttgactcacatccttgccatttaacaagtattcccaaacactataatttagttttgcctatttaaaaacctaatacaagtagaatgtgcttagatgtgtttcttatagataacatatggtgggattttgttttattcagtccggacacatttgttttttttccaccagatcttatttcatatgtgcttaatataatcatttttacatgcttttacatcttcatcttgttttgtgctttctatttttgcctattttatgttctttctctcccttttcttgacttgattccattttcccttttagttttgaaattatagactcaatttttagttattttggtggttatcctagaaattacaacgggtatacctaagttatcaaaatccaatgttgacccctcttttaccctcctagaaaatccaaggtgtttagagtattttatttccatgttccctcttctgacttaagttacttttgtcatgccttttattctgtatttttaatcttagagacattattaaccttaaacaacagagacaattttttaaagatttgcacacatatttaccactttttttgtttttaattcatttttgtacccagaccttccatttggaatcactttaatttttgtctgaagatccttgaggcctgctagagatgaaatctcttggtttttgttgtctgaaaatgagtttatttcttcctcattcttgaagattttttctctgagtatagaattctagtctagcagttatttcctttcagtataatgattatatcatcgcactgtcttcttgcttacatgcttgccacagagaagccatagtcactctgtcattcctttgaagataatgccctttttatccctgtaggcttcaagattttccccttagtctttgtctttctgtattgcaattaaaaatatatgtattcctctcgagattctctgggccttcttaaatctatgaatctatggattgctatcttttttttttttttgagatggagtcttactctgtcacccaggctggagtgcagtggtgcaatcttggctcactgcaacctctgcctcccaggctcaagcaattctcctgcctcagcttcccaagtagctgggattacaggtgagtgccactacacctggctaacttttatatttttagtagagacagtgtttcaccatgttggtcatgctggtcttgaactgctgacctgtagtgatccacctgctttggcctcccaaagtgctgggattacaggcgtgagccaccatgcctggcccaattgctatctttatcagttctggaaaattctcagtcattacttctttaaatattgctgcttctctactctcactattttcgttttctgtaattacagttaaatgtattttagatcctctcactaccctcatgagttctaacttcccttccatgttgttcattgtttctgtttctctggccatatgttagatgtcatctgacatatctttcaaatcactaattcccttttaactatttctgtttattgtcttctccttctagtttttagtttggttaatatatatttttatttataaaagttctgtttcatcttttaaaaacctgcttgttcagttttcatagtttcctgttctttgcagatactttttatgtggtcttttatttttttacataggggaagcatagttgttttacaatctgtatttgacagttccagtatttgcaggtgtgtttctgattctgattcatggaacctgtttttccttgtgtgcttaattgtgtactactctttgttcttaggaaatattaaggagggagaatcttgaggcctaggaagatgatgattctctcagagagtttatgcttatgctcctgtccggcatggacgataccccagcccaggatcaccccagaccaagcacatgacttaccatgactcccaggcccacctgggctaactccccatgaccgtaaccaccttggtcatgatcacagttgtgggtctcttaccacaacttctcatggtgttattttcctttccctttttctcttcttctgcttagtgtcaaggcaaccatccctgaagtttcccagaattgggggtagaggtagggtttatgtatggcacacactcatcctatggatgttatatcttggggtcccagcttaatatgcgcagtgtcttctataatatcctccacattaggtaggcactgggcctagattcttccccctttcctccaggggctgccaaaacagaaacccagattaactcatggtggagatgcctttgggccagaaggagctgtggtgttctacttaggtctctgggttcctagtttcccttagatttttatcctgagagcttcttactatcttgtcacctctgatgcttttaaggatattttttaagttgagaagtttagttgttttaaatagagagcaaggggtttgtctgactagcctagcctgctgtgtctgggaaaggaagtattaataagaccttaaatcatttaataactatcatctagtactgaaaaaaaaacgcgtgctatgcaaacataaggtttcaaatgtggtcagtcaggattttgaaaactagaattttcatacacctttattttacgtgatgcattattttaatattgatgtgaagttaaacaaggtcagtttgaccttgtgtccagtgcaattcccaaatttgactgctgcagtttactgaaattgcatacatacaacagctttaggtgcctggattcacagtgagctagtgaaatagctggtgatttcatagtgagccagtgaaatagccatccttcccaagcacccacagtgtacagttatggtatagaggggccttgatgggcatggcctttgaaagacatgaaagctatagattagcctatattgttgtctggtatgtagtaggtaataactgacaaacagacaattgcctaacatgtgccagaaaacaacataggcaaggcttgcagttacaaaataatgcatagacaaatgtacatttaatcaaatttggctggcttgagggaatggttgatatacacagcacagactgatcaatttggtagtgttaagcagaaaatcgctcttataggacaagaatcttgtaaaattttgaaccttagaaatatgcactaatgacagtgtggtgtaggaatagatagtgatggggagggcgtcgagacaggtacaaataagtagtgtgtgttgattgacgggcatgtccttttggcaaagagagactccaccaagaaagtgattgggaaatgagctaagagaagtgtgagagaagaagacacttcagttctgacattcaagaaacagccccactctgatttggataggggcaaagcctaactatagatcatttttcagccaactacagaatctttttagctttccttgcttctttttcatttgctttctctttcgaatttgaggagtagattgcagtttaaccacatgctatgagctcaggcctcttgggtggcctccctgggtcttagaccaaaccagtcattaggcttttagagaataattttaaaatgccatcccttaatattgtcagggttgtttgaactatgagaagaagataatgagcatgaagcaggacctttagaggactaggttgtctggagtttgtagttagttgaaaggctacagggtccatttattcctgtaattttatttgccttcctgctctgatgtatcattatttgtcatccatggatatggaattcattctatcattcaataaaatgaatgctgactctgtgctggctgcttttcgaggccttgtgaatattctctgtttggcgattattgtaatggccttttgccatcatgacctggccttttgccatcatgacagcatctgacatgtactgacatgtactgaatacttagaatgtaccaagatcgcttccttagtcatcttatttaatccttccaacactctcattgggtagatgattttaccctaattttcaaaaggttaagcagtttacccacgataggtagtgagagtcaggatctgtgtgtgactggccctaatgcctatgcttcctaagtaatttcctaagtaatcaaagctgcttttaagattaactttctccaaagatgcaggtattgctcattccttttttatagctgagtcacagacataatgaatactgccagtgagctgcagtgaaactgtatctttaaaagaaaaatgttttttaggtttctcaattcccatgtttttgctgtttgcgtgatacccctctgtggaaattaacaaaccttttgctgttggtttttcagtaatatctatctacatagaaaaacttcacagtggaatctgtttgtgtaatatgtgtgagagagagaaagacagacataatgctgtcatgattagtaagccatgaccaaactgtatgtgcacatacacacagcttctgtgggtctcactgagactaaatttggccacacattccctaatttatttttacacaatttccctgtttcactgtagaccttttccctaacatcagtttatcccaacgactctgtcaaaacagataatagtggggcaccaattacttggagtttgataacactatttgaattaaaatctattcacatacttcaaggcatcctttcactgaaattgagaggtactcattggcaacttgatatggagaatttggggcaaattccttttttaactctagacatcaacaaacaaaaatggctgcgagaaattgtggggttttttgtttgttttttgttttatgacacaaagtagttaagagcaaggcttggattagtttcctgtgaaatggttggaggaagtagaaaatatgtaagtgaatattatctctggatttatggctgcactcattgtcaatttttgagctctcattgaaagagatggcagaaagagttagcaggatttcatctcctgtcttaaggatttaacaaaaagaaatgccaactccatatttgctgagctataacaggtggttgattcttccagttgaagtggtactgagcatgcaaatggtttgtgttccttgacccatgtcaggaaacacacaactcactgattctctggggcccagccattgatagaagtggagattcatgcttacaggctgctgaatgaacagcacctgcctgggcccagatagaatgagtttaagaccagattcttggtcaccctccttccttcactcattcatctaacagtattcatcaagcacatatcatatgctgggcaataggtgcaggagacagtgatggacaaggcatggtgtcattccccaaggagctcatgttctacgttcttctgctatccctgtctcttccctgaaaagtatggtctaatgattaaatgctcaggctacgaagtcagacagatctgaactaaagccttctgcttaccagatgtgtgatgttggccaagccaattctgcctcagtaagactccctttcttcatgtacaacataggtggaaggcaggtcatatagggaaaggtcttttcaccatgcctgtggtgtggcagatgctccatagatgttacctagcaccactgaagttttctaattgttatgattacattctgaccctagggtttgaggaaaaaagaaaagtgtttgaaataaatgggaagaatgtggatcatggatatgccagaaggaagaaccagaagctcataaagacagagtagaagtccatcagaaaaataggtgggctggtccttcacaaatcttgggccacgtctccctgtgtgacatctttccccttccgggcatcatttcaacctgatttctttaagttcaaatgttgcacaactagggagggaaatgttgcacaactagggcatttagattctgcaatatacgttatcttgagtgccatccttgctaatggcaggttaagatactttagttttttgagacagggtcttactctgtcaccccagctggagtacagtggcataatcacggctcactgcagccttgacctcccaggctcaagtgatcctcccatctcagcctcccagttagctgggactacaggcttgcaccaccacacctggctaatttttgtattttttttttagagatggagttttgtgatattgccggggctggtaagatacctttaaaaaaaaaaaaaaggaaaaaggaagcttaccatgtgtagtgctgtcttttagatagtcgaagatgacactttgatttacaattaaagaaaatcagtactaaaataacgtttctttcctttgcccattataaaacaccctttgaaagcatttgtataaaatatgcctcattttttttttggtggaagccatgttattttcagtggaaatgaagataattgcaaattagattttgcccaagtatatataagaggtgtgcattttattgtttttcctccttatgtaccttgagggaagtttcagaaggctgtccgatcttcaaatatagcaaagactgtgtttattggaaatattttaactgtggagttacccaacactagacacatagataaaatgattgtttggggtccattttttcattttattgtccataagtttcacacgttgtcattggctttatggttctgaaattcaggcttgaattctgtctgtacccctgataagcacatgtccctgaggaaatcccttaattttttaagcaaatttcctgtcataaaaagtgagaagaatgttacatatttcagagggccattgtgagatttaaataatataaagtgttaaatttcttggcacattccttgatatatactaggggtccttaataaatgtttattgaggtcaggcatggtggctcacgctggtaattccaacactttgggatgctgaggtgggcggattacctgaggtcaggagtttgagaccagcctggccaacatggtgaaaccctgtctctactaaaaatacaaaaattagctgggcatgttggtgtgcgcctgtagtcccagctatgcggtgggtaggggagctgaggcatgagagtcccttgaacctgggaggcagagattacaatgagccaagattgtgccagtgcacgctgggctgagcgatagagcaagactgtctcaaaaataaataaatataaaataaaataaaatataaagtaaaacaaaataaaagtttattgaaatggaatcattatgtctggtttcttcattctcagatgcatattacactttgagatttgcccctctgtggatttcatgaaattgtgttacaaatgaccagggctgacctgaggagatcatatcctgtggtagttactgaacagggtagcataccaagtggtatgacatgattattttgatgatgtgttggttacaccaattcaggagccagagatggagttgaaaataagcgcagagcagtgctgctccttgccaagggcctttgtgtaatgaaggttttcttggcctctgcctcaatgtcaagtgatgattgtgttaagtgctttttcttctctgtttcctttggccagaggtagttgctaagtgtcagctcctggctgtgaaaaaccgtctttgcctttctggaaggagtagtttgagaaaaaaaatgcttcagtgaaggcatgtggtatacaggcaaagttggtgtgattaatatgtaatacaattaacatattaatatataatatgattaatatataatatagtaagtttttaaagaagttgagggcttttcattttaatgtatgattttcttaaattgcattttaacaagtagaacatcataatgatatagtagtataacattattattcttgccaaaatttattgcgctcctgctctgggcaagtactgctctaggtgctttattatttcattatattttacagacagtgtttcactcttgttgtccaggctggaatgcagtggcgcagttatagctcactgcagcctcgaccttctgggctcagtgatcctccggcctcagctcagactgaagatgtatgccaccatacctggctaattttttttttttttttttggtagagatgggatctctctctatgttgcccatgctagtatcgacctcctggccttaagtattcctcctgtctcagccttccaaaatgttgggattacaggcaagagccactgcacctggccttttgtatttttaattgtggcaaaatagacatagcataaaacttaccgtcttacccatttttaagtgtacaattcagtggcttctgcgtacattcactgtgttgtacaatgcaaccatcaccaccatccatctctagaactctttttatcttgcaaaactgaaattttatacccattaaacacttaatttcccattttttccctctcccagatccctcataacccccactctactttgtttctatgaatttaatgaccgtaagtactttatataagtggaatcacaccgtttttgtccttttgtaactgccttatttcacttagcataatgtcctcaaggttcacccatgttttggtgtcagaatttccttcttataggctgaatattccattgtatgtatataccacattttgtttatgcatttatttgttgatgggcacttgggttgcttccacctcttggctactatgaataatcctcttatgaacctggatgtacaaatagttgttcaagaccctgctttcagttcttttgtttgtttgtttgtttgagacagagtcttgttctattatgaaatggtgggatctcactcactgcaacctccacctcccgggttcaagcaattcttctgcctcagcctcctgaggagctgggactacaggcatgtgccaccacgcctggccatttttttgtatctttagtagagacagggttttgccatgttgcccaggctggtctccaactcctgagctcaggcagtctgcctgccttggcctcccaaagtgctaggactacagttgtgggccaccacgcacagcccctgcttagttcttttgggtatatagaagtgggattgctgcatcatatggaaattctgtttaactttttcaagaaccaccatatttttcatagaagctgcaccattttgcattcccagcaacagtaaacaagggttccaatttctgtacattcttgcccgtaccttttactttgtttttttccttccttccttccttctctctttcttttgtaatagacatcctaataggtatgagtttcgggctttattttaaatgtactagtttatttcatctgttaaattataagaggtagataggtcgtgctatctccatttgaaagaagaggaaacaggtataaaggtgttggctgctaagaattggagctggtatttgagtcaggtagcatggttctgggatctgagctcctactccccttctctgactgcctccctcgttatataacaatgcagcaagttcaaacaataaagaaatgtttgtgaaagcaagtgagcttttttacccagttccaataccatgcatgccttctaattaatctctgaaaatgttggtgtctttccttccaaatgttgggtgtatttctagttttcacatgtatttttttaaatataattttaaagagttcatgctttacattttgttctaatactacttcttctactctgcttaatttattaaagatgtctttctagtccactacatatagatgtacctcattctaacttgtgatggcatttggcagaaatttaacttgctaattattgctttattggtataaccattagaaagagggcttcaaggaacattcttatgtgcatattttatagttcctttttcagaataaattccaagaaatggtatttctgggtaaaaaggcaatgaactttttttatgtttgagcctcgactgaaaagctgactcacacagaccatgagttaatgaagacctagctagacaaaagtccttggctgcctgaaattcgttaaaccagtacagtacctgagagaagactccagaagtgctcagttgactgataagagaggtttcagctgggcatagcctgcttcagggaacccaacatatcagctagatgtttgacccactgcatttgtccagattaccaagtgtgttcttgctgtgaaattcctttcacctgggcaactaggagaggatatggtcatagctaaaagaaatagaagagtgaagcctctcctttggtttaaaggctgtgctttaatttgatcttttggccattttaaacttaggttcagtaacaaatttaaattaggctatcatataaacgatgttatcagagaaaaattactaccaaataaaaacgatatttgaaataaactatcagacttatatacacgtatgtatgtatgtatttataaatatacattgtgggtaattctagtgtatgtcagggacatgatattcctgttaatgtaagccacttggaagtgaagtttcaaagtaaaattgcttttttaccaccattatgtaagagtatataaaagttagagaattttagaaaataagtaagactattttagtataattagtgaaagcatttttcaatgtataattttgttttttaatatagttgtggggtcatgttacgtatacaattttgtctcctgtaaagcactacacttaaatgtgtactattagtggtggacattggattaagcatcctattaatacattgattaacttgtgtgatctttacaatgcccatctgtggtaggttctgtttttgttctcattttatagacaaggaaactgagaaatagagaattggaataacgtgcccaaagcccatagctaggaaggtgaattaccacaaacactgaatccagataattggtcatgttctctacttatagagagacaggtgggatttgcatcttgctgcctcgtatggcattaacaccccatgttagtgccatctctttgtatatgcttgcttcaatagctatataatattgcatctattggatggtcccaaggtttatttaactattataatattatctaggactagtcttaatatgtcttttattattataaatgtcatagggctgtaaacacctctgtgtatattttccccctgtattctggactatccttgtaatagagtccaagtaatttaattactggattaaaataactaaacttcttaaaaagataaagatgacttttaaattattcaaaattctctacatagtattgttagtgctatttctctttgtctctagaagatagcccaaatggcttcaccatccacatcatgaagtttcatgttgtccctagactgttagctgcagaaaatgactgacagaatgagagtttgatagccaaattgagattactggcatttaaacaaaatcatacttttaaataacttgggttaatagtgctatctagcatacaatgtgtgtctcacccttgaaatactgagtaactaatgtttacacaaccattagttttaacattagacttaatcttcaagtcaacattatttattcactaaaaccttcaatgaagaaaatgtattgtttttcatagtagagcttcctttttcactgacatttaaattttattttaactattggctcttgcagtgccctagcaaaagactttctttcaccttcggggtgttccttggtttaatttgattgttataaagatgcataaaaacagattctagaaatattttaaagtacggaattcttgatttctgaggagtataattcaaaaggaagagtaacctggaccttctcaaacttcgttagattttagagaaggggactgtggagggagaagtacaatccctttctaatggaatagagtgaatctccgcatggaccctcaatgctgggataccaaatagatcagagcggggaatagcaggattgaggcattcttttcataattgggcctcagggtgcccaactcttcattttgttgtgttgccgactttcaactgagtgtcaaagaattgcatataagacaattctgatggaactttggatttaggaggggggatgagaataaaataaatgccccaaatgggaggaatgtgtattattacatgtacttgacttaccaaaagccatagggcttcaaatggggtgagtgaacaatgtttttaaggatatgtgagcttagtggaggaggtggtgtttcagaaagactggagagagtggactgaattttgagtagcagaaaatggtgaatggaaagactcttccagctgtgggcagaggcacagcccaggaaagcactggagagcctgagctgccccactggctggagctcaggacgtgggaaagggaggtgaggctagagaagcagatggggccaagtggggagggctctggaagccagcagcagaaccttaaccggggcagcaatggcagtcactgagggttttgagcaggaagggtatttgataggagattaaatcaagcaggttaaccagcagcatgcagcatggggtggaggcaggctgttggtgtggtgccctgcagaattagcaggaatgaaaggctgggggcagtggggaggagcaatttcaggaacagtggaagctcactgtgcccagtgactaattggcatttacccctgtgcagcagggtggaggggtggattttcctcagctgttacgctgctgtgagttggaagaagggattgggagaccatcaatattatgacaaaaaatacccattcctctaataacagcttcatgaaagtggccctttttgggtgttattatgtatattagttcctactgctgtaacaacaaatgactacaaacttagtggcttaaaataacacaaatatattctcttaccattctaggggccaggagtccaagtggtttcactgggataaactcagggtgtcaacctagctgtgttacttctgcagaagctgtattactttacaggagagtttgttccctggcctcttctagtttaatctagagtccacctgggcttcttgacccttcctccactttgaaagctagcagcataacatcttccaatctttttctctctatgacactcctatttcctctaattctgttgcctccttttttcccttataagaacttctgtgattacattgggttcacccgaaacatcgggataatatcacatctcaaaattttaaatttaatcacaccagcaaagcctctttgaccgtgtaaggtaatatgcttacaggttctggagattaggatgtggatatattggggccattgctctgcctgccacatcatttgaccacagcttttttgtcatgagtacctggtgggaattaaaatgcccagtctgcaagtactctcaatttggaaaccgcagttttcttgattaatcccgtaagtggcaaagtgacttaaataaggggataaaagaggcatcatgtacctgctgtcatgatcatcacttgcctctttccaacttttgagtttctgtgtgttttgttttgttttgttttgttttgtttgttttctccctgttgagatagtagtctttctgtgcacataatagaagatattagcccattctctgtcacttgttataagccgtttaactgtgaagaatttttgacaggtcaggagattctggaaatttcttcccccttttttaatagtataaaactttataaaacgtcttaactttttcaaaggttctagtttccttttagaacctaataaaatatttttcctagaataacctgtatttatctcctaagtttgcataaagtttctagtgtttcatgggaaccctaaactaagtctcctttgtcttagcacagtaatgcctgttgccaggcaaacttgaaccagccttaaccatgaccatgaatactctgttactctgttttgtgtgacaacaagcaccaggaatggtattgctacattggttttggttgtactttcaacttttaccaactatgtaatgtttttgttttatttaaaaactttcaaaattattttagatcctgtatctttgggcttatgttaatattcatgattatttcatttcatatacagataacatcatgaatactttcccattaagagtaattatgctttgtgaaaatactattattatacttataagagttattcctaaagcagagtttataaaacttcctgagtcctttattattagtatcttatgtaaattacttggtgcttctttgtcgagtgactcattcatcaaatgaagatacttgttataatggttaaattcattcatgggttcatgcctgtaatcctagcactttgggaggctaaggcaggtggattgcttgagcccaggagtttgagaccagcctgtgcaacatagggagactcctgtctctaccaaaacaaataaattagccgggcatggtggcatgtgcctgtggtcccagttactagggagactgaggcaggaggattggttgagcctgggaggttgaggttgtggtgagctgtgatcatgccactgcactccagcctcaatgacagagtgagaccctgtctcaaaaaaaattattcatttaaaaaatatttactacatgcctgcctgccccaagcattgtctagtctctgggatacctcctttccaccccagtgtaagtcctgcttacccttcaaagcccaactcaggtcatgttattaccatgagccctttctactattctttctcacgtgaatctctccagagattcttccctgagcccctgtggaactaataatgagcactgctaattttagccattagccactctttagaattattctctacttgtttcatgtatcttagtgtttgtttttcccccagctagactgcctgtgtattcgggctgtgttcagtgaatgtatggtggtttgctgattgattcaaagtgaatctgaagaatacacttcctttctttgagattaagagaattgcctagtgctgtttcagggctgtgaggatgcaggtgcactggcttgcagctgactcttaggtacaggaaggcatcatgaaggaaagtgaccattgtcctctattggagtttagccctctgtcttgaagagacagaagcaccctaacactcaaagcagttcatggttgcttttaaaaaagtttgcagggcccaatttctgtggcttttactgggggaagcattacataagaggacaaggagcacatgtatcctatgcagtgctacagaataatcccactcccagctcctgactttcagatggtgagatgtttgggagaatattttcagtctgaagaaagtattatttattgtttagtctgagcttttagcccacacttccctttcatgtggtttttgcttgagagttcttggaccaaggttagattgaatgttgagacactttggggagtgtaaaaatcaatgattgaaagaaaaggtataaataccacaattgcattcattcctttatctctttattctcttttttaatcctgaatctccttacattggattatgtataataccaattttaattggctgattttagtgacagcattaaaatgtaaacttaaatttaaggctgatggtacttacgaagagtatctctcatttaacattttcattatacattcagatgtattgcagcaaattgtaatggtttgaattgatatcatctttaccttgtctttatacagacatcaaataacatctaatgtttgactcacatgaatattgccttataattggaaaaaagttatgttgctgtttacatagttatttaagatttgtggagatcaaaaagaagaattgtatgttttttttctttttggcagaccttattgttcaatgtaagtagacttaagcggacttcatattttcttccagatgtaaaggaaaggtgcccaaattggcaagacgttaaaaattattattaggccaggcgtggtggctcacgcctgtaattccagcactttgggaggccaaggcaggaggatcatgtgagcccaggagttcaagaccagcctgggcaacaaagcgagaccctgtctcaaaaaaaaaaaaaaaggataaaaataaaaattatcattaaactgccaaaattcaatatttgtttgtaaatgtttatgcatctggctagtagacttggatcctagtcatgaaccacaaagagaagaggttctgtggttataagatgagtggctttggttttggatcttattgagggtaccaagtttattgctgatcacagggtcatgtggaatgggacctcaatagggtggagaccagattatgtgtgtgggcgggggattggggggaggggttgttgtcttcttggtgtagtttttactgggcttcccagcctccttccagaaattgttcagggaaatgtagatgaatggctttggcagaacgtaacatgagtgggaaaatgtgagattaaaagaaaagcttatattcagtacagtggcttttttacttgccttcattcattaaatcattgtttcagggccccatcccccccccttttttttttttttttgagactgagtctcactctatcatccaaactagagtgtagtagtgcaatcttggctcactgtaacttccacctccctggttcaagtggttctcctgcctcagcttcccgagtagctgggattacaggtgcgtgccaccatacccggcaaatttgttggtgtttttaatagagatggggtttcaccatgttggccaggctgatcatgaacgcttggcgtcccaaagtgctggaattacaggtgtgaaccaccatgcccggctcccatccctttgttgatgcacaaaatttggagttaagagcaaatgctcttagagttcatgaaactttttgtttgctctaatataaactgaattcaagaatccttttattgtagcaaaagtgcatatactctacctattctctctaaaaatacaatactgtgttcatggcgtctttcctgcttcttgaactccaattggtgaacattgaagtcaatattctgactaatctctgactcactttcacactgctatgagtttagctttgtcgtgtcaggcccctattgacttcagtagggatggcgccaggtttgaggctgaagaagagacctggagccagtgaacaagacatagggttttattggagggaacttacatacagggacagtctggtggcagcaggcttgacagtagagcattatttattatataaattgcatgcttgtaaaaagtatacaatttatataatatttaaagcaccctctaacaacctctgcctggcaacctccacttaatccaaaacaaagaggatctttcccctgcacactctcattccatggacaggccaggggttcagatgttccacataaataagtaatgaatctgtcggatgaccactcccggattccttagctcagaactctgaagacacattcaggtgtgtctgccttacagggtcattctcagggtatgcttaagatattgccgtcaggtgcatctgccatacaagcttctacttttttcaattcccagataaccatagatggttgaaggtagggtgcccttagctataagacacatcctccagtttcccaatgatacaaaatattctggggccaccttgaatatgtaaagttttagagatgaaacaattgatatgtatattaataacattaatatgtttatttagacataatgcttttcctatttactttcatgaaataatttattcaaagcctgtatttgcacctttgacatcatgtctttgtcagaggagctacctcagagtcatctaggacagtgtgccagagtgccttctcttccctcccgtctaaattgcatagactttaatgtgtttggaatccatgtaagaagttatttctgtaaatgttaactcaggccttagcactctttgcctctctttcagacttttttttgtcctttatctataggtgtatgttgaggatcttccacgtgtaactcttttctgtcctccccttaagagggatctttaaaaggtttgtttacagtgatatctaatacaaacaattatgaagtcaccaccctagagataatgccttaagtatttgttaaatttctttgctcccttagaatagctgcttccatcagctgaccttcttgagcatctcaaactggcattgattgaagttgtttcagatttgagtgtcttcaaggaatacttctttgttctaaataaagtgcttgagagagtagtctataaataagagactgtaatgacttgaatatatggcaacctcgtttttggggggaagagaaaacatatcttcagtttatacgtggcatagtaattaaccagagagttttcttttttttttcttttccacatctactggccaaattatttatttccttgttatgcattcctatatatttttgatggtaaaaaaaaataatggcaaggggcaaaaaaatagtggtttactggaatatgggaaatttaaatagcctaatgattatcacatggtactcgtaaaccctaaatgattaatatgtggcaatccaagaatataatgccatcatatctaataaaactacaggattagtgaaaaaaaaggtcccaattccccaaccagtacagaaagaaaatttaataacgtagcttacaagattgtcttcaatcttcacttctgcaatatagagctatcccttaatctttttttaatcttaatttgtttaaagtggtgtcaaatattgcggtgatacaacatagaacaattaatatgaacattttctttttagaatctggtaagtttggatagagtaggtatagaagaatcttactggaacatggtcacaactaattcacctctctggagaccttttctgcctctctagcaagagaaacacatgtcagaagaggctcaggagaggaagcaggctgtggtaataacagcacttgacatttgtgtagctctgtgattttcaaggaactttcgtgagcattgtttaattccatcttcacaacaattctgcgatgtaggctagggcattagaggcataacctactcttctgccaactctgttttcaacatttaaggaaatgttgctttgaaaggttaagcaaattgactcaggttaccttgcagagcatgggaaaataggctgcttctctgggtggaggaaaattcttggtacagttgtgctctgtgtggttcttttctccccccaatcctctcacatcctatttctcactccttttccttccagggacatctaaaacatagttatgagtatatttttgaggtgattatcctagaaatgcttcccatagtttgtttctttttgaagaagggcagtaaattcttatcctttctgtatttttctatttgcattttttctctggcccaaaataagaatgcaggtacacttaaagaacaaaggaaatatcaactcattttaaaacgaacattgtcggagtaaatccaactgtgagtgctagggtttattatcttgtcctgaaagacttctgaatttaagtaggttagtaaccccgattagaaaacattgttcttgagagataacttcaggaaagagatcatttgttgacattcatttgagatctgtgtaacatttgagagctttatgttggttttatatatgcttgaggttatatatatagtttgaggaccatctatcaatccttccaggttataaagcacctaatttattaagaatattgtcttgagcttcactgtggacatttaaatgtcacaaatatttatggaattccaaatataaagaggaagtagggctggtgatgtagagatgagctatttgccttcaaggaggttgatacactagtagtaagcataagaccagaatggcctttgatgtcagaatcacctgggggtaaaatctgacttccccttaataaacctaagagtcatttgactgatgatatggttacagtgatacagtgatgcttacctccttgggttgttatagcagcatttgtaacttgcacgctgaaggctctaatatatcctggtttccctcccccttcctcctttcctttctctccatgaacattataggtgacagtagtgtctgcttagtcgtgggtaaactatccaacttattatgctgtaaactaccatatttctctctctctctctctctctctctctttttttttttttaatcggagtctggctctgtcgcccaggctggagtgcagtggtgtgatcttggctcactgcaagctccgcctcccaggttcatgccattctccggccacagcctcctgagtagctgggactacaggcacccaccaccacacctggctaattttttgtatttttagtagagacggggtttcaccctgttagccaggatggtctcgatctcctgacctcatgatctgcccgcctcgccctccaaaagtgctgggattacaggcgtgagccaccacgcccggcctgccatacttctcttaaagcaagaggaaaatccctgaaaatctatatccttgccccagacccttttcatatatccccttaacctagaagtgtttctgcagttcaaccccttggcatctcactcactctgaaacctaaagacaccttgataatatttaccttgtgtgttttcctgagttgtggttatttgtatatttattccatctcatttcttgactggagattctagactgtaaacattccttaaaggcatctttccatttcctatggtatctaatgcaattgcttgtactcattaaatcttaggattgaattaaattgatctaatagtgccttggtaatggtcacatgtaagtggtagccaagtctagttcctacttttctatggtattgagcaaagttaaccaccacctgatttctatttaccaataaactacaaaatattttcagtgcatctaaaagtattagatcctaacagacctcatgggttgatgtccactaccctctagagccaatgcagaatgattaccatagaatccaaggcttctctgtcagtttcctcacactccccaccactcagtacttattacacttcagcctacgccctgtgattcaaccaggcaaattggatagatgtgcaccatttcacaaaagtagataaaaatatacattgtcagctgacataacaggtggctttcttttaccacctagaattccataaaaaatgttgacacagtctcccacataaggtcacggcctaatctgggaaacaattttgaacctatccctgtataattgtgactctcagtgcaacagatctgtttctctctgtgatgttaactcatgatttaaattaaacttaatttgcatttatcaatagtattgcatgctcatctgctggttgtttgtggacctctgctttctgaagacaaagaccaatgatgaattctgattaaacagtttctagcactagtgttttcatagtccagccatctcatttcatagaggagaatgttgaacattctcaggtggacgccagtttcttggccttatctttttttttttttgagacagtctcgctctgtcgcccaggctggagtgtagtggtatgatcttggctcactgcaacctccacatcctgggttcaagcagttcttctgcctcagcctctcgagtacctgggactacaggcgtgtgccaccatgcctggctaatttttgtatttttagtagagatagggtttcaccatgttggccatgttgttcttgaactcctgacatcaggtgatccgcccaccccagcctcccatagtgctgagattacaggcatgagccacctcgcccagccctcttggccttatcttaatacccttaaaaaacaaattttattcatagatcttatatttgcatgcagtgttgaacttgaaaatacagaagtagaatatttttacatgacttctagaaaaggaagcacagatgaagtaaaatttactgccctttgaaaccacaaaaatcataaacaccttaaatgaaacaccaagtcaataaagttaatttagacagggttctgagaggcagtcactatgctgtacacgtatttcagcagtaatagaagaagtgagggttgcagatagcaagggtattgcacaaataagcattggccgattcttttttctctttctctcttttagaagatgtaagggaattgattttcagtatttttttcagatcaagtgatattaaaaatcagtttagcaaaaattaaggaacatataagtatttaaaaaatatgtctgagtgcaactaagataaagatacatgaaatatttgcctggtataggactctgtctataattttagtacttttgctaaatgtataagtactttaatgatgttggcccattgatagaagcaatagctttaatccaagtctttatagctttaataaattttaaaaaatcacccagatccacctacctatgtggatagactttttacacaggaacacgtagttaaattacattttggagcagccagaattatgcagtgttagtattcagagagtttaaatgaataatgtagatatgtagtttgctcccagggaaagagaagaataataagtatctatgcatgcagagtggtcagtgggtataaatgaacttgaattcattaacctcatgatttgacatcaaaaacagggaaaaatctgatgaagcgaagttcaggttggtggttatttgtgtatgcataaaggaatggggtttggggtttgacctgagtagccactctttggttcttggacagtgttttattcccagccccagcctctcagtcctgaacaggtcaccattcaaaaatacacgttcctgtagtgccatcatttcagggaaattctttgggggcactgatggagtctccaaaccagcatgaaacatgttgcagctaatttgttccatgaacttaacattttgtgaaatgtgtagattatctgcctctacatagctcaattatcagcatccctgggtagtgagcctgtaacaatgatctttcattccatggaaggagaaacagaagctcagagttcctgatttctttattactcagttgctgctccttgggtttgccctttaaatgtcaggtgatgtttgtagcaccatgatatttttgctgagtatcttgtcattttgtaaaaagagaagtggtatatgccccaaggcctcattggtgatgggaagaaatgggactctcctttcatatttgaacatttccctttccagcagccccatggaataaccctgagtgacttagatagctacttgtgcagtgagggaggtaagtgagggatctgaaagagctgctaggcaacccagtgaatatttgcagcctttatgggaaataactacagagaatgactatcaataggtatgtaggtagatgaacatctgggcattgattctgaaacaattgaaaaatcaaaggatgatttaccttaataatgcctggattttacaagagattttaatgttcatgattaaactggccgtaccagatttcaccgaagcccatttattgtgcattggctgtagccttcccagcaggcattccaatgctcttttaacatctttcagatgcggctacaggtgtagctcagcctcctggaaggtcctgttctctcacagctgccagtgggagacctgattgtaattatagcttccatgatgcaatgtctttaaaacctaaaactatgctacaattgttggcctaatgcctgaagaaacatggctgttaggagcttaaagagtctgctgaggagccccttggtcctaaagccaggtttgtgtaagaaatggagttaggcagttgagcatagtttgtgggctgattatgttctctctagtccgtagtctatatccaagtctgtctctagctctgaatctccacatcttattgacctagagcctgagatcagtagtgaaacaataaaaatttttggtttacttctgcagtggaattatggagaactgttattagatatgatttgatattaaaatgaaaacgtgttagaaggaaaaatgtgtttgagggagtcattctcaatctgtcagagaagacaaaacaaagatttaaatatttttacattccttggagccatccttaattaagatatacttgattttagtccttttcccttaaccctatttcctggctgacttgaaaattataagcaatttccactgtaggttttagctacttgaaaggttatgcttttcaaaaacacaacttttgcaagggtataattctacattgccacaggaaagtgtgttcaaaaatatttgtagggtagggtatgtgtgtgacagagacagattgaagttgagcagttgtatacgtgtgtgtgtgtgtgtgtaggtcaggggttggtaaactagggtcagtcaatcaaatctggcctgctgccagtttttgtatgacttgtgaaataagaagggtgatgtggtttggatctatgtccccagccaaatctcatgttgaaatgtaattctcaatgctggaagtggggcctggggaggtgaccgaatcctggggacagtttctcatggtttaacatcatccctccttggtactgtcattgctacagtgagttctcatgagatctggttgtttaagagtatggagtatgtggcacctcccctctctctctctcgctcctgctttggccacgtaagatgtgcctgcttcccctttgccttctgccatgatagtaagttttttgaggtctccccagaagtagcagccactgtgcttcctgtacagcctgtagaaccatgagccaattaaacctcttttctttataaattactcagtctcaggtatttctttagagccatgtgagaatggactaatgcagaaaattggtactgagagtggggtattgatataaaaaatacctgaaaatgtggaagcagctttggaattgggtaatgggcttctcagaagaagccctccagactgttccaatgtctgcccattacccagttcaacaagtcacaggaagatgaggaaagtttggaacttcctagagatttgttgaatggttgtgatccaaatgctgatagtgatatggacaaagatggccaaactgatgaagtctcagacggatatgaggaacttattgggaactggagcaaaggtcacttttgttattctttagcaaagaactttgaggcattgtgatgctgctaggcatctgtggaactttgaacttgagagtgatggtttagggtatgtggtggaagaaatttctaagcagcaaagcattcaagatgtagcctggctgcttctaacatcctgtgctcatatgtgtgagcaaagaaatgatatccaattggaacttacgtaatatttaaaagggaagcagagcataagagtttggaaaatttgcagcctggccatgtggtagaaaagaaaagcccatattcaggggagggattcaagcaggctgcagaaatttgcatagataaagaggagcctagtgctaacagccaagaccatggggagaaggcctcagaggcattcatggcaccccctcccatcacagaccaagagtcctaggagtggaagaatggtttcctgggctaggcccaggaccctgcttccctgccttgggacactgctccctacatcccagctgctccagccatggctcaaaggggcccaggtacagcttgagatgttgcttcagggctgccagtcataagccttggtagcttcctcttggtgttaagcctgcaggtgcacagagtgtaagagttaaggcttgggggcctccacctagatttcagaggatgtatagaaaagcctggatgtccaggcagaagcctgctgcagggacagagccctcatggagaacctgtactagggcagtgcagaggggaaatgtggggttagagcccccacacagagtccccgctggggcactgcctagcattactgtgagaagagggccactgtcctccagacccaaaatggtagatccaccagcagcttggaccctgcacctggaaaagctgcagtgctcactgccagccctggagagcaactatggggactgagccctgcaaagccacaaggggtggagctgcccaaggaaggcctggggaaccaacttcttacaccagtgtgccctggatgtgagacatggtgtcaaaggagattattttggagctttaagatttaatgactgccctcctgggtttcagacttgtatagggcctgtatcccctttcttttggctaatttctcccttttggaatggaagtatttacccaatgcctataccaccattgtatcttggaagtaactaacttgtttttgttgttgttggttttaagtatggaatggttcaagagtttgtgtctcatccttgtgcaggggccatgctaatgttctctggatccttcctgttttagtatatttgctgccaaagtgagcacactaagttgttttttattttacaggctcatagggagaaggaattagccttgtctcagttgagacttcatactgtggtcttgagttaatgatggaatgaattaagactttgggggactgttgggaaggtatgattttattttgaaatgtgagaaaaacatgagatttggaaggggccaggggcaggttgatatggtttggatctctgtacccacccaaatctcatactgatatgtaatccccatgctggaggtgggacctggtggaaggtgattagaaaatcatggggttggtttctcttggtttaacatcatctgccttggtactgtcattgcaatagtgagttctcatgagatctggttgtttaaaagtgtgtggcaccttccccctctctctcttgctcctgctctggccatgtaagatgtgcctgcatcccctttgccttctggcatgattgtaagtttcctgaggcctctcaagaagcagatgctgctgtggttcctgtacagcctgtagaaccatgagccaattaaacctcttttctttataaattacccagtctcagtcatttctttatagcaatgcaagaatggactattacaatgggtttttacatttttaaatggttatattttacatttttaaatggtttttacatttttaaatggttatataaacacttacataatatccttagtttttcttcttggtgcacaaatcctaaaatgtttactaactggccttctagaaaaaatttactaacccttggtatagggaataatgttgcaacatctttccttactttgattataagagataattcattactttttaaaaaaactcttttaagttactcttcccagtaatcaaaactagtatatcttttttttgtttgtttatttgtttgagacggagtcttgctctgttgccaggctagagtgcagtggcatgatctcagctcactgcaacctccaactccctggttcaagcgattctcctgcctcagcctcccaagtagctgggattacagacacatgccactatgcccggctaatttttgtatttttagtagagacggggtttcaccatgttggccaggatgatctcgatctcctgatcttgtgatccgcctgcctcggccttccaaagtgctgggattacaggcgtgagccactgtgccaggccaaaactagtatatcttaatagaaatgtcttatgtttttgcagtcttttcaggggttaataaagaaagtataaaaggtttgctgcaaaattttaaatcaatcagtagtcattacaatatattttggaagcatacaaagagaagagaattacaaaataccctccccatatgaaggagttggctctgggctcacacggaatggaacattacctcagtgtttgcttctatcatgaaatatcttgagtatcagttatctgttctttaatgtatgttccatccttctgaatgcatcagagagagaacctcagttgtgagctgagttccctgtggagcaaacagagcaactgtggacaggccatatgctttcactcccttgtactcccagtcccaggcaaccaccactaatctattttctgtcgcaatagatttgccttttcagaacatttcatataagtggaatcacccaatatgtggtatttgtggctaacttcttccacttggcataatgcttttgagtttcatatagctcagagaatatatgagtacttcatttgaatggatatacctcactttgtttatccattcaccattgagtgggtatttttcattgtctttgctttttggctactatgaataatgctgctgtgaacattcggatagaagcctttgcctggacatgtcttcatttctcttgggcagctacctaaaagagaaattgcttactgagtcatatgataaattcacatttagagatatgaaatatgaacatgaatatctaagaaattatcaaactttctaagatacaccatttcatcttcccaccagcagtgtattggggttccagtttcactgcatcctcaaaaacattgctattatctcttcaattatagccattctagtggggtgtgaagtgatatctcattatagatttaatttttatttccctgttgaataatgatgttgcattatcatttgattattggtaatttatgtattggtagatatctgtttagatcttttgcacattttaaagttgtgtttatttttgtactattgagttttaagagttctttatacaaatcctttgtgggtttaatgacttgcaaacattttcccctagtctatggcttgccttttatttatggtatcttttgaagggcaatgcattttgaaacatgagttatgaattcataacatagaagagatttccaatatttttttctcatgttgattattttattccaaagctgagatttgtaggagtttgtggaactcctccaatgagtcagtgtcagggttggtcacctctttagatggtttgaatattttggatacccacacaatgctagagctctaggcagtgccaggtttacctgctgcctgtatctttttacttcattttccatttagggtgcatctgtcaaaggtgacttcaagggcatcagtagggagaggttatcttggatggttggttctatctcaagcctagcctggaaatttcttactgattgcctccccacctacccactgcagtcttaaactcttgggctcaagggatcctcccgcttcagcctcccaagtagctgggactgtgagtagtcaccacccctggcctcccttcttttataagtttacaaactttaaaaaaatcttatgatgaaatctttgacagtgggatggattacatttcctttttgttgtttctcaaagtatgaacattgatgtgcctttattgtgctttttactagaagaggaaagataaatataagaatatagttcattcttgataaatgtttcataatgtcaagaatcttttcgctccaagtcctttttaggttcagaacaataccagaaagggcctggtcaccctcagctcctatgtccatgagctcttcctccactgccatggagtggggaccttcatacctttaatgacagtcccctgttgagagccactgaagccttgcccatttttccctgctctgtgttaccctaaagtcttgagaggatttggacattgggaaaactacttagctctcaggaactttctttgaggtttgtattctgccttgttctcttcggcctctctactcaaccactctttccttgccgcttacccagagaaggggtgagaagggacaccatctctgttttaacagggcttaacaggtttgatgtggaaagactgagttctccaggcttttttttcccagtgacactagggcaggttgaccttgaaaatagaggtaactccaaatattgtcacaagctgggagtgaagacaaaagatgtgactgtttttttttttttttttttttgagatggcatctcgctatgttgcccaggctggagtgcagtggcgcgacctcggctcactgcaagctctgcctcccgggttcatgccgttctcctgcttcagcctcccaagtagctgggactacaggcgcccaccaccacgcctggttaattttttgtatttttagtagagacggggtttcaccatgttggccaggatggtctcgatctcctgacctcatgatccacccacctcggcctcccaaagtgctgggattacaggcgtgagccaccactcccggccgactgattttttttagaataggtaaggcttccttagatttacagctgttgcccatccatcgggaagcagctttggagattagcttgtcagccccttgagggaaggactttgacttaattcatatttatattcccagcacctagtagtatgtcttggtatttactaaatcctcggtatatcttaatgaatggccatccagttgttagcataataacaaatagaatgtatttgatttgatttcatttttatttggtagatattttccaaacggagaactgagcaaaagttcattagattattatttaataatttaatgcaagagtgaattttccctatgaaaattctatgcttcaggaaagcagactttcattctatatggaatatagtttagagtgtaagaagagtagaccatcccacccatctctgccacatactatagttatactgttaaagagtttaaagcacaggttgtgaactggtagccccaagttgaatctagcctgcacgatttggcctgtgtgatttttattttttatttatttattttttgagtcagagtcttgccctgccgcctaggctggagtgcagtggtgcaatctcggctcactgcaacctccgcctcccagattcaagcaattctcatgcctcagcctccagagtaactggaactacaggcacacaccaccatacctggctaattttttgtatttttagtagagacgaggtttcaccatgttggccaggctggtctcgaactcctgacctcaggtgatatgcccacctcagcctctcaaagtactgggattacagacatgagccagtgtgcctggcctgatttttatttttaataggattaatcaccagcatctaaaaagtctgatgtcttataaaacatcagattttcagctttctgtgaaaaaatggggaaaatctgacaacacttgagtttgcattctttcttgacatttgaccagcccttatttcagtggggtattgaaatagccacattccccagcattatcagcatagaaactgtgtgccaataaccattcatctcagtactctgagagccaagtttaaccagctcctcaattgccttaacctgcctagaccctgtagagatttaagtttgcaacttttgtttagagactcagtttaaaggtcttacatgatgactttgaaggttagattatttaattttgtggctataaaataccagaatacaaaaagattttaaaacccatgaataaacatacttactttgttcatctgtacatcttcattggtcgatttatccgtgtatcatgtcttatttataacaccacattgccatggaaattcactgctgtacttttcactttccagccctactaaattttacacttaacattttcagagctgcttgtacaaagtacagatttagttagtagcaatctcaagtggttttataatattaaacattaaataactttaaaaatgcaaacaagggaaaagtaagaagtcagccaaatcctgacacataaatttaacaaaaaagcaacacagagtctctcatttacgtgacctactgcttaaccactttgtaagaatgaagccctccttcattctacacttgtgtcttcttcaaatctaataggagatgtctgtcctagagtcatattgtagttggtagtttgtctagccattggcactggcccatactcatgaaacttgaagtcatttattgggtgtacgtcataagccagctatataaaaatagtaatgatagttaagagttacggagcccttgccatgtgttgaatgctgttctacatactttacaagtattgcctcatttaatcctcattctaaccctttgatgtaggtggttttattttcattttgcagatgagaaagaggcatagggagtgcccaggatcaaacagactgtgtgaaattgtggaggaagtcttcatgcccaggctgagtgaacatagcttcctgagagccagtcctacgtagaagatttaagacacagatctttcactcagagttgaaaatttccaactgattgttggtcacttaaaggatgactaataacatatgttgtcttaatgttagaacaatatcttatggggataaacacttcttgggaggtggagaccagagaaaaccgcaggaggatcatgaaaggttgagatggacgaagaagaaaactcagggttaaggcttttttgtgttgttttgtttaattcacatatggtgaaacaagaatgagatttatctagtctccctaaagaggttatcccaggctaggccagagcaacagttgattagctttacccaactaagaaaagggtggaggcacagagacatcatatgggttgcctattgcagagattttgagtttcaggttggctgagaatattaaagcactgggggattaggagtgttggcctctggatatgtaagaattgctctttggtgacagtgccttaggccatctgtctgaacagcacttcttaagatctcaaactcctcttgttctttttctgtgttttgcaagcaacctcctgtgtagatttttctgcaggaggagtaactctcattcatgtcaaagcaaatagtctggactttgtgactgctctgtcatgattaatcaattgacagcctggcttacaggtctggctgtggcactcagctaatgccagcctacctcttgaagaaaggtaaagactaggtgtgttgggctggggaagagactgagggaatggagcaaaggaagtaaatgaaacggatatttccaatgcagaactttgaggtttgatgcctgggataaaggggggttgaaggcgaaggaagactcaaggacctgggacattgagtgaataatagtgtccttgacagagatggaaggaagaaacagtggattcctgggagaaagataatatgttttgtttgtttttggattttgagcctcaggtgccgacgtttgggtgtccaaatgacattgggtgtccagggatatagagatggttagaggcagtgattgcccagcatacagggagtgggtgagttcacctagcaggagcacgtggtgtgaaaagaaggctgaggatggaaccccaggtgtcactggcattgacagaccaagggtggtctgtgcacaaggcaagagaagcagagggttgggacagaaagggaatgagcacagcagcagtgattcaaacaaggtggaatggccagttgtgtcaaatattgcaggatcaagatacaagacttaattaatataggacttggactcaaaatataagagttcaagagaacttaacggtctgattgtttctccagaagagacacttaaacttgcccaggatcaccctgtgagtatcataggtgtaaacactgttgctacagtgtttcctgcttggcaacctcatgatctcatgttcacccattgtttcatgctgctcattttctaagtatagctttacagtcaatatgtaataccatgtaatagtggctaggaccagaaatcatgatgctcggttcaagtgggcagctcagtctcactgtcttcccatgctcttagtgaaaaaagggcccttgttatttagaacatgaggtgctgcagtatgaatatagctgatgtgtgagcaactcacaactcttgcaatcagcatgcagctcatatggcatcagccagtcagctaagaacttcattgtgtgcattgtaatggggttggattttgtgaaatggcttattttcttatgcaggagtgcaagttcactggcatttattggaaaaatgtaagcattgacagattgttaggctgattatggccccttcactgagtgaggaaggaacaagagcatcttctcaaatagaaaatacaaattattggtcagaagtctgtgcaactacatttgttttcaattggatgggagatccttgacatacatggatttaactttcatacatatgtgcatacaaacatatgtgtatacacatattttcataatatacatatgcatatgtgtgaacatatacacatgtataaacatctgtgtctacacatacttgtattttctttacaaacaacttaaaactccaggagatgaggcatgattttaaatgtctgcattgtgtgactggtatgtcagggcaattgaaagagcccagctggctttcacagctgggaggctggtagcctggggcaagttctcagccctgcttgcccactgcctggaaacaaacttggtgctgttgtggggtgcatggtgggagtgacagtggccttttgggttgtgtggaagctgggtgatgcctgtaattgctggctttcccccacttccctgaccaacctgcatgacacagcagaggcagccataatcttcctgggaacataactccattggcctgggaaccacacccccatcccccatagcagctgcagcaactcctgcccaaggagagtcagagctcagacgtgcctagccttgccccaacctgatggtccttcctggctcactctagtagctgaagacaagaggcatatactcttgggagttctaggtccccatccactgcctgatgctccctatattaccacagctgatgctctcttcaaagcgccacctcctggtaggaggccaatcagcacaaaatagttcattaaacaaccaaaacttaaggaacctcacagagtccatttcaccccccctgccacctcctctggagctggtacccatagctgagaaatctgcagatggttcacatcacaggacccagtgtagacaacccccagcaccagcccagagcctggtagacctgctgggtggctagatccacaagagagatgacagtcactacaacttggctctcaggaagccacatccctaggaaaagagggagagtactacatcaagggaacacctcatgggacaaagaatctgaacagcagccttgaaccccacatcttccccctgacatagcccactcaaatgagaaggaaccagaaaaacaattctggaaatatgacaaaacaagtttctttaacacccccgaaaaatcacaccagctcaccagcaatggatccaaaccaagaagaaatccctgattgacctgaaaaagaatccagaaagtcagtaattaagctaatcaaggaggcaccagagaaaggtgaagtccaatttaacgaaataaaaaaaaaatgatagaagaaatgagggaagaaatctttagtgaaatagacagcataaataaaatacaataaaaactttaggaaatactggatgcacgaaagaaatgcaaaatgctctggaaagtctcagcaatagagtcgaacaagcagaaaaaagagtgtcagagcttgaagacaggtttttgaattaacacagtccaacaaagacaaagaaaaaagactaagaaaaaatgagcaaagcctcccagaaatctgggattacattaaatgaccaaacctaagaataatcggtgttcctgaggaagaagagaaatctaaaagtttggaaaacatattggggagaataatcgaggaaaacttccttggccttgctagagccgtagacatccaaatacaagacacacaaagaacatctgggaaattcatcacaaaaagatcatcgcctaggcacactgtcatcaggtagtctaaagttaagacgagggaaagaatcttaagagctgtgaggcaaaagcaccaggtaacctataaaggaaaacctatcagatttacggcagatttctcagcagaaatcctacaagctagaagggattggagacctatcttcagcttcctcaaacaaaacaattatcagccgaaagttttgtatccagtgaaactaagcttcacaaatgaaggaaagatacagtctttttcggtcaaacaaatcctgagagaatttgccattaccaagccagcacttcaggaactgctaaaaggagctctaaattttgaaacaaattctggaaacacatcaaaacagaacctctttaaagcataaatctcacaggatctataaaacaaaaatacaatttaggaaaaaaaaataaaaatccaaggtatacaggcaataaatagcataatgaatgcaatagtacttcacatctcaatactaacattgaatgtaaatggcctaagtgctccacttaaaagatacggaatggcagaatggagaagaattcaccaaccaactattgctgccttcaagagacttacctaatacataaggactcacataaacttaaggtaaaggagtggaaaaagactttccatgcaaatggacaccaaaagcgagcaggagtagctattcttatattagacaaaacaaactttaaagcaacagcagttaaaaaagacaaagaggaacattatataatgaaaaaaggccttgtccaacaggaaaatgtcacaattctaaatatttatgcaccttacactggagctcccaaatttataaacagttactactagacctaagaaacgagatagatggcaacacagtaatagtggggacttcagtacttcactgacagcattagacaggtcatcaagacagaaagtcaacaaagaaacaatgtatttttactataccctggaacaaatggacttaatagatatttacacaacatgctacccaacaaccacagaatatgcatttgattcatcagcacatggaaccttctccaagacagaccatatgataggccacaaaagtctcaataaatttaaggaaattgaaattatatcaaacattctctgagaccacagcagaataaaagtggaaatcaactccaaaaggaaccttcaaaaccatgcaaatacatggatattaaataacctgctcctgaatgatcattgggtcagaaatgaaatcaagacggaaatttaaaaattcttcaaactgaatgacaatagtggctcaacctgtcaaaacctctgggatacagcaaaggtggtgctaagaggaaggttcatagccctaaatgcctacatcaaaaagtctgaaagagcacacacggacattctgagatcacacttcaaggaactggagtagcaagaacaaaccaaacccaaacccagcagaagaaaggaaataaccagaatcagagcagaactaaatgaaattgaaacaaaaaaaattgcaaaagataaatgaaataaaatgttggttatttggaaagataaagaaaattaatagaccattagcaagattaaccaagaaaggaagagagaaaatccaaataagttcaattagaaatgaaacaggaggtattacaactgacactacagaaatacaaaagatcattcaaggctactataaacacctctacacccgtaaaccagaaaacctagaggagatagataaattcctggaaagatacaaccctcctagcttaaatcaggaagaattagacaccctgaacggaccaataacaagcagtgagattcaaatggtaattaaaagcttagcaacaaaaaaaagtccaagaccagatggattcacagctgaattctaccagacattcaaagtacgattggtaccaatcctattgactctattccacaagatagagaaagaaggaattctccctaaatcattctgtgaagccagtgtcaccctaataccaaaaccaagaaaggacataaccaaaaaagaaaactacagaccaatatccctgatgaacatacatgcaaaaatccttaacaaagtactagctaaccaaatccaacaacatgtcaaaaagataatccagcataatcaagtgagtttcataccagggatacaggagtggtttaacatacatcagtcaataaatgtgatacaacacataaacagaataaaaacaaaaatcacacgatcatctcaatagaccaagaaaaagcatttgacaaaatccagcatggctttatgtttaaaacccttagcaaaattggcattcagcagacatacctgaatgtaagaaaagccatctatgataaacccagagccaaaataatactgaatggggaaaagttgaaagcattccctctgaaaacaggaacaaggcaaggatgcccactttcaccacttctcttcaacatagtactggaatccaagccagagccatcagacaagagaaagaaataaaaggcatccaaatcagtcacaaggaagtcaaactgtggctgtttgctgatgatatgattatatacctggaaaaccctaaagactcctccaaaaagctcctagaactgataaaaaattcagcaaagcttctggatacaaaattaatgtacacaagtcagtaactctcgtatacaccaacagcgaccaagtggagaatcaaatgaagaaatcaaccccttttacagtagctgcaaaaagaataaaatacttaggaatatatctaaccaagaaggtgaaagacctctacaaggaaaactgcaaaacactgctgaagtaaatcatagatgacataagcaaatggaaacacatctcatgctcatgggtgggtagaataaatattgtgaaaatgaccatactgccaaaagcaatctacaaattcagtgcaatttccatcaaaatactaccatcattcttaacagaactagaaaagcaatcctaaaatttatatggaaccaaaaaagagcctacatagccaaagcaagactatgcaaaagaacaaatctggaggcttcaaactatactataaggccatagtcaccaaaacagcatggtactggtataaaaatagatacatagaccaatggaacagaacagagaaccagaaataaagccaaatacttacagccaacttatcttcaacaaaggaaacaaaaacataaagtggggaaaggacaccctattcaacaaatagtgctgggataattgggaagccacatgtaggagaatgaaactggatcctcatctctcatctacaaaactcaattcaagatggatgaaggacttaaatctaagacctgaaacttaaaaattccagaagataacattggaaaaacccttctagacattggcttaagcaagtttttcatgaccaagaacctaaaagcaaatgcagaaaaaacagagaaatggctgggacttaattaaactaaagaacttttgcatggcaaaaggaagtcagcagagtaaatagagcacccacagagtgggagaaaatcttcgcaatctatacatctgacaaaggactaacatccagaatctaaaaagaactcaaacaaatcagcaagaaaaaaaaatcaaacaatcccatcaaaaagtgggttaaggacattaatagagaattctcaaaagaagatatacaaatggccaacaaacaggaaaaaatgctcaacatcactaatgatcagggaaatgcaaatcaaaaccacaatgtgataccaccttattcctgcaagaatggccataataaaatcaaaaagtaatagacgttgagatggatgcggtgaatagggaacacctctgcacagctagtgggaatgtaaactattatagccactatggtaaagaactaaaagtagaaccatttgatccagcaatcccattactgggtatctacccaaggaaaagaagtcattatgtgaaaaagatacttgcacactcatgtttatagctgcacaattcacaattgtgaaaatgtggaaccagcccaaatgcccatcaatcaacaaagtggacacagtttatttatcccctcgttgattgatgggcatttgggctggttccacaatccatacacacacacacacacacacacacacacacacacacacacacacacactatttatatatatatgatctaatactactcagccataaaaagaaatgaattaatgacatttgcagcaacctggatgagattggagactattattctaagtgaagtaactcaggaatggaaaaccaaacatcgtatgttctaacttataagtggaagctatgcggatgcaaaggcataagaatgacacaatagattttggggactcagggaaaggatgggaagggtgtgagggataaaagactacaaattgggttcagtgtatactgcttgggtgatgggtgcaccaaagtctcacaaattaccactaaagaacttactcatgtaaccaaataacacctattcctcaaaaacctatgaaaacaaaaaaagttttttaaaaaagaaaaaaagtagaatgagccttcttagccaactaggacccattcctgttcatgttaatttaatttaattttttcttctcatcgaattcccctaacaaccttaagaattaggtattttagtccccattgtcagataaagaaactaaagacattttactctattgttaatagatatggatttagtaataagtgatggattctacctcatccctgtggaagttctgttactcagtctcgtgttttgttatgagacgtgtagtagagcctgcagcagaaaactgacaccaagcagggtaatagagaaggggaaattcaccttttttttttttttttttttaagacaaggtcttgctctgttgcccaggctggattgcagtggtgtgatcacagctcactgcagccttgaccacctaggctcaagtgatccacccacctcagcctcctgagtagctgggattacaggcacatgtcaccaagccaggctaatttttgtattttttgcagagatggggtctcagtatgttgcccaggctagtcttgaactcctgggctcaagcagtctgcccagctggggaaattcacttcttaaaatcaaatgtacatgctttttgaaaacttaagaactttggctttagttttctcttttcctttgcaatcacagtatcagtgctgaagaagtgactttttgtcttcagtctgctttcagataagaaaaaaattgcatagagccttgatgttcaagggacacatgacattagtttgactctaaataataataaacatttggctacttttgcttgaagcacacactaaagaattgtgacctttgccagtgcatgttccgaagtcatattgactgaatttaattttggccacaatagatcaatattttattcccttttttatccttacactagacaattgttagttggaaaattcttgcttatctttttctgattcccacaaattttggtcattcaaatgagtgtaaatagactttaagctgacaattataagattagtgtatattcaggggaattctagaagtaacgagaggtattttataggcagaatttcacctaatagaatgacattgaattttttgcagatgtattttgaatagattatagggactagggctgatgttgggaagactaacgggaagggacagataccattggtgctgaattctaccttgctgggtgcttgacaagggtagtcaacttggagagaaaagaatggatcccaataaagaacaatatgggctagctgttaatggagcctatgaccaaagcactaaaaaacaaaatcaaagttaaatctgtgaaatagaacatagtggatttagaactatatatgcatacaatatctgatacacttccaatggcaattttagccctaaaagcatgaatacaatgacaggaaaacaggaaaattaattataatgcttagaaaaggatggttggaatgatggtgtaaagaacaagtcatatgacgtttctaagtatgagagaaggcaaagacgtagtcatttaatacattctgagtgagcataattcttgtgtacagaatcttttaataatgaaatattttacagtacagagaaaatgtaacaagcacagagactaatacaataaaaacccacccagtaatatttgatgctgttttagaggatggaaatattacagaatcagctaaagctccccatataccctagaaatgtccaatcttttggcttccctgggccacactgaaagaagaagaattgtcttgggccacacataaaatacactaacactaaggatagtcattgagctaacaaaaaatcacaaaaaaatctaataatgttttaagaacgtttacaaatttatgctgggccgcattcaaagccgtcctggcctgcatgtggcctgcaggctgtggtttggaccagcttgctgtataccttctctgttctttactcttcaaaagtaatgtctatcctgaatttaatgtttatattttcttgttgtgtttaaaacactacatatatgtgtgtttatatatatgcatatatatgagagacatatagcattcctttgcaaatcatcagactttccataactgcctaatatattttttgaatcaatgatttaatgaagactcttctacccaaattaagttcacctttgactggagaatgaaaagtgaataggtgaatgggtttgacttacctccaacctcaaagactttgcattgataattctgttccctttcaaacagaaagagctgagccttaagcaaatgaagaaaactatttggagttacagagttaattattgatggaggtggaaatagtttcaggaaatgtttgtcttaaagcaagaactcaagtctgcataacctgtctaacggatgagtaacatcttttcccctagctatcatatttctttggacattagtttctttaaactaatgaaagcttgaaagctactctagaaatttagattttatgtcagagtttccaaaaaggaatctgtcatctcacctttattttattgtttaagacatatgggatgtttttgaaactacagtcaatttgcttcctccccagttgatgaacatctccattgaactcaagtaataaagtcagtgtctcagtaacagctcgaaaaggagactactgacctaaaaatcatgtgacaactttttaacagtgtttacagatgaaaccaatcagttaaccaagacttcaagcccattcctcccttcagaatgtggtgtcagttgaactcatggaaacagtagaatagtgattaccagggataggagtgggggaaagagggagatgttggttgaaagataacaaacttgtagttataagatgaatacattccagggatctaatatatagcacagtaaggtgacccaggtttaaaactaactagattatgggaatcatttcaccaagtatctgtatatgagttatcatgttgtacacattcacatcatacaattttctctttcagttatacctcagtaaagcaggaaaaaaaaatgccgtgttacaatctttagagagagacactttggctaaaagctcatgggacgagaaagaattttgtatctgaatcattaacgtgcttgaatatgtctgatggctttgttagacttattaaatacaaaataattgaatattttgttccacaaatcaaaatttcaccaatctacctaaacaaacaaaggctgaagctggtgacttttaagaactttagatgtcaatctgtaaaatttgatatttatacattaaagaatactatactcaaaaaataggcagtatatcaggtatctgagtttttttctgacacttgtggcatagttacccatttctagtcttgactttaaggtcacaggaccccaagatgtcgatggagacctggtgtgaaaaacggggacacctgttttctttcacaaagttacttgttaaatgtagaaaagtttacaattccatgggtcttctatctgtagaataaggtcatagatgggctcttagggaccctacctaggctgttaagaacaatgtctgcttcaagaaaatttaagagtgcaggattagatgcctctgatttatgtggacagaaatatactgatgttcctgtaaaacacctgtaagaccgaatcgttgcattcagtgagctgtttttctgctagtatacattcatgacaccagctctgaataggattttagctaagtcatttcacattgagtgtgtgctttacgttatttagagaaatgaagagtaaacaaagtcttatttgccctcctaccttagcatagaaaaggaactgaaacagagatggtagcagcagagtaatggtatttatagtcaaaataagattttaatttatgtgctaaaatttttaatatttagtagtaaaaaccatgatctctggagtcaaattgcttggatttgaatcccaaattcaccatgtactttggcaagtaatttaaacttgccatcttatagtacgatgggaatgatagtggcacagtgtatctatcccacagggttcttacaaaatataggtgagttaatatatgtaagactcttgtgatggtatcaggtataaagtaagtacccatgaaatgccagctgttactgttttgtaaaaataaataggtgacaccccccaccccaagagaacctactataagtaaaaggacttcacaaagatgactacttctatcaaacttgaatccacaattacttcatgtccaaactttgtggaagggaatgtgtcacatataatacggaaacctcattggaaggtttttataaattccattgtacttgactggaaaactgataaaaatgagtgtaatatgtctatcttgtagctttgttcatatctcatgaaagctctgagttttgagtggaaaaataggcacttaatctactttgttcttagaggtaaagtgatttatgtattttaaagtaacactagattgaagtctatatttgttcctaaatatattctgctcatttgtccaactgtataatttcacttcatttgtaataatttgtaagatacagcgcagtgatttatattgtgttaaattttatgaaagaaaaattttaatgtcataggtataagccatacttcacctctcttcatggatttgataataaattagttaatctttttatttagatgatggaaaagctgaaatgagaatgtctcaattaataaaatcgatttcagaatcaaaagaaccatatactgatgttttggtgctctagcaatgtatcttagttttatacacaataacagttttttcattagctataccattccagagttgactattttttattccaaatttctatcagattgattgatcacgttagaagttgaattggcaatatatgtcatctctctccccttttttgttcatacttgcacagttcctggaagtagttgataaattattcgatctattgtggtgtaaatatacttaaaagtcagtaaataaaaggatcactcgtactcctaataaaaatttagatgtcagtttaggaactattctttgcaagccactgtttgtggtcagaaatgcaaagataaataaaactcagtcttactctacttggaactcacaagcaattcaaaggcttgtggctgtaatcaaagagaaggagaggaggtaaagaacaagtcagaattacagtgttttccatgttgcagcatccagaaaaggtggctttatggaacaactagaatttgacataaatcctgaaggagccacagtggctcagcaggtagagagaggtgagtgagtaggacagagaaaaaccctctgggtaataattgttaataagcttaatattgttttagctaccctggtattgaaaagaagcgtcttttcggtgctcttctatccccagatttgcaagcagtcagttttcattcatcagggtagagacagttctcaattatgcagcatccactaatatccaccaggttagaaacatcattttagctgaatacattgtcttccatttttaggtataaaatcaggaagaagtagcatagcttaatggttaagagtttggatgctggaaccaaacagcctagtttccaatcctgactttctgtcttactagctgtgtggccttcagcaagtaactaaacccactctgtgctcatttcctcatcagggaaaaaaaaataaagatgttgataataatgcctaccttgttgtgtggaacagtttcattaaatgacttcctatttgtaaagtgcttagaagaactcaggggatagaggaagtactatataaaagttgtaaatcaaacggccctcgtatgcctgccctggtctccctagaacatgtgctgagtcgtgcggggtggtggctgctctggatgattcccctgcttctgctgcctctgtagtttacaatcccttgccttttgggtgacacctggcaacaagacctgagacctcaatgctctgatttcctgcttcaaatgcacattttagtagtcttgattttaacaaagagccctgttcaaccttgttgtgtaaggacaataaaccagattcagtgggtggtagtttttactagcttcctattctaattttcaggtttgaaagatataaaagccttccatatccaagcaaatgtagtggaacacattgacgtctctaggcaaagcagggtgctctaattctgtagaatttgagagagggctttagagtcactgctaggtttgtgtcccagtttttccatttaccaggcgtctggctttggacaggctaatccctaggcttctttttccaatactggtcttacaaggttgcttccttatatggagtctttctgggaattggtggtccttctgagcatcctccacagatcgtttaggattcaacttctggttccactagctaagccaacattcctcccctcctgcagctttccaggccctgaaacagggtggttgtcttcactccagttttgtgtccctgggagtttatgctttactgaacaaaatccctcttttgcccgtttagtggtactttcataaagacacagaggtaaatttatgtgtttaatttaccttgtttaaccaagagtaatctttaagtgtttaaagaaatagtcttagtctatttctgttatcaaaagaagtcttttgaaattttcccgtaagaatgaatttaatgcttcctttcctcgttttcattaatctaagaattcatcccttgattattattgctaaatattttgtattaaattatcccttaaaaacaagagcatttaatttggcaatgaaatttagggcaatgatttatgttgctaaccatagtctttttatgctagaattatactttttgaaatattattttttgtttgtatattggtgggtcagaataggctgaagtaattttttcataaaggttaatgaataatgtatttttagagcctctgaatatatgagaatacttttcatatattcctctgcaaatgagaggaagtttgcctggcagaagctttctttgattgagtcttccctttcttttggcacttaataatacagcagagaactgtaagaccaactgggtatttgttcttttgatggtgatttgttttcatttgatttgtgtgtgttgacttgttgtttttatgcttgaacactgaagttttttttttttttattgtaaacctaggattcaacatttttgtcagaacatcgctttgaattgatattgtttggaatgcaatttagttgtcttttttttcagttcacattttttttagtctttttgtctttgattattctattttagttcttgtatttcctcagaaacagctataattagatttgttttctagtcttccagatctaggatcttttttcatctttggttcatttctctggccttatgggggtgtttaccctctatgtaaatgacttaattttatactgtatgtatctgtgttcctcccctccagtggataataatgctgcacttcatttttcagactctgtgcaatgctcctttattccacctataatctctttatcttacccggcagtcttttattgacttacaactttctgttttgtttcaaggggtcatatcttcttgtattatattggcaatgcctaaaactttcctaaaaattactaatgattcctctaggaagtcatttttaggaggctgttcttcctttgaatctttaacatgccgttttctttccacatttattactacttagtagacccatgctgccactgagctgttattttcattcccgaatttagagatattcatctagacctgctcacagaggggatgtgtggattgccctcagccccactctctctcctcctgtttgttagtaaaagtcctcttttagatctctgaccttgaagcaggttgatgtctatagacttggccccattttcagtgaaagtttcatataaagcagctatctccaatagccttgttctttgttgctttgtatgtggattgtctaagaacgccaacctccagaatgcagtaccttcataggtcatcttgtccctaaatctgcctttctgtcactgaaactgccagatttcacagtacatctccttcttcccagttggcttttgaaagtagccatcactaagatatggggtgggagattctgttgctgcctcaagaaatgtacgtaatcatttgtggtaaagggcaaagtttccgactgatacagattttgcatttctatacaagatggcagaaagtggagacagggtgatatgcagatgaagatttccctacttccttcaaggcttgtgacttttcactgttaatcacattttttacatctaatttcattctttttctgttgtaagaactcttccctgattctagcagtaggttgaaggtcatatcttccttttcatgggtgcatgaactttattatttatctcttttacaggtatcttagtagaagattgggagggactatatcagggactggtagctagcatttaaaacaataacatatgaaactccacaacttaaagaagtgctttatcaagttgcaagatgcttgaaaattttgctttctgcagatattttgtggaaataaactctgccttgtaaatattcatcacaagttgctattcaaatgatggaggcatcagtattcctataatagaatctatgtgttatgaaaactgggtcattttagtgattaaataaaatgtagatacataaatgatggtaggaattccaatgacttctgtaaaacttttttatacataaaaactgcctgatcactacctactaacaagggtcttagaactgaaacagctgttataaataacctaatctcggagttgcaaattcatttgcctccaggggccagacaaggcaaatgcatgaagtaggctagttccatactggaaggattgggagggactagagagaagtagagataatacttgtgctaccaaatccttgaggcatcattatagcacaaacccagtctcccattatagagatggaactgagatcaaaggatattaacagatttgcccaaagttagttgagtctgtcttgaccagaactgggtacataatttgcagaatccaatgcaaaataagatgctgggtcccttgttcaacaactattaagaatttcaagatggtaacaaagcattaaatcaagcatgaagtcttatgtgactgcctaagtcacacacccatgaagatatccctggttttaatttttgatctagaatttgtacaacaaacagaaacttgttatcactctcacccataaccattgagagattagtaatggagatggagttaaaattaagttcttaactttttttcttttttttttgagatggagtctcactctgttgcccaggctggagtgcagtggtgggatctcggctcactgcaagctccacctcccgggttcacgccattctcctgcctcaacctcctcaagtaggtgggactatagacgcccgccactaagcctgtctaattttttgtatttttattagagacgggatttcaccgtgttaaccaggatgatctcgatctcctgaccttgtgatccacctgcctcagcctcccaaagtgctgggattacaggtgtgagccaacacgcccagcccttaactattatactacaataagttaattgtcttttcttacaagataactttttttttttatgatatcaggaatgccatttagtgacatccagccaacttttaaaggcgtagctattcatactcggaagtacaagaaataaaattgggaatttagtactagagtaagagttttttgtaataagtatacacacacacacacacacacacgcacacatcttatattttaaaagacttaaaacatttccatcatttaaaatcaaaagaaaacttaaaaatttttcttcattagaagtgaaagtcacagctagaccataagtttggcatggtataaaattgtcatttatagttgtaatttgatttatttagattctatatgccttcctttagcaacatccacaaagatgttgatatagttgttaaaagacaaagtgaaattcttacctaattttaaaatattaactcttttaaaacaaatatgaacttcagttaactccagttgttagttttgaattatttgtctgattcagatattataccttcatattaccaaatcatatcccttcatgagtgataaacaagaagaagttcacatgttggagaatgagaagatgagcagttgggcaaatattgcaattaacaatgaaaaaattaagttatgaatataatactcaaaatattttctataagccatgtataccagtgtatggcttcagctagcactgaaattgctcattaagtttaatccttagttgaggtagggggacaaatttaatttaatgaactcttttccctcccttacatatttcagtatatgctgtgaatatataaactgaatgtcacagatttttttttaaccttctacaggtggagattttcattttacctttatgtatttacctacggagtcagattcctgaaaaaggtaggatctctcaaactattttacatgattcttatgtaagtgtatgtctatatcctggtttttttttttaatgtgtgactgtaataatattttaggtaatcatatcaggcttcctaagaattatttgtgcattttcatttgacttacaaaaatatttcggatgttgctaagtcccatagtcactccagtgggttatttattacttttcaggcattaggaagcttataaaatccatctgatgctttgaaagaagttagagtttctacatcaatcacacaatttgaaaacatgaattgttgcagcatgtattaccactgtactcttcaccagtagaaataactatatatattatataatatatattatataatattatgtaaatatatgtaaatatatatttatattatatattatataaaaatataatatataatatataatatataaactatatattaatataatatatataaactattatataaatacatattaaatatattatatttttaatatttatatattaaatataatatatatttaatatttatatattaaatatataatatatttaatatttatataatatatagcatattttatatttatattatatataacattttatatttatatttatatttatatatatttaatttatatttatattatatttatatttatattatatataacataattatatatattttcatattgtatataataaagaaatgtatatttgttatatataatatatattatataatttattatatattatataatatatattatataatatatattatatattatacatttattatgtgttatataattatatattacatattatatatataatatctgtctctctctctctcgcctagttactaacagggcagcactaactgctggtggaaaatttcatttctttcataagatcatttcccctgctgttgcttttactataatcctgcatgaactgagggaccgaaatctatgaaagtaattccttgtggctgctatagtctttccaggttatttcagttcttactggaactactgtcgggttagactccttaaataaaaccctgtgaaggcctatcttctcatagtcgtacacatattaacaatagtgatttggcataacatggggaattatttttaaaagttctctatagtattagcctccaaagtgatatcagtgttatctttatttattacagaatttttgttaaaattgggaatgcaccaaatttcatgccttattaatcttgtaaatattgacatggaaattttaaatacatttaagattttaaaatctgggttatcaaatattgtccgcctgtggtgaattctattataaatagtggttgtttcccattatcatattgttttagaggattgttttttacttgtagtcttttcctttggtaactgcacttattttcacttaataagaccatatggcccagaggccatttgaatcgatttagaaggatgagttttactctgtggggtttctgtgtatgaagaaattctcaactggagtaaataaacatggtttaaacggcttattttggaattctgttctagttttcagatttacttatctagaaaaaatagaatgactatagcgcttttgtgcttataactttactaccttggaagaggaaacagctttggatggaatttcagctgatgtggaggaggtgtgcttcatgggaaggtcgggttgttaactaaggtcaaggtttggaattcgtgcctggttctgttggtgaggggctttgttggtgagaaaggaaagagaggatgagcacgtttttgctcttttcctttaggcctgctggatatagcctctctagctctcatacggcaatgcggttatctgtcatcagaacaggaaacactttgacgcttagctctggttcactctgtccctaaacaaatggaatggaatgagaataatttttatccaccagtcctcagtgagtctgcacgaggcagtaagaggaactgtcagtagagtgtttccttggaaattattttttcttaaactagaccagttttatgccaatttcctttcaactgcctctggttataacaaatgctttttttttttaataaaaaaaaaaaggaaaggaaagaagaactagacactgttcttcttgttgaattaatttgtgtgggaatttctttctttaattccatccaagcagcactcaatttttgatgagctgtgtagtttagtcttactcataatgcgaagtagaaatgcatacatagaattcatctgactgaaatagctttggaggacttcataagccatcttgtccaaccctctcatttcacagctcaggaggcagaaatccagaagagggtaggtggcattcagaaggtcacacagtttattaaaggctgaacctgacaagaaacacatgctcctctttcttattccagagctctctccagttggcaagcctaccctaactgccctaacctcagcatgatttctgagtgacttccttctttgggtagcaggcttgacctagctgaatcattattgcttatttgtagaactttaaatacttcttttaatgtatattttaaaaatatttttattaactttcttggaatggacaatatgtttgcccaatctaaactgagacaaaaaaaattaaagatgctgcatcagaaataatcaaaacaaggtaattcaaatctgtagaataccttaaatttcagaaaataagaagcacatagttctatcaatacagcataaatttgtctttgtgttcagattcttccaaaaagtacagtaggaaaattctcataataccagtgtagtggatccattttaagaggttagaggctacagctgcctcttacttctagaatcaaaaatatggattattacatgtgctgttagaagaatccctgacagcttgcactgatcggttttcttctgtctttaggtcaaatgagcctgttgtgtctcattttctatggtggtttaataagcacctattctaccttaaaaaatagggaagtagacactacagaacaaccttacagacatgttagtgaactattcagtaaagttactgctgtgttggtaggaaatatttaagcagttgaaagtaagcctgacaatataatcttattctataattgctgtatataagagagtctgctcatacttataattagcagagtcaaatacttttgttaaagaagacctagaaatacttaaggtgctctgaagtcctagcagacagtgtacacatacaaattaacacattttcctaggttctattttttcttataaactacatgtctgatcatgtggggtttttgtttgtttgtttgtttgttttttgagatggagtctcgctctgccgcccaggctggagtgtagtggtgcaatcttggcccactgcaacctacccctcctgggttcaaacgattcttgtgcctcagcctcccaagtagctgggattatatgcctgtgccaccatgacaggctaatttttatatttttagtacagatgggatttcaccatgttggccaggctggtctcgaactcctgacctcaggtgatctgcctgcctcggcctcccaaagtgctgggattataggtgtgagccaccacacccgacacatgtggtacattttgtatcacaattcatttcgcacacacgcatgtatgtaaaagaaaagttactcaagatatacctatgtctaatttcaatatcagtcaggggtccataggagatagaaaccccagaagttaattttaggagtgactgtaatataaagaatcattaaccagagggaaccatcaagcctgtgttgctcaaagtaaattgatctactgtttactaccagtctgcaatgagataagaagcttgcacctgaatgtaaagcagctcctcctgatttttgaaaaagtctatctatgaagaaaagttagctgaaaacagtgtgcttagtgatccagttaatttacctcgagtgtaagctccttatgttgttgtggacttgtaacagacatttcaaggactgggcctcacccattagcaccccactgaggtatagtggaggtagtaatagcaggaaggcactgccactgtgaggacaaggggattacagaacatagaggctcaaaggaagagccatggagccagagaagacttctgacaaggggacactgaccagctggtgtccctgagggagcatgaggggcttggctctgggaatgtggaaaaactacaaattggaaccagctgctgctgctggaatgaactgctactgctggagtgaagatgcactgctgggtgggtttggaggcaggggatgaacgtgatgacaagaactagaagcaaaacagaaaggagcaagtcccatcttcctcttgcagccttccagccttcctcaagtgcttctaagaagctaaacttggcaaggcaccagctccttaaagccagcagaagtgcggcttgcacagtctctgctctgagaccggcagcagtatctcaataactagcccaattgtctcatattgctgcattctgaaatgtactctgataaatcttattataacctattttattacatttttaaaacatgaaggttgccccattacattgacttcatgactaactgctgggtgaaaacttgtggttgagagtgccccgtcagactgagtcctttgcccactcccttagactttctgaatccaaccttaactaaggtgcagcctttcattcttcatgcggtgttctcaaattcaacacacaaagccacgaagtgttccctggtttcatactttgagatgttctcttttgtttattgcttagttcggaatctttctgaaatgggaacaagattgtaattttttttgcctattttgagactgaaaatagaatttgtctagccattagaatatgagtccatttaagattttgttctctgtgtcattttaaaaatcttaaaattgcttggactatgttgctgtttaaggaggctttaaatttggttttaatgaaaatgacccccatgaaatacttctataagaagtgcacatgatatataatactaacattgggaagggaccctaaagatcacctatcccaaatttcccatttcagaaaacaaaaaccaatttcagaaagatgaattgacttgcccgaagcaaaactggaagcctgttttgctgtctttggactgtctaggttaaaaacaataacaacaacaacaacttagataagttttaaaaagctagcagtttaagtaactttttattagtaaatttaccttactaatgaaaactaaaagtcacatcagtatagaatgataagttggaagtcaagattgagatttcagtcttgaccctgctcattatacttaatggaacctttgctctctgaaagctcatttttctcatctgtaagatgggaaaagagaggtggtctctgctgggaattatttgtgtaagtccattgtcatcccttcacataaaaaatactgttctgttgctgcctcctactccgtaagacccgttgtcctggctgtgcttcgatgcttacaaataggtaaacatctgcaacaaaaagatcttgaataacgaaaggaaattcttcagagctgctgcttattgcatcttcctttccctcttctacctacatctaccctcttgcatatgttctgattctcctcgtccctttcatttaccctacctcattttccttctgtgttggcttgtggctggcattctatctgagagggcattccaaggccagtgagaaaccaaggataatgtgactgtgaggccctgtagaggccgtcagaacgcctgggttattgaattctgccattaatcagctttgtgacctttacgcaagcctcttaatctctcttggatttaattgcttcgtctctaaaatcagtaatgtagactatcctaactaatggctttcagctcatatcccataattcagtaaagaatttgaaattgctcatatgtatggtgagctggtcccacctccttggaaggtggcacagtaatgcagaataatcttaaatatcttcttatattttgacctggcactccaactcctatgaacttatctttaataaaaaattgccaggcacggtggctcacgcctgtaatcccagcactttgggaggctgaagcgcgtggatcacgaggtcaggagttcaagaccagcctggccaacatggtgaaaccctgtatctactgaaaatacagaaaaaaaaagtagccaggtttggtggcacacgcctatagtcccagctactcaggaggctgaggcaggagaattgcttgagcccagtaggcagaggttgcactgagctgagatcctgccactgcactccagcctggggcaatagagtgagacgccgtctaaaaaaaaagaaaaaattacacaggaacactaaatatggatgtgtgaatgtgtgaagttgcttattacaacttgtgataatgtggaggtgatggatattcactaaatgtatatgaatatatacacatacataacatagcaaatccaaagcagaacttaatgtctcatattagaagaatattttaattaaattatcaaagtgacaaaatgacatgcaatctttttgagaaaaactataactattcttaaaatatttagtagaatgttacatgaaagtaacaatctcatgtatgtgttttactgtggtagtaatgtaatggataaatcacagcagtaggtaaaaatgaagactccttttacaggtagaaatttggaggtttttttcaatatatctttaatactttattttctattaaataaaattaactctgaaatgtaggaattggaatggaaaagactatacataggattaggtatacctaggtcataaaagaacatgaggttgtgaattttaaagaggaggaaataaaaattaaaagtcgaattccatttaaatggtgaagaaatagaaatgtttggtctgaaaaaaaaaattcagctgtttatgtttgcctagttctcactgttttgctttatttatctgctactttcaactgaactcatactagcaaagctgagaatctgtggttgctgcattcttggtagttttggatctcatcagaaatcatctcctaattttcagactgggtatagaaattcctttttacacaagttggtatcattccacagaacaattttttctctccttctatgttatgaatttattttctgcaatgtaactagcagaccatctatatactattcacattaagaaactggttggactaagaaaaatgtttgaggtgatgaatatcccagttaccctgatttgaccattgcacatcgtatcaaaaaaaaaaaagtatcaaaaataaaacacattacccccaaaacatgtacaactactatatatcaattaaaatatataaacaaaaattcaattcagggattttttttgaagctaatttggactttatattttgacatttaaggaaatatactttgacattgtccattgcccagaataaattaaaaactttttcagatgataaaggtatttcatcagcactgagattattgcttatagcttcttgtttagtggtatgccatactttgattttggttttataaaattttctgtaaagagcattgagaagcctttcctcatgttgttgctgcattgtgtttaggctgtgtcttgagagaatggcatttcagattgacagctttcttcaggctgtgaggtatacagactttaggacttcataaagctgaagtatagatttttggggaagatattggggattccttgaactccaagagcaaatggtggctgctgcattctgagttcttgctcttttgtaattatacaagagtttctggatttggtgttttataaaaccataaatcttattttttcagctcacttgataacatagcaactttgtagaaactctagaaataaaaaaaaaagaacgcatgtcagagtctaccaaaataacactcacttaaatatgattttcattattagacagtcccctgaaggcatagacttctactcaaaagtttagagttgaacttgactatgaaaaacattggtctaatttatatgctgtgacaaaactagctttacaggcttcctttggccggaggcagtgcctgagaagggagttgcattagtattcacctcctgtttctaccatgggaaatagaaaactagtaactcccagaagattcaggtaatttgataggaagtattgatccatgtatcaaaatctgtacctgcacattcactctgcattagctgaaccatcatcagagacctctctgacacagaaagaaaaatgatttactgaatttagcgaggaaagcattactcaagtgtgttttttctaaaatctgaaagctaatggcgttcacataccatgatcaccataatagaacattttcctcatcaacaacaataatgaaacaaaccagatgttctttgcttaagaacagctttctgggggaagtaatgagatgttctacttctgcttgtgaagccagtgttctttcccagcagggaagggcctcatcttgtctgggtgtgtttgggatgggggtggggtgcttaggacaagtacttgatgtggagcagagcagcaggaattccgattggaccagctcatgctctgattatagctctgtgtgtggttccaggggaactctagttcagggagtatctggtactgggtctgctgtcaggtgggacaaatggcttagtgtttgtgctttgttttgtttatgtttgcctcccttctcatttattaatgcacatgagaataggcctgcttgacaggggccgttgctgtcattgcttaggatttattagtcaaaaatctggtgatactagttatcttggaatgactattccaaagcacagacaaggtgaccattttgtgcccaagaaatgtaggcttccacaaggaagtgaagagtgaaaaggataaagtaactttttccctcatagaaattaatctatattgatagaggtagttttacctgagtggggtaaagagagactgctggagtgagtgctggcaatgttctcgatatggatagtgatgtaagtatttacatatctagacatacatcaaatttctgtgcccttaggaccgtgtactttaccttaacaacttaataacgtctgttaatcctatagctgccatacaaagcagtccctgcatgttgctgaatggaaatgtgggcataaagcattcaagtaggaaaagctgggatttaaagggtgttccattcctggctatttccaaagagcttctgttcatactggtgggagatactgatctctgttcatttgttcattctttctttaagaatctgttgagcacccatcctatgacagcagtgattgtgggcaccatggatgaaacagtctgagacactaaccttgtggtgccaaggctattattgctcttttccctggtatcatcagtaacatgggagcctaattcaatttagcagacatttattaagcatctatgcacaagacatggtgtcagatgtaggaagctatggctcctgccttcagggattttgtaatctagcagagaagttaagctttgtccaaaaatacttatataatatgaggctttgtgataagtggaatgttgcattaaggagatgggacattttagccaaagaaggctgagttttcctgtttgtcctcattctaaaagatacctggtgtttgtgtggaaagggcttcctcactttccttctccttgaccttaatatatagtctctcatcttattaactcattctgtaccactaacccatgtcttgtctgtattctctttccatcttcctccatatacccagagtggtgactgagtggagttgggaactaaagatgatggtggagagtcatttcagatctttcctccatcccttggcccaatccacccatggattgctgtaaaattacatccttaatcctggccagcagaacttaaccaccagatgttgatgtcactattccttcattaccatttaaccctttcacagacgacatgattgctcagaccacttgtccttcccagccgccccatttcacccttctctgcaccacttgccttactttcaaataccagatgagtattactgtaccggaaatgtcatttttttagacgtgtctttcaattaaactgattgtaatcagtttaaccgatttgttcttgagagttcttccctggcttcccatagaaactgcacggaacaaagtccccagcttttcctctggacgttagcaactttgacaaaggcaaatgaagcataaaactgtcacctagtctttagacttcccactgccccacatattcctgtcccaggcagctggatgcatggcttcctcagggtttgctaatgtagcatcacgtacatagaatgaccgtcctcacctttacctaaaacctaccagcccaggttctttgtggatcccctcaccattgaacacctataatgttaagccctttaaatctctattgtataggttggaaggttgttttgcatatatgtaaagcaccttgtttcgtccctgagccacgagaggtgttcaataaataggaattatcattattatcatacggtataattcagtacttaagtatgaagtatcatgtctgagtgctttcatatcaaatttatttccatccagttttgtaagctgctcacagcagggcctcataccccgcatgaatctcctatagcacttgatatccagccaaatagatggttcatacttgagtaatggaataaaaaaaaaaaagccactttgctattttgtaataattttgttaaaaattttttggggaaaacaactttaatgactaaaatcaagtatggtatagtaattaagtgagaattctcattatctcttgttaccccatttcccattactttgcctttttaaaaaatgtatgtggaattagcagtaaaaatgatctactgtaggcagggggcagtggcacacaccataatcccaggtctttgggagactgaggcaggcatatcacttgagcccaggagtttgagaccaacctaggcaatgtgacaaaacgccgtctctacaaaaaaatataaaaattagccagacactgtggctgaggcgggcaggtctattgagcccaggaggttgaagcagcagtgagctatgatcgtgccactgcactccagcctgggagacagaatgagaccctgtctcaaaaacacaaaaaagatctaccctcagaatgttagttctgaatagttggttagttgggaattttccagtatttttgtcttttgtcttgtgtttaaaggagagtgtgtgtgtacatacacatatacatgtgtgatctggttagtgaagctgtggtggctgatatccagggtcccatcactaagaagtgagtgaaggatgcttcatgatgtctccattactacaatgttaacagagtaatcagggagtatcagactgactcttgggccctcaaaatggaagatcaggtattcttgcctctccctggcacagcacaagctttcctggtagtataatgaaagttgcagaatggagcataaccattttagcatttcacttgccctctctttccagcgtacagtaaaggcctatattgcttaggagcattaattgataatattctaggaattgtgcttataatgacttacatactagaggacacttagtgaaaacagcataagaaatgtattctgtttccacagctaatagccttgttgtgaattgtcaggatctactttgtggatgcatgttcctctccatagcagacccttgattagggggttaagagtaaatgatgtggtatcataacacagtttcttaataggatgcatgatgttcagtattggcggaagagttatatttggcactagctattagatccgaatgggcggaggtaataactataccgcagtgttctgcccacgtgtgtgtatgtgcatgcatcactgctatctgaagcatgaagcaagaactagctctgtttactttgttcctcctaatcacagccccttccatcctcacctcaatttttacttaagctagtacttgaagctataaagaaattgataaagtgatacttcgctaattagtttgatttcttgtgaattataaaaaaaactgtaaaaacaaaattaccaaatgctatgggatacaacttgagtgaggccctataaacctaatttataattttgttgttgttgttgtcgggtggggctaggcaggaaaatgattccccacttaccttttcttattagccagttgtttgactttagagaatggactcctctagttgatttctatgtagtacaagaagtgttgatagcatgatgttttgtcaaagactagcaagattctgattactgaatgctaccaccaaaaatgcaccattctatacatcacttattataactattgtagccctttagatgggagtgtagaaactaaaaatagagtttacgtcttgataccagttgatcattattgccatctccctcaggagggagaattcctttccttgcgtttttcggctcacagtggctgcctgtattccttggctcatggcagcttcttccatcttcaaaatctatcactctaatctctacttctgtcatcagttcgccttctcttttgtagtcaaacctccctctgtctcctttctatacgcccggataatttcttcatctcgaggtccagaatcacatctgcagtttcttttgccatataaggtaacattcacaagttccagaatttaagatgtggatatctttgggtgccattattcagcctaccataccatgccggtctcctactggtgtctcctgatctctgagaaggcattcgctagtatatccagagggaaatgccattttgttaagaactgatatagcataaaaatctttctgtggaaaggtcacatattctttatccttaaacagcttacaggctaataggagatatgacttgcttgcaagtatttttggcatcaggcagcacatggtaagtgctgtagtgatgatgaaaatagatgtctaggattacagaagggggagggaggatttcagatagggtgctcagggaagtctgaactgagcatgtgactgaggatgaaggaagcttcagctcaggaagatgaagaaaggaggtgaaggggaataatagaaagtggtaagtctggaatgtgggaagagttgtgtttggggatggggaagagaggaggcagcagatatgagaatgatgagaggcaagtgaggcagatgaacaaaggtggggtcaagcattcaacttctgtttagtagggaaagcataaagaaatgacagatgattgagctggagaaaggaaagctggtcacagtgtgcagaatgaattaaaattcacaaagactggaggcaaggagatctgtgttagccactgcagcagccatgctccttgttgtccctggcattggtccacatgcaggtgaaacagcttcttgtgtatcacttggagattttgttaggcatacccaagaaaagtcagctgacagccagtttcaggcaggtaaaccatttcctccttgttaggaagacttaccaggcactgaagaggtaagactgaacttaaaaagagaaagaagagataagcaacatgttctcaacgtattaaaagtaacttctaggctgggcgcggtggctcatgcctgtaatcccagcactttgggaggccaagatgggcagatcacgaggtcaggagtttgagaccagcctgaccaacatggggaaaccccgtctctattaaaaatacaaaaattaggcaggcatggtggtgcacacttgtaatcccagctactcaggaggctgaggcaggagaatttcttgaacccgggggcggaggttgcagtgagccgagatcacaccactgcactccagcctgggtgacagagcgagactgcatctaaaaaaaaaaaaaaaaaaaaaaaaaaatatatatatatatatatatatatatatagagagagagagagagagagagagagagagagagagagagagagagtaacttctaaaaggggagaaaagacagaggggaattttttaaaagatttattctgttctccctccatcccaccttacccaagaagaatgactactcactaactggcaaaactgtggggttttttgtgatttccttttcccacagagatgagaaagcactttttcatttagagtctctaacttagcaggagaggggcgaaaagaggtacatccatattttaatgaagataatgaatatagttttttgagtttgtttttggagagggagagaaaaccctgttccttattttgcctttttaaaaaagttatgcttagtataaaataaaaataattttatttaaaaaaatcttttaacttatattttaggtttggggctacatgtgaaggtttgttacagaggtaaactcattatcacaggggtttgttgtatagattatttcatcacccaggtattaagcccagtacccaatagttatcttttctgctcctctccttcctcccacccaccaccgtcagggaggccccactgtctgttgtttccttccttgtgttcataagttgtcatcacttagcttccacctataagtgagaagatgtggtatttggttttctgtttctgtgttagtttgctaaagataatgatctccaggtccatccatattcccacaaaagacatgctcttgttcttttttctggctgcattgtattccttggtgtatacaaaccacattttctttatccagtctgtcattgatggctattttggttgattccatgtctttgctattgcaaatagggctgcagtgaacgttcacatgcatgtgtttttatggtggaatgattcatattcctctgggtatatacccagtaatgggattgctgggttaaatggtagttctgcttttagctgtttgaggaattgccatactgctttccacaatggtttaactaatttgcactcccatcaacagtgtgtaagtgttcccctttctctgaaactttgccagcatctgttacttgttgacttttcaaaaacagctattctgactggtgtgagatggtatctcatcatggtttttatttgcatttctctaaccatcagcaatattgagctttttttttcatatgcttgttggccacatgtgtgtcttcttttgaaaagtgcctgttgattttctttgcccactttttaatggggttgcttttctcttgtaaatttgtttaattccttatagatcctgcatattagacctctgtcagatgcatagtttgcaaatattttctcccattctataggttgtttgtttactctgctgatattttcttttgctgtgcagaagctcttaagttaattagatcccacttgtcaagttttgcttttgttgcgattgcttttggtatcttcgtcatgaaatctttgtgtgttcctgtgtccaggatggtatcacctacgttgttttccagggtttttatagttttgtgttttgcatttaagtctttaatctatcttgagttgatttttgtatatggtgtaaggaaggggtccagcttcagtcttctctgcatatggctagccagttatctcagcaccatttattgaatagggagtcttttccccattgcttgtttttgtcaaagatcagatggtcgtaggtgtgtggccttatttctggactctctattctgttccattggtctatgtgcctgtttttgtaccagtgccaggatattttggttactgtagccttgtagtatagtttgagatcaggttaacgtgatatctccagctttgttctttttgcttaggactgccttggctattcaggctcttttttggtttcatatgaattttaaaatagctttttctagttctgtgaagaatgtcattggtagtttgataggaataatattgaaccggtaaattgatttgggcagtgcagccattttaattatattgattcttcctatccatgaacatagggtgttttgttgtttgtgtcttcactgatttctttgagcaatgttttctaattatgattgtagagatcttttaccttcctgtattccttggtattttattctttttatagcagttgtgaataggattgcttttttgatttggctcttggcttgactgttgttggtgtataggaatgctagtgatttttgtcattgattttgtatcctgaaacttttctgaagttatcagctgaaagagcttttgggccaagcttttgggttttctagatatcgaatcatgttgtctgcaaacagagatactttgatgtcctcttttcctatttggatgccttttatttatttcttttgtctgattgctcttgcgaggacttctaatactgtgttgaataggagtggtgagagagatccttgtcttgtgccagttttcaaggggaatgcttccagcttttgcccattcagtataatgttggctgtgggtttgtcatagatggctcttattatttttaggtatgttctttcaatacctagtttactgagaatttttaacatgaagggtgttgaatattatcagaagccttttctgcatctgtttacataatcatgttgcttttgtctttagttctgtttatgtgatggatcacatttattgatttgcgtatgttgaaccaactttgcatcccggggatgaagcctacttgatcatgatggattagcgttttgaggtgccactggatttgatttgcacgtattttgttgaggatttttgtgttgatgtttatcaagaatattggcctgaagttttcttttgttgttgtgtctctgccaggttttggtatcaggatgattgctggcctcatagattgacatgggggaagagtttctcctcctcgattttttggtatagtttctgtaggaacggtaccaactcttctttgtaatctggtagaattcggctgtgaatccatcaggtcctgggctttttgttgttgttgttggtaggctatttattactgattccatttcagagctcgttactggtctgttcaggaaatgagtttctttctagttcagtcttggcgggtatatgtgtccagaagagatgtgtccatctcttcttggttttctagtttgtgtgcgcaaaggtgttcctagtagtttctgatggttatttttatttctgtgggggtcagtggtaacatcccctttgtcatttctaattgtgtttatttggatcttctcttttgttttctttatgaatctagctagtggcctgtgtatcttatgaattttttccaaagaaccaacttctggatttgttgatcttttgaatcatttttcatgtcttgatttcctttaattcagctctgattttggttatttcttgtcttctgctagctttggggttcatttgttcttgttcctttaattctttcagttatgatgttaggttgttaattttagatctttccaactttttgatgtgggcatttagtgctatgagtttctctcttaacagtgccttagcagtgtctcagagattctggtatgttttatctttgttctcattcatttcaaataacttcttgatttctgccttaatttctttatttccatgtaattgcatgattttgagcacttttcttagtgttgacttctgtttttattgcactgtggtccgagcttatgtttggtatgattttggttcttttgcatttagtgaggattgttgtatgaccaattatatggccaactttagagtatgtgctatgtgatgatgaggagaatgtatattctgttgttttggggtggagagttctgtagaactctatcagattcatttggtccaatgttgagtttaggcgctgaatatcctaatacaaataattttaaatatactttagttgtatggtacttaggggagagaaggaaactgattttagagaaggatgggtcgttagctgcagcagccttgggcttcctcagcatactgcctcaagctgtactgtgcttatttctaaagtgtgatgtttcattgatcctctccctggccctccgaggtctgtgttattactccacttaaaacagaaggaaacagtctcagagaggttatgtaaccttaagtgacagagctggcatcagccccaggtcgtgggcttccttatccacattcatcactgtcaaatggcctctcctggtaaaaatactccatctcagcgtgaagtcaacccctaaaaaacaaaccaattccatgatattgtattacgtcttaatgtggattatttatggcaggagatgggaaaggaatgatttttaaaatatttttagcctttaaagtatttaatttctactaaaattatgtagtatgcagtgtccagaaattctccttctgtatttttttaaccaagaaaagctttggctgtactagaaagaataatatttcactttgttatgggaaaggtttgctttatccccccgtagcagctctgttttgccactggtagacctaagtgctatcaccccttcctaccttggcttacccctctgattacacaagtctttgttcacattccatcctcctttctcttccctcccctcctccctctgggctatcccaagtccctgccctcccctaccccatcacactctttccccctcgtagaggactctgaagagtctgtgactgtacttgtcacagggttccctatttgcttccccaaacttactgtaagcccctcaaggatggttcctggatatcaatactctataaatagttgaactagatctgctttttatctaggaggtatatgatattaaactgatggcatgttaagtaaggtatattgagaattgagacaaatttaacaaataggggaaaaaagaaataggtaagtgagacttaaaaaaaacaaacacaaaaacaaaggaggagctgctgttccacgtagcagtgctttacctgtagctgctcacttgctccaggtttaattctgacatcaggggaatagatagctgaagccaaagaaacctctgtttgggtagggtctggtatatcctgttttttctttttgctttcttgcagacactggagttggtgtctcatgagaggaggggaaggacaggaatcacaaatgcctgagtgtccaacagtcccaggagggagctggagggaaaggtggctccactctgttactgtctgtccgttcaccagcacatcattgacagagcttgggaatttattactacaaccttccctcctgctctgaacattgagagtggctcatcaattgttaaatcctttacatttctttggccctaccaacaaatactgattccttctttaaatgaaatagcccaactcctgaagcctctaaattactaccaaattaattcatagagagatcttcgtgcaacttgaagtactctcccagccccctttgtctatttattacactccaaaggcagtatctgattgcttttatctatcttatctgacttccggtgaattttttttttttaaatgaaatttgccagaagtccactagatctgcgctggtggcagctacatggtgcattcatataccccttcaattattattaaaatctttcacagtatttctgtgcagttttgaatatgcattttgtttttcctactgtcatacaatattgtctttataaaagcatcaacaattatttgttttcttatatcccatttttatcagcattactcttcttgaacaatatagaagtaaaaagttttccttctgcttttaggattgtggaaattctgtcagttggagagtgggcaggagtgtgaggggtagctttgaggagattgggtggtgagagaaagggaagtcaggagagaaagtttctagttataaatgaatgaagaggttttcttgaggcaaacagtaaatctgtgctgaaatttttcttaaatggtgataattagattttctaactttttatatacaggaacacttgagattacaaaggggtgtgcagtgatgcatgctacagtgggcagtttggcatagcaatcttagctccatttttacctgggttttcatgtcttgtgaaggtagcagttcctcctccttttcttgtttagtcactaaagaaggatgaaccattagaaccaagccacatgtttattttccaaagtagtcatttatgttcatgttaactgtatcctctgtagcctttgggacaattatattacacattaattctgtgaattaaagcaaaggggaaatagaagattgtttaagtaactgtattagttcgttttcatacttgctgtaaagaactacctgagactgggtgatttataaagaaaagaggtttaattgactcacagttccacatggatgaggaggcctcaggaaacatacaattatagttgaaggcaaaggagaagtaaggcacattttacatggtgcaggagaggtgtcagggggaaccgccagacccttttgaagcatcagatctcatgagaattcactcagtatcatgagagcagcatgggaggaaccaccccatgatccaatcacttcccaccaggtccctcccttgacatgtggggattacaatttgagatgagatttgggtggggacacagagccaaaccatatcagtaactttaatctgagccaggcctaacatacgtaagccctcatcactttttccaactatgtatcttttgaaagtgtggctagtatctcagttaccaggcagttcataaggcaaggccctgctacaatagtgattgataatttattagctggtaaagcacatgtgtgctgtgtgttattgtttacaaatctctttttcatacattatctctttctctcactgccccccacccccttttttttggcagcttcacaacaaccattacataattagaccttaagacttaaaaaaaaaaaagcttgtcagtattgtaaattgcagtcacatttgctgatgggctgttacgactctaatcaaataagcaaacttagttcaacgaaatcagtcattagggtcactagtgggtctgtggccagaagcttcactaatttcataattttccctccctgctgccagttgacctccggatttttgcctctgttcaagttggtactcaaaatattgcctctaaaaatggagtaccagctaatgataggaacaagtttatgaataactctaagtttaatttcaagagctaaatgttagttcagttactaatttattgcttgatcttagggattaagccacgtagccaacacctgagctgcgtttctttgttttcaatctgaaaactcaaacataaaccacataattcattaatggtttctaagtcctaagcccttagctgctaaataaataagtagtttttttaaagccaagggaaaaaagtgttaaaaaaaaaaaaaaggaaaaattaatgaattgttgttttttttttaacctttccttatattacttgtatttaaagcttaatcggatttgattatttgcaagtaggaaaaataagagacaagaataaaccaatttattactacatagtaacaacaaaaacatcctgggaaatctggccctttccccactaaggagctttttgcttctgtcttaaaaaaaatcacgatcttcctcatgcacatctggaagcctcaccaatgcacagacacgtgctctttcacattcattcagtttcattccttgtaaaagtaaatgaagagtcatgttgaagagataactaggatacccattttaattctgtggcaagttgttgactgtattctttttccatagacatatttgtccaacaatcagcatttatacgtgttgtgtattcaggtacatgaagtgaataaaatgcacatgaagtctagcttctctaaaggtagctgggcaatagtcttatcaggtcattggaagtagagtaaatatgaagcaaagtttctgttgttgtttttaacagtattgtcatgagtattaaaatcacttaaaggtctgcaggtccctccgaagaaaaatagaatatgctgactttgtgtttgtaaatgactatttttccaattgaaaccctgaagggaagagatttaaactcaggctgcaccccagtgggctctccacagctaccatttccaatggctgctccacttttcttgataggagtcatttttcaactagatggctctgacacagataatggccatcttgattgcatcagggaactattcataaaacaaggacattcaggcatacctagaattctttttttcctgtaacacaatgaaggattctagttctcctttcaaagagatttaagatttaaataccttatgttaaaattacatgacctgaggacattttctggtgtgctatgtttgtttaattatcttagatatgtgtgagttattgttttcaattatctcttccatccttaggtttatcagctccacgtgactgcctttaaatctccatttctattatttggctcccttcatttttattgctaatctaggacatctcttgtatggactgctgcagcagagaaatggtatctgctgccagcaacactaacaactgtgacagtaaaattctgccaaaaccaataatgaattggaacttacaaatccctgtcttagcaatatgccctgggacatggaaaatatttctctttaataaatagttggaaaatcatctgcttgaaagtgctagtcagatggccctttttggcatcatattaatattggaaagaaaggaccttgggctgagatgatgctgattatcagccattctgtaatgtgtctccctcaatatataatcttcctaatgaatttcaaagttgaaacttttggttttagattactaagcacttaaactgataaactgagattcctcatgcatctcaggaatcaaaagacatcagcacctaggaaaagaaattataagttgatatagtaatatcctatagaatattaggtaaaatgatttagattttgtttttagttattaaaataggtgttgctaaagtcaaggctataggtagtgtctgtcatgagggcctgtgagctgactgtatatttttttaaaatgtgtgtcgtaggcctggtgtggtggctaatgcctgtaatcccaacaatttgggaggccgaggtaggtggatcacctgaggagttcgagaccagcctagccaacatggtgaaaccccatctctattaaaaatacaattttagctgggcatggtagtgtgcacctgtgatcctagctacacgggaggctgaggcacaagaatcacttgaacccgggaggtggaggatgaagtgagccaagatcacaccactgcactccagcctgggtgacaagagtgaaactctgtctcaaaaaaacaaaacaaaacaaaaaacccaaaaatgtatactgtaattcacaaggtaagacctacagaagcacatagaatcttgttggccatgttgaatcatgttggccacaccagtgcaaaacctgctctaaatattctctggccatcggttaatagtagaattttgtacaaaagtaatattttatatcatgactattcgagtcctattacttgaagataaatgatgatcccaatgcttatctcatggttttatagaacacttaacttttacaacaaggcaatatagtcttattgataatctcaagaacactgtagtagatgaagtacctgaagaccaggaagtttgttttgaccaaggtctcttctttatacatctcatgtacaaccaggactttaacctaagccttcttatcctaagttagttgctaggccagtagagtacagtcatgcacaaaagcctttataaataaggacagtacttacaactcaacagcaagaaaacaaatagcctgatttttaaaagtgggcaaaggacctgaacagacatttatccaaagaagacataaaaatggccaaccgacatatgagaaggtgctcaatatcactaagcagggaaatatagattaaaaccaccgtgagataccacctcacacctcttacgatggcttttatcaaaaagaaaagagagaaatgttggcaagggtatggagaaagggaattctagtacactggtttgggaatgtagattggtacagccattgtagaaaacagtgtgaagtttcctaaagaaagtaaaaattaaacttccctatgacacagcaatccctcttctaggtatatatccaaagtagatgaaatcaccacctcataaagatacctgcactcccattctccttgcagtattatttacaatagccaagatatggaaacaacctcagtgtctgtcagtggatagataaagaaatgtgtatgtacacacaatggaatattattcagccttaaaaaggtgatcctgcaatttgccacagcgccagtggacctggagggcattatcctaaatgaaataagccaaacacagaaagaaaaatactgcatggtctcacttatgtgaaattttaaaatagctcaaatatacaaatacagagaataaaacagcagcgggtaggtgggtaggaggaggaaaatagggagaggtaagtcaaaggatacaaagtagcagatatgtagaatgaaccagtctagagacctaatgtatagcatgaggactgtagttattaatagtatattagggatttttgttaaataagtagatcttagctgcttttatcacatgcacaaagaagaaactgtgtgagatgataaatatgttaatctgcttcattgtagtaaccattttactgtctatatgtatcccataacatcatgttgtaaacctcaaatattacatgataaacttacgaaaaataaatacggatagtatgcattttgaccttcaagaggaaagcccacatctttctttgtgggcttgttgctctttagtcttctcaaagctttcctcctaaataggtcctagagggttaggaagagattctgcctggatggtggcagccacttattccaaggaagtcattgatccaataatgtggaacaggcattcctttatagggggttaatgtgttactatctagaaggggcctaaattaaaccttgtcagaaagcaaggctgttctgtagtaagctttataaattttttggtgaaagttttgtagcttttaactgatgtggtatgtgatattgtgtccggaattggtgggttcttggtctcactgacttcaagaatgaagccgtggaccctcgcggtgagtgttacagctcttaaggtggcgcgtctggagtctgtcccttctgatgttcagatgtgttcggagtttcttccttctggtgggttcgtggtctcgctggctcaggagtgaagctgcagaccttcgcggtgagtgttacagctcttaaggtagcgcgtctggagttgttctttcctcccggtgggctcgtggtcttgctgggctcaggagtgaagctgcagatcttcgcggtgagtgtcacagctcataaaagcagcgtggacccaaagagtgagcagtagcaagatttattgcaaagagcgaaagaacaaagcttccacagtgtggaaggggacccgagcgggttgccactgctggctcgggcagcctgcttttattctcttatctggccccacccacatcctgctgattggtagagcctagtggcctgttttgtcagggcgctgattggtgcgtttacaatccctgagctagatacaaaggttctccacctccccatcagattagttagatacagagtttccacacacaggttctccaaggccccaccagagcagctagatacagagtgtcgattggtgcagtcacaaaccttgagctaaacacagggtgctgattggtgtgtttacaaaccttgagctagctacagagtgccgattggtgtatttacaatccttgagctagacataaaggttctccacgtcctcaccagagcagctagatacctcaccgattggtgcagtcacaaaccttgagctaaacacagggtgctgattggtgtatttataatccctgagctagatataaagactctccatgtcctcaccagagcagctaatacagagtgttgattggtgcactcacaaaccttgagctaaacacagggtgctgattggtgtatttacagtccctgagctagatataaagactctccacgtccccaccagactcaggagcccagctggcttcacctagtggatcccgcaccggggctgcaggtggagctgcctgccagtcctgcgccatgcgctcgcattcctcagcccttgggtggtcgatgggactgggcgccgtggagcagggggtggagctcgtcggggaggctcgggccacacaggagcccatggagtgggtgggaggctcaggcatggcagactgcaggtcccgagccctgccccgtgggaaggcagccaaggcccggcgagaaatcaagtgcagcgcctgtggaccggcactgctgggggactcagtacaccctccgcagccactggcccgggtgctaagtcccccattgcccggggccagcagggcaggctggctgctccgagtgcggggcccaccaagcccacgcccacccggaactccagctggcccgcaagcgccgcacgcagccccggttcccgctcgtgcctctccctccacacctccctgcaggctgaggaagtgggctctggccttggccagcccagaaagtggctcccacagtgcagtgggggactgaagggctcctcaaatgccaccgaagtgggagcccaggcaggggaggtgccgagagcaagcgagggctctgaggactgccagcacactgtcacctctcaatataatacaatatagtaattaagatagtgtgccaagccagtgggctggacttttgagtcttggttctgttgtttactagatgtgtgacgtgttgcaaattacctaaacttctctgtgcctcagtttccttatctgtaaaattagataataattggacctacctaagagctttatcgttaaggattcaatgagcaatgcctagtcctagtttatactcaatataaataataatgtaaacatagtatcagtaactatacaacaggttttctcttttagggtccttgacgagatcccaaggaagtagatttcggctccccggcctggtcaaattttgaggcctctgttgcctttgcgttgttatgatagaacacattcagagcacttgtctgaaataccctggctttgttgtgattactccattattctctttagattgtaggtgatcctctctagtctctgctctgtgccaggctcctgaccctccacagaagagggaactctttgccaaggcatgggagtctgcacctagccagcaaagaccatagtcatccccagcgtcaggcgtgcttgatgaccgagtaaagcctcagatgacagaaaagtcaagcataattgtgtaaatagctaacatggattgagtgtttgcctcctttgactggcaatatgctaaaatttgtatatgtattattcatttatttctcaccaaaccctagggggcagataaggaaactgaggcagaaaaaaagtcaagtaattcgcctaagttcttacagcacattatgtgatggggccatcatttgaactcaggctgtctggttccagagccatgctattaaacaggtgtcccagtcttttacattagacgggccccctcagaaatgcttctgtgagttacatttggcatggtgccatcagcttctatcgggagcaattatgggaagaagtcttgtgaaacctgtcactggatatcgtgagaatatcaggataccctgtatcacacagtatcctctttgtgaggacttctaggagaaatttttctcagctctgaatgacaagaataggtaaattccctgagcaaattgctctgcttttatttcctagacattataaattttcttctttacagttgaccactagaaagctaataatcatatttgtatcccacgcttggtttgttattacgattttgtcaaccttgccttcagtttgtcactaccttcacttttcttttaattccatattttaaaagtcatttttaagttaaagttattaatgcatgtgggaaaatgttcaaatagttcaaaagaacatgaaaataacaaaaatctccttttctctccctcacacgatttcctacccctagatttttctctctagaaatctaagcacttcttgtatatatagaaatgttttatgcataaacaaatatatgtatgttattttaaataatggaatcatgctaatacacattgttcatcagattacttttttatttttaaatttctactttaactaggtaaattatcataagatgtagaaagaaaagaaaggttaagactaatccccaaccattatttcccatctcttcaatgtatccagtgttaacactccacatatatgtttccatggtaccttatcttagttataacacccgtttgatcatattgtctgtattgtctgttttttgtttttgttttttttttaatcacctaagccatgaactctttgcaaagttggatggtggcttggcttggtcattacaatgtccctggtacctgacacactgactggcacacagcaagcattcagtataaaattaaggcaatcacccagatggaagaacacatagatgaagaaattaatgccattttctttgtaggaaacattccattaaaaagctaaaattgatcctgagtgttgcactatgatgcaaaatcaagaaaacagattattttatactaaagagaggagaaaattcaaatggaatacaaacgtggaaatgtgcctggagtgagtgtatgctttctgttgccactataacagcaagggacatggatccttaagtgactgtggaatataaatgaaaattctctacatgtttacatggctggctgagaaatgtactcagcacaacgttcaacagatatctattgagcggcctgtatgtaggggctctgggttgagctctatgggcactgccatcaagttatgctttctgcccttaacctttcaaatataagagaatctaaaacctagctttacctccaatcttctgcccttcccacctctccaaataaaggagattctagagaaacgtctcaccttgtttaccatgccatgcctagctaattatcacctaatgaggcattgttttttcctgctttctaacagtctctctttgtttataagggccctggtaatgttttcacctagaagttgtaatgctttgtcacagtgatgctttgccttttcccaagggctgaaatagaaaaatgttttcacactcttctaaactctgtaagaaatacagaacaaacatatggtaagaaaaaatttgttccaaatatattttgaccactacctgtgactttttaaatatgttcactggaattaaaaaaaaaaacttaaataacatgtcttctttatgagaaaaacaatagcagtgccatcattatctttggatatccattttcctctaaaaatttcacacgatttttttgctatcgcatagtcttttttattattttcttttggcttcagtttggttttgaatccttttgaaaggaaaatttgtgtctcattttttaaaggtaagtttgttgcagtatggaaagaaaatatttggcccagaagcaatttccatattgatcatctctttcctagagtatactttggatgcattgaaatgtgatgtttaaacatagaggcatgataatgagaaatgcctcctggttttaatgtaacagaacaaagaagtgtgcattttatgtgcagacaacaaatccttagggattactatctggagtggcagcggggagcagagaggcgggagggggtggggcagttcatacacagcctggacaatctgagttgcttcttagcatcagcagtttagcagtatctgtgtcccaggaggatgtacatgtgactcaagaaaagggaaaaagagaagccaaacgaaatccaagtatagttgtatcctaagaatgaacatgttaggaaaaggcttatttaaactcgctatcattgatgttcctaattatatttttaaatggaatgaagattaggaaatcatttcaattaggcatgtaagattacctgctagactagcagctagagaattatgaggcctattaattataaagaatttcccaagtaccaaatgtaccattcgtagacaggctgtaatttgtgagttataggcaataagtggaaaggagcacagcgattcacataatcacatttttcatctccgacaaaacctttctcctcatttaaggttatgggaagacactttacatttcttatcttctgtttatatttcctccagtggttcattagtagttcagaggggtattgttttccaagagcaagtttaatgcctgacattttcgctcaagatagagaagtagatttttgtctttctctcatgcattcagggtaagcaatgtaaagttgacaggggtatttagctaagaatcactagcacctttgaaaactaggatccctggggagagccagatacacaaagtaacaagatacagaagcattaaagctgcctggctcccgggctccccactgggatgcagtgcaaatgtctgcaaggaatgctacttgcagctgtactggatggaaatgttacactggtagtgcattttgatagaaacgattctttcttgtattgctaagagtcaaaggataatttttagacaatttataccaaaagatttatgaaagtagattggcttacagacatattgcagtctcttttaaataagagtattctgtgttctaatagacggttgacagagcatcaggacagactattacaatactgagtgttcggtcataattatcttcagctgagacctttgaggcctggtataccattcaaggctgtctctttttttttttttttttcaaattctgtacaatttcccattcctataaacctggcatttgtttttatttttgctaattggaatatactttttctaaccaacttaaaaaccattttggagccaatacatttcacatactttgttatattttatattaaacaatttctggatttcatacagtagtcttttttggctagtgcaattgcacagttaaataaaatggagagaggaggggttgctgtaaaaggaagagtatcactggtgagggctggagacaggcagtgtctgaagggaacagctgtacctacaaagaccctggaaagggccaggcacggtggcttatgcctgtaatcccagcactttgggaggctaaggtgggtagatcacctgaggtcaggagttcaagaccagcctggccaacatggtgaaaccccgtctcaactaaaaacacaaaaaaattagctgggcgtggtggcgggcggctgtaatcccagctacttcgggaggctgaggcaggagaatcgcttgaacccgggaggcggaggttgcagtgagttaagatcacaccattgcactccagcctgggcgacaagagcgaaaccctgtctcaaacaaacaaacaaacgaaccctggaaagaaagctagacccagagagctggggtccagcagcctagcttcccacagcgtacaatatgtggtataaagtctttgcagcttcctgccaaacatcttgttggcatatagtaactacttagtagctattaaaatgattcatctttgccatgaagagaagtcaggcataaccaaaaaatatcaaaacaaggctgaagatttttctttttatcttatcccagtcataaatgaaagcctggaatccagtgtgaatggagcctattgttagacctttagtatcttggtaaagctaggacccgcttgagttcagatctttaggaggtttatgttgttttgcattcatttagcaccatgtggttctctccctttgagaacctgatgcttttgagctactgatttttcattcttgtttccaaatcaccatccagttaaacacagtgtatgtatttttttctttttccaaacttaaaaatgatagtacttttaaaaatgcattattagttcagttgatgattcatgccttttagatttttgaaattatgtttgattaaagattataaatttaaaatacacaaaaggtcataggaaaatataaaggcagtcaagcagttcagaactactactggaatgcagaatttaaaaaaactattataattttattttttattttttgtaaagaggggtctcactatgttgcccaggttggtcttgaactcctggcctcaagtgatcctcttgcctcagcctcccagagtgctaggattataggcatgagccacagagcccagcccctataattttaaattcacattttctatatagagattttgaaaactaaaattgggttgatttctttactatcattcatatacatattgtatcgttcacattatattgtactttgccttttcacttattatatggtatttgaaaatatttttcaacagttacataaaaaacattatgtagatccaccgtaggtattcttgtagtgttatatgtaatatatactttaaaaaaaaatctctaaatttttcttcagtcttaaaatctgttggaattggttatgggtgattttttgtttgtttgtttgttgctttgttttttggtctttggtagaatttgggtcagttaaaaaaaatggctgctcttcactgcttttcagtaatatgtcagcaactaacatcaattcccttttctcccagcaactatataaaaatgttgcaaacagaaaggctgcttctgcatttccattggagttctgggtgctccattcagccagataagtgggatggccattgtgtttcgcccttctgaacagttctgaacagctgctgttacctctcagagcccgttctccttttcttcttagctgcacactcagctgccaactcgacagcccctgccttacttgcagccaagggctaggatgttttggtggtgaataacatacatgagaagtgttgtggggaaggccttctgggtagtctcctcagaggcaagcaggaggcccttccttatctcttcctgcaccttccacacagatgtgatggcactagcagcttccttggatgttagggactaagtctacaccttaagagtggcagggcagtgaactgggagggttacaaaaaaggggtcccaatccagaccccaagagagtgttcttggatcttgtgcaagaaagaattcagggtgagtccacagtgcaaagtgaaagcaagtttattaagaatgtaagggaataaaagaatggctactccatagacagagcagccccaagggctgctgcttgcccatttttatggttactttttggtgataggctaaacaaggggtggattattcgtggttccctttttagaccatatagggtaacttcctgatgttgccatggcatttgtaaactgtcatggtgctggtgggagtgtagcagtgaggatgcccagaggtcactctcatcaccattttggctttggtgggttttggccagctcctttactgcaaactgttttatcagcaacgtctttatgacctgtattttgtgctgacctcctatctcatcctgtgacttagaatgccttaaccgtctgagagtgcagcccagtaggtttcagcctcattttacccagctcctatttaagatggagttactctggttcacacgcctctgacaggaagaacccaggtccctgatgacatcatggtactatgatacctgccctggatcactgtctccaggctttttacaaaacaaatgaatgcctaccttgtcttgagcttctgtttctttgagtttttctcttctttgcagccaaatctaacctacacaaacacagttgccacatcttttctaggatccttcaacaatcatatatgaggtttcttggcagaagtgaatggaaaggtaaatgaaaagatggtttttactggtaaacagccacaaattctacaagtgttcatttttcctgaagtgtatgagtctcttaaggtatttaaattttagacttcccatgatactagcttctgctctagcattttatgaaaaaaaaaataaggaattgaaatacggtgggtataacataagttatttaaacatttactaccaattacttaagtttttgcttagcaataattgtaataagaggctgcctttgctgactgagccaggtaagtgctgtttgtggaagctcgtcccatgggagatctcatgggacacacagcaccctcggatggtgggaactattgtatctctcattaacagatgaggaaatactccccagccctccctagtaacctaatctcccccttaaccttctcttcattttcatttttccaacatgctcatcaccttctctcttactgtatttatctgttgatttattttgcctgctctgcacagtaaaatagaagctctgtgaggccaagtatctttacatgttcactgctgtatactacatacctacaacagtgactgacatacagtagtcagtaaactctcactgaaataaaacaagattatgcaactagtaagtgaacgaactacagtttgagcccaagaggtctagctcaagaagttatatactctgaattattatggcatattatcttccaagctgctcacattttctgttggcaaagtgatgttattaaataacttggaggttttaagaatttttttaaaaaattagtagactgtgtgtgtgtgtgtgtgtgtgtgtgtgtgtgtgtgtgtgtagttttaggtttagagaaaaattgaatggaaaatatggagtattcccatatacccttcaccctgccatcatcaccccctgacccctgcactccccagttttcccttttatttacatcttgcattattagtggtacttttgttacagttgatgagccaatattaaaacactattgttggctaaagtgcatagtttacattaaggttcactcttagtgttgtatattctatggatctggacaaatgtataatgacatgcatccaccattacactgtcatggagagtagcattgttgccttaaaaattttcttctctgcctgttcatcccttccttcctccctagacctggcaaccactcatcttcttactttctccaaagttttacctttttcagaatgtcatataattggaatcatacaatatgtagacttttcagattggcctctttcacttagtagtatgcatttaagcttcttccatgtctgttttgtggtttgatggctcacttcttttcttcttacctctgaatcatattccattgtgtgtatataccacagtgtattcatctgacagacatcttggttgcttcaatattttggtataaacatttatgtgaatgttttcatgtgggcgtgagtcttcagttcatttggataaataccaaggagtgtgattgctaggtcaaacaatattcattttcactgtgtctttataaagggcctgcattgagaacccacattgagaagcagtttaaatttgagtgaggcatgcatgagtggtgccacgtttcctttttcaggttctcctctcttggagtctcctaaaaccatattccaatgctgtgtataaaaggcctgagatattcataaactaagaagacactgtttctcaagggctcaaacgagttctcatgctgtcagcatgtcataatattaataatgcatatcttgtgtttatattgtgctatatcatgccagttaagaggtaatctacatacatttgataatctttgttaattctcaccaaaaataagatttatgtcacaaaaagctggcaaaagttttcacatatgacatggataaggctcctctgttttctacactatagcttgtcattattttattttttcttttcattataaattaagcaaagcaatatatttcggattgggattttctgtgtttaacaggtggatgttccatgctgtcctagtgacatttagaaaacctttaagcaggaaaaccccagatcttatctgcccgtgcactttgtcagtttcttgcacaggcgagggtgaacaagtagcacagcatctcagttctgttttataggtaaagtggccattgtgttctggtggcttagagaggtttcctgtagtgcttttctttatccacccaagcccagccctgcctcttgagccttcttccatgtcacactctcctgcctgcctttaccaaatgtgagctatcaattctgcactcgatatgttttgtcacatgaaataaaagttatcagagacttgagtgcatttgttcctcttttcttatataaagctctctgcttctgttggctattaggcggctttttttctatctttttttttaaatatgttctctctaatggatgacactactgcattattcacccagccctgacaactcggagtcatcattgattcctttctgtgttccagataaggaaaatggaggaagcaaaaatacaggtatcgggtgtgagcctccgttaattaagtattggtgtgcttatcagttttaatttactacatccaagataataggctagaccttcaaatagttctgtctagtatgggaggcagacaggtgaacagatatttaaagtaaaatggatacatattgtgaaagaaatatgcatggagggaccttctgtgaagcttgtttgggggaacctctgaacagtcatgtgtgacttgagcataatatttgtatttggtggggccttgtaggcagagacagagatgttaacagacaaatctgaaaaagtaggtggagggcagatcgtaagttgtaaatcgatttgaggttgaaatcatgataaggagcccgggctttattgagtaattggtgtggaatcaacagatgtttttcaaatgcagaagaacaagtgaacctggattaccagcctcttttctgattttcttcttgactttgcattgtatcccataggtaatctcaaatgttcttcaatgacaaaaccaaactcattctctttcctaaccccattattcctactctgattttcctcatcttatttatggtctcaccatctgcagcagtcacccaagctagagatcttgggatcatatttacctcctctttatccattattccatggtcaacaagacagcatgtcctaaggagtccttctgtgaatggagctttagttcattgcttgcactccatttccaactctatcttttttttttttttttttctggagacagagtctcattctgtcgcccaggctggagttcagtggcataatctgtactcactgcagcctctgcctcctgagatcaagcaattctcctgcctcagtctcacgagtagctgggattacaggtacctgccaccgtgcccagccaattatttttcttaatttttttagtagagatggggtttcaccgtgttggctaggctggtcccgaactcctgacctcaggtaatctgcccacctcggcctcccacagtgctgggattacagctgtgagccaccatgccaggctgcaactctaatcttttatcaatttagaagtattaaactatgctaattattatttagtatacagagctcaggtgaattattttactttattgcttcagcatatggggctgaaatgttattagattttttttatatgctagaattatacatatgcatgacttttgagatattgggggaaaatgtcagtgcattagaaattcacaggatgggtactgtaaaccattgaaatctttatctgactttgtatgtccctcgctgttcctctctagtacattagttaggattaggtctggaacacctaacagtcaatcagtcatagtggcttaaacaagaaaaaagtttatttctcatgttaaagaagtctgaagtctgatatgatggttccattatgttattaaggatatggggactctctgtctttatgctctaccacattggtacacagcttctatcttccagattatttcctggtgcaagatggctgctggaactccagccagcacatcaatgaaacaattccccaaaaggaggaaaaggtagatagctaaaaagttgttatccagctaagtcatctcttgttaaacagcctttatggacattccacacaccattttcacttcatagaccagaactgagtcacagggccctatctaactgcaagaaggctgagaattgtcatctttgctttttcaggagacagtatgttcaacttaatgttggggttctataattatggaagagaagggagaatgatgttggtgtaggcaattagaggaggaggacaagcagctctgctcaagatagataaagccaccctcttcatactgagcaaaataaacctgttattactggtattattgggtgtctcatgtctcagatacccaggaacttgtaagttaaaaaaagtaaaagtgattctcatatgacaccttagttgaaaatcattgcccttgtgaatttatagcatttgatcaaatgtttcccgggaataacaaccactgcataaagttatatactcgcaggttactctgagacataaattaggagattgtcataagaactcatatatcttaacatacacgactgtgtcagaagaatgtgttgtataggaacagcagattttcttcaaagaccagaatgattagacacactggtcaaacatattgaagaattaagtgtttatcatatgggtcttggatgtaaaaacagagcttcagaatcctgattatactatcagtatactccatcggattcatttttgtattacttactttgttgtcttctgttatcaaaacatgttgcaattggggtgatctaaagaataaaatcaatgacatctattcctacagtgtttttacttttaaaattcttgctctttttgacttcataaaacttcatggataatcaccatggctatcttatagagcagagaattgaaatagaaaatcacactattttttaagctgataggatgtcaatttaaatgaaggagtagttaaggggttcatgcagaaaaacagtcaatttgtctgcattttttccctttcattttccaacttaccagagaataccagcctcgtgagaaatctgaattctagtcacatccccttcccccaccacctaggtctaattatccccatcccagagctctttccaggacccatgaattagcaaagactgcacctaaggatgcaacttagcactcacaaggtgacacacaaacttagaaatggagaaagcagtggtgaactttttgccagttaaaaggcaagtttaccttttgtcttctcttattcatgccttctttcctctgtgtggatggcttatttatatataaataaaggtagaaactagaaaacgacatagtcaaaacagaaaagtgaaagttacaatgatagtgatttccttcaggcttttgctcaaaggtcactacttcagtgatgccttcctggctatgctatcaatatcatcttccctgcacaccctctgacatttcatatgcccctttcctgctacctgctgtcctccttagctttcattatgttacaaaatactgtgtatttttgcttatttctcttgtttactggcagtttcctccactagaaaataagttctgtgagagcaatgattttctgtctgtttggttttgttcactcctaaattcctagtacctgtaacgctgcctggcacagagcaggtgctggatacatgcttccccccccccccccagacggaagcttgctctgttgccaggctagagttcagtggcacaatctcagctcaccacaacctctgcctcctgggttcaagcgattctcctgcctcagcctcccgagtagctgggactacaggtgcatgccaccacacctagctaatttttgtattttttttttcagtagagacagggtttcaccatgttggccaggatggtctccatctcctgacctcatgatccacctgcctcggcctcccaaaatgctaggattacagacatgagccgctgggcccggccacatgcatattcttgaatgagtaagtgagaatactttagggacttaattgtgccagcgttcagtttgattatttttataccacttgttaaagtggcgtcatttaaataaatataatctgaagcttaaggaaatccatggtatagctagttacatcttgttactattggagcttgttatagatgccaattttccctatatttagacagtttttgattacttcctgtttagactaactgtaattttcctcttcttgggtgtcctcttagtttttccaggcacaaaattacagtgaatcgtgagtctcattataaaacagtttgatattacaatgagtggatttatttctatctttggttaaaatttgtttgctggcacagtagctacatataatacaatcctattatactgttaggtaaaagatatctgttatttctatttgcaactcatgatatatgaagatggggtcattctttcaggatgtatgtcctagactcagaagctaaattgatacattttcacccagcttatattataaaatatgtatttattgaataggtgactagtaatatttaagcactccaaactaggctatttctatacagtcgaaaatatttttatggtggcaaaaccccttcaattagagtatcttagaaatgctagttgaaggtctaaaatagcattgtcatttaactcaatgatgcatctattaagtggaattacaccttagcttcatataagttttctagataatacttctcaaagttgatggaacagtgtgtcatctcagctcaattactaaagttgtttcagttggagtgagtacagtgtcattgtctcttgcctgtttcccgtttaatggttgcctcatggatacattctgaatcatagcccttggaagtatagattgaagttatgaagtcatttgtataccttggcctaaaggctgatggctccagctcgtttcaacttcatgtccttttccaacattgccagtttctagtacagtaataatcttgtttttcagttgtttgcacaggcaggttctgaaaagtatagtatatatacctgaagaatcaggtatttggcaagtaataagtgaaaccccatgagaatatgagcctaactacaagaatgtaaacattattgggctaatattgtagacatcagcgaagtcagaagtttattaggtgttggggtaaacaaaacaaaaaagcgttccaaaaatacaacagaagataaagagaggcctaattctacttagtgtgttctacttcatagatataggttggtcagtggtagactgtggctacttggccatctagtttttatttccaagtaaatggagaaataacttgagatcacattttctatatcatcctagtttcattaatcaccaaggctttctgtctcattgtttttaagagctctcttgattcattcagagagaagctttatcttatattcagcaaatctcttctgtattgctggttcagcctcttgacatagttcaattgcattaatctatcctacttgtatcttgcagctcctcccccaaaaaatgattacacaattttggaagatgagaagctgggaaaacagcaaaacaagcttgattaaaatcagaaactgattatcaaagcataactgcctagagatcaattccttccttgtaattaactgaggaactcaaaggataatttctctatcctaaatcaggagataaacaataaataaggatgtgctgtttatttgaaggacatagtttgaccagttgtcttattagtattgagtaatgataaaccaaattaagatttcattctgaattctaatatatgaaagtagctatgaagagggtgggtattaatttcctaaattattatcatcaaattttcatcagtgtttaattcagaaaattttattttttaataccaaacataatataaaactttagcctcacagatagaggacacattgagaagcaattactcactttatgagttttactccaacattacagaattgcacaaaatgagctttttattgtcctgattacgaataatgccctgattgtgtttaataaaagtggcttaatattatcagtgattcaaaagtctaaattacactggataaattgggttattaccaaaaaaaaggaaaagggaggtctccctatgatgtcaagtttccattcgtggggtcggtcagtaccacggtcagcatgacaaaccaggatttgtcttttgggagaaaaatggtggtggtgaaatttagggcttgaagtaattctagaaattatttggtccagcctctaattttatacatgagcagccagatgggagaattggcttactcagtgtcacccagctggctaatggcaggctaaggcctgagagtggggctccagtgtcctttctggtttgctcctccctattccctgctttttcagtaattgcagggattgggaaattaaggaacttttgtctctctactctggattcctctgccattcattcaggaggtgttcactgcttaaataatttaatgttgccagtatttggctgctttgcacgtgtttgaattttgtattttcctgtagcattctcaaataataacagcacaacaacattttttcttttaatatattcacttatgtaaaatatgtcttccatggccatatgcgatcatttctagacagcagatgactaggagtttctcctaggatatgagtttgggaaatacagaactgttaatatgtttggagtcatgattcatacaccgtgacctgttacgtatgggttttcagatgtagtaaccaggcataatgacaagataacattttaaaaagcaagtcaaatttcatgtgcaagaaaagtcaagccgagagtgtctaagatgtttttgagagagagagagttggcttttcaaccttttcctatataattgcttcaaagtgtcctcaggatgatgattttttagaatagttagaccttaactcaacataaattcatttttaaaaatagatgacttgtgaaaatcctgaaggttgattaagctgtattatctcaaaggccatcccttttcctcttccacagctaaggattgtctaattaaacttctgtattgctaaccttaacaaaaagagtcttcccacactcaacttgatttgactggtttttggcttcttgatactagttttggcttttggctaggaagtttgagggagggtgtacattaattgggtatcggatactattgatgtgacattgcacattctgaatattatttatttggcaaatatatttgaaggaacttacatcttgagaactggagttcttgccatatgtaccttgaattggtcaggatgaatcagtaatgtagcaaagaaacttagcggcacagtggcttaagggacagagaagttcatttctgcctcgtgtcacagccccactctgaatggcctaggccagcagagcagctcagctccacgtgatattcagagacgggtttttttcttttcttgatttgccatccttgggcagtggttctcagactttttggtatcaggaaccctttactcttgtaacaattatacaggatcttaaatagcttttgtttatgttattgatgttagctatttgtcatatctattggtatttattgtataaacaattaaagttgaggaatttacattaccttatttatttatttatttatttatttagaggcggagtctcgctgtgtcgccaggctggagtgcagtggcgtaatcggctcactgcaacctccacctcctgggttcaagcaatccctctgcctcagcctcccaagtagttgggactacaggcgcacaccaccacacctagcagattttttgtattttagtagagacggggtttcaccaggttggctaagatggtctcgatctcctgaccttgtgatccgcccgcctcagcctcccaaagtgctgggattacaggcgtgagccaccgcgcccagtttacattaccttatttaaaaataacaacaataggccgggcatagtgactcatgcctgtaatcccagcactttgggaggccgaggcagttaaatcatttgagctcacaagttcaagaccagactgggcaacatggtgaaaccctgcctctacaaaaaacacaaaaaattagctgggcatggtggcatgcacgtgtagttccagctacttggggggctgaggcaggaggatggcttgagcccagggggccgaggctgcagtgagccaagatcatgccactgcattgcagcctgggtgacagagcgagaccgtgtctcaaaacaaaacaaaacaaaaaccaaggacaacaacaacaacaacaaaataataataaatgttttacaaggtaacataaatgacatttggaaaaaaataactattttgtttcttttttttttgagatggagtcttgctctgttgccaggctggagtgcagtggtgcgatctcagctcactgcaacctccacctcccgggttcaagcggttctcttgcctcagcctcccaagtagtagggaatacagatgcgagccaccatgcccagctaatttttgtatttttagtagagacagggtttcaccatgttggccaggatcgtctcaatctcttgaccttgtgatctgcccacctccgcctcccaaagtgctgagattacaggcgtgagtcactgcactcggccaaaacaaccattttctaaaacaaaaaatcagagatttttgcagttcttcttaatatatggtttagtagaagacagctgggttcttattcctatttctacattcagtctgttgtgatgtgttgttttggttgaagtatgtgaagaatacctggacttaaagatatgtagttgggaaaggtagatgtatcttaatgtgttttccagaaaactataaatattcttctttgatagtatagcaaaagtcaacaagcagtctttttttaatgtcagtggactttttatacacagttaatgttaacatctattaatctcttcctttgaatggctgtttcacccatacacggttttttatcatgcattggtcatttggaatttactggtccactgatgtacggagatcttgcaagtgtttacacatgtcattatggaatattaaaaacccacatttgttaatgtttttattgatcccctcagaaaaattattagctattgggaagatgtaaggttcatagtggactatacatgttttccaaaatactaacaatattaacttaaaagcttgaattttatcattggcagcacatactgtcatttgattttcttgaagtgaaagactctgtccatttttgagaaaatgtctacaagtacttaattcagaaaaaccacacgttgtcagtcatacttttgtatcaaaatggcgctctatgaaaaagtgcctagttcagcctgcaactcaaatgagaatcacacaagtttcttcccgcctttttgccccagaagtgctgcatgtgtacttctcattccatcatctggatgtttactcgagggtagaggtttaatgaagttaatgacttttatgcttcatcaaggatagtcatcagtgaaactttttccttctaatcgcgactgtctgctggtgaagaagacagtgtccatgagtagagtttggtgccactgtcttgtttcctgctaagcctccggcagttttacgcaccattgctttgttttttggggcttttttttttttttggagatttttttttttttaattatactttaagttctgggatacatgtgcagaatgtgcaggttcgttacacaggtatacatgtgccatggtggtttgctgcacccatcaacccatcatctacattaggtatttctcctgacgctatccctccccttctcccccaccccccaacaggccctggtgtgtgatgttcctctccctgtgcccatatgttctcattgttcaactcccacttatgagtgagaacatgcagtgtttggttttctgttcctgtgttagtttgctgagaatgatggtttccagcttcatccatgtccctgcaaaggacatgaactcactcttttttatactgcatagtattccatggtctatatgtgccacattttctttatccagtctaacattgatgggcatttgggttagctccaagtctttgctattgtgaatagtgctgcggtaaacatacatgtgcatgtgtcttcattttttttattttttatgagacggagtttcactcttgttgcccaggctggagtgcaatggcgcgatcttggctcaccacaacctccacctcccaggttcaagtgattctcctacctcagcctcccgagtagctgagattacaggcatgcaccaccacgcctggctaattttctatttttagtagagacagggtttctctatgttggtcaggctggtatcaaactcccaacctcaggtgttctgcccacctcggcctcccaaagtgctgagattacaggcatgagccactgtgcccagccatgtgtctttatagtggaatgatttataatcttttgggtatatttacaagaaaaaaaccaaacaaccccatcagaaagtgggcgaaggatataaacagacacttttcaaaagaagacatttatgcagccaacaaacatatgaaaaaatgctcatcatcactggtcgtcagagaaatgctaatcaaaaccacaatgaaataccatctcatgccagttagaatggcaatcattaaaaattcaggaaacaacaggtgctggagaggatgtggagaaataggaacgcttttacactgttggtgggagtgtaaattagttcaaccattgtggaagtcagtgtggcagcaccattgcttttttaccatcagtacaaatatcaacacagtgacaaaggcaaacgtcttactattgttacgaagagttttgacttcataccttcctaaattggattcagggaccctcaaaaatctgcagatggcccttcgcgaatcgctgcctgaggtactgtcaggcctacgggagctagattcctgcctcatctgagctcccactggctggaaagggaaatgtggaggaagcacacctgcttcttactgcaagggggctgagaagcactggctggctggatcgtcagacttccagctgaaaaacccattaccttggaacaagggaagaacaagattttggtttattgttttaagtccattgttttattttcatgtgtcctctaccttcataatatgtttctttcccccctgagtagttgttcaatgtaggaatgagaagacctgtctgtacacagtaattacacttttactgccagctctccattcctggtgggggttgggagccttgaggaggtggcgtggctccagaagccctcgtaaaaatccctgggaggaacacaaaggctctttagacagacctttgtattagtcactaattgggaagacaatatgcatcaactccttggaataattgacgttttcataggattaaaagtaaagagatcctatgatccagcaatcccactactgggtatgtattcaaagggaaggaaatcagtatgtcaaagagatatctgcactcccatgtttattgcagcaacattcaaaatagccaaaatatggaattaacctcagtgtccattgaatgaatggataaagaaaatgtggcatatatacacaatggaatcctatttggccatgaaaaagaatgaaatcctgtcatttgtagaaatatggatgaacctggaggacatcatgttaagcaaaatacaccaaatacagaatgacaaatactgtatgatcttattcgtgtgggatctattttaaaaagttatcatagaagcagagattacagcagtagttaccagagattgggaagggagggtggggagacgtttgtcaacaagtgtaaagttacagttagatggggggaataagttctggggctctattgcaaaatagggcaactatgcttaacggtaggatattgtatattacaaaatagaagagaggcttttgagtggtttcaccacaaagaaacaattacatgcatgaggtgatggatatatgaactaccctaatttggtcattatccaatatctacacgtgttaaaacatcaaattgtactccataagtatgtacaattacaatgtgtcaattaaaaaataaagagactgtatgtatatccagatgtgtctattaggggttgttaaaatagaatttcccatcttttctctctttctcatctgtggcttctactcgtaatctcgctccgtgtgacaaaactgtatcttagtcatgaaaaacagtttatttgaaaatattgttcagggagattagtacctcgctcatacacagataggacatggttcagagaggcttggaatcaggtcattggccaacgctgtcaattctctttatagtgtttatgaggtttacgatgagcatctcatacagcaatgcctgaaactacaagtgggacttatattgtgcctgacatcaagaaaagggccaataaatattagtttactctttggttacttgcctcttttcactgatccacattgttcttatttatgagcaatatcctttaagctgcagcctcctatgtgcttagaagtctttttaaacgttgatgactgattaggaaaatcaataccaaagagcatgaaaccgcagggaagcatgataagcacttcttaaatattggaagtaatttacgaactacggcattttcaaagagtctggagttctgtggagagaaagactcacaaatgcttaaaatcatttttggaggcagaaagccagcaaactagagcctggaagattgggcaagaggcagaaagacagaggggtctgagtagttccggcaaggagataggaatgaatagaacacaaagaagttggcctggggagagcaggggatgctggctgggaagagtggacttagtcgtgcacggtcacagtggtctgccaagcaggcaggagcctggaaatccaggcacgggcatctcaccttctcagctgaaaatagggaggaggcatttgaacttttttcatctggagaataatgcaaggaaagggatgataaggaaaaattatgatgttggagaaatggcttggtccatgagctataggaaagcataggttcttccctccatctggcagttcccttcctccatctgctcactgactacattctgtttgtcctctgtctataactacccggcccctcctcatggagccttcccctcccaccccaccctccaaggctgctgtgatttgaatgtgtcccctccagagttcaggtgttgccacatgatattaagaggtgggacctgcaagaagagattaggccatgagagctccttcctccttaatgggatttaggtccttataaaagaggcttcacacagcctttgggtagcttgcccttcagcattctgtcatgtgaggatgctgcaagaagaccctcacaagaccaaatgccagtgccttgatcttggactaacagcctccagaactctgaggaataaatttctgttctttacaagttagtctgtgatattctgttatagcagcacaaagtggaccaagtgccttttcatgtactatgtccttaaccacttgtgtttattcctgctgtagcatgtaatgtaattgttttggttacccaggagatgctaagttccctgagaatggagagcttgtccattgcatcttcatgtccagcccagtacctgatgcatggtaggcactcaattaatacttgaaacaacgtgtgaatgagaagcgtgcagtaatagcacaaatagattaaggcctaggcaaatgggttgataagtagtaaggaagggactgatggggatcttggaaggtgagagcaagttgggtgggtggcagaatagttaattatcactctactgagtgcaaggttttattctctgttatttgctcatcttatttctctcattctactttctcttaattgggaatttagaattattaatgatttgtttgtagttgaaatatcactgtcaacatataaatactccaaaggcagctatatcctgtgctattagtttcaagttaattagaattattgaataatttgagggtggcagtgtattattaacactattaacgttgtttataaatatagagcaaattgggtttttaaaaattattctcattcttgtttttattatttttgatatgcaattttacatatttttggggtacggtgtgatagttcagtacatgtatataatgcataaagatgaaactagggtaattagccatctatcacctcagacatgtattatttatttgtgttgggagcattcaaaacccactcttccagctaattgaaaatacacaataaattgttgttagttataggtgcctgacagtactgtagagtactaggactgttcttcctttctagctatattttgtatccactaaccagcttctggctaaccccctccccttaccctgcccatcccctagtaaccactattctacactctacttctatgagatcaacttttttagcttctacatatgagtgagaacctgaggtacttgtctttcggtgcctggcttatttcacttaaaagtaatatcctccaaactcattcatattgctacaaatggcaggatttcattcctttatatgactgaatagtatttcattgtgtatacataccatttttaaaatctattcatctgttgattccatatcttggctattgtgaatagtgctacaataaacatgggaatgcagatatctctttgacatactgattttctctcctttggatatataaccggtagttgggttgctggatcatatggtagttctatttttagtttgcccgtgtgttttttgaaataagacctgttaaaactacataaacttgactttttattatccagataagacttgttcattgcggaaaaattatagctatgacaatatgtaatttaatagttaatatatgaacataagaaaaaataaaaatcccctgaaataattattactcagagattaccactaagcaattttgggtaaatatattgccaggcatttttagtgtgtgtgtctaaatatatatctactttaaacgtaaagtacactgtataccttcttgtaaccggatcttaacttaaaatatgaatgtgcctgttaacatttccgtagctcatctggttttagcatagcggtagtgagcagttgcatgcacccttgacagtatgccacatgacatacaagctgggccatatttctgctctttctccagagctgcagaggtcatctagacacaggaagacacaacctagaaaaatgggggagttaatactacaactctcacaatggggggtgggagttggtggataaatgctgcggcatccctgtcctgtgttgagacagttacaagatccatgctatgtggttctgcaggggctccccatgcagttgcctgcagcagtaaccagctcattcctgaaaattgtgttggtttttctcctttgtctatcttactttctccaaagcagcttacatccgggtctttatctcagtgactctttctagagaatcccaaattaagaaaacgtcaaccctgtattattgaacaatccgatttatcttaatttttgttataaaaagaattataatggatatctatgtataaattcctctacatatgggtctagttaattatttttaaataataaatgctaagtcaaggatatgtttttaatttttattgtaaatagaattataatagatatctatgtatcagtacctttatatatggatctagttaattttttacaataaatgctgggtcaaagatatgtacattttaaagactcttgatatatgttaccaaattaccctttagaaaggttattccagtttgcagagtattggttttcctgtaagtatataagtgacctttgggtatgaacctttttaaatatttgtcagactctcagataaaaaattctgtctagctttaatctgtaatttttacatgtgcttttggtcacatatttttgtttgatgtgttgcctgtttgtatcttcttcccatttttctcattggatatttaaatgttttaatcactttttatgaactctttacatattagaaatagtaatcctttatctgttgtcaatcatttctctaaaatgttttttgactaattttgtgcttcttaatagccactgtcactggcttcattgtcagattctacattggcctgcacatctctctccccgtgtgttgacattctcaccgtttccctccctctaggtctttctacctctttgtcattcatcttttcttttctatacctggtctctttctccctaattcctgttctaaacatggaattgattggtctcttttactttgcagtgattcttgctgggtgtagaggagagtccacatcagagaggtggtctttcaagcgccatatccccagactcttgagaatcacagcgttcttaccctgacctgtagtgtgcatagtgtaccacggtgactgttagatgtgtgtggagaccctcagctgaaaagaggcagaagttgagaactattggctgaaaggcttaagaagccatggaaatgccactcacgttttccatctgcttgtttctatgatagaaccctcttggaaatcctgtgacctgagtgcccatctccaaaaaactctttctacctatatatacttcacagatctgaaagttacttactaaattgattgcagaatgtggtaaaggcacatgctagaccaggtctagaggactagtatcctttttaaagcctgatcaatatgaaggactctttatgtaatgccagggggtcaagtccaaattacatttccacatcaggagaactttcaaggctaatgcagatgccacaggcctctagggaggggttactgctgtgcttggtagatttatagtcacatgtctactgtcccaggaaaggaggaagggacacctcttgcattctgggagtgctctcggctgctcaccactaatcaggagtttcttcaagctgagagacttctggcttcattcttttcatcccaaacacaatttatttatatctttgtaaagtcacaaaatatgaaatatttctttgtcttccgagttattttataatgtgtatctaattaaaattgtagattatcatctcaaattgatttgatttatattcatttaaattaataacacagtttcttaaaagaatcttcaatatttaggtaacaaattaatatagatattgaacatttaaaattacacatgaaaagagaaataagcaaagatgttgagaggcaatcacagatcacacttgctatgactgagctttacaattagatctcagcttctcaaaaccagggtggaaaagtattaataacaatggggaaacataattatcacttggcacaaagaaacatgctaagcattaacagaaaggaagtatttcctcctgccttggactaaattttgaagcaaaaatgtcctgtggaacttagacattggacttagggtaaacgtttccagtataaattcatggaagcatttttcttatgttttttttcttagagtaaatcctcaatgtaagcaaaaggcataaggtttaaatataactcagtgagtgttttctcagagtagttttagtgaaagtagtgtcaaagtagtttaagaatctaggtttttggtatttttaaacataatccaactacatagagaacaaatgtctgttagactatattccttgactcctagttgcatcagctgggctttgtgaaagctaggtaagagttttcacggaaatagcaaaagatgaaatttgcctcaagatgctgatttcgagtaaatacccacacaccttttacatctttgatgaggcaacaaaatgtgtttaatatgttttatgattcttgttcttttcttaaatcaaaatagttattaattcaaagaaactactgtttattcagctgcagatgcctactggttcttggagggagaaaagcacatgtatgtatgtatgtgatttatgtttctatttaaccattgaccacttgcctggttaatcagatatccttttctctggtccttgcttcaaaatcgctatctctttaggctttcactaacatgataattgcagatggtaaagtaaagtatcagaccttatctgtttttctgacttctgttgacaatgaaacctctgtaatgcagccaataaaagaagatactggatgaaagagcagatttactgacacttaaagatgcttctttacccttctcttaaaaaaaaatcatagaataaattgcactcgattcttacgtgtgtggtcaaaatgtcgatgaaggcttgacttgcaccagcgcttctggctcctatcctggtgccaggatcaggtttgctcagggtaagaacagccacagatgcctcccaagggaatgttactgatggatatgcttgctgctgagttatgtctcaattgatgcctctgggagaagaggcacataagctaatgaaaaatcccgttatacattgtggcttagattgagagagttagaggtaatttctcatccactgtgatatggcctgtcttagtgttattcagacattttataagtcttcttaaattgaaattagttgacgtgtaatttaatagctaataagcaccatttatgaggagttctcttatgatgctgttagtcagctcagactgctgtaacaaaataccgcatactagatggcttgagcaacggaaatttctcatcgttctggaggctggaagttgcagataaggtctggtaaggattggcgtctagtgagggcactcttcctagtatgcagagagcaaccttctcactgcggtcttcacttggtcttccctctgagcacgcgcgtggagagggagaaatctctctcttcctcttcctctccttgtaacgccaccaaccctattggtttaagactctaaccttatgacctcgttttatgttaattaccttccaaaggccttatcttcaaatacagtcatgttagtgattagggcagatgcaaaaaataaataaatgaataaataaaaagacgcaatttctgttaaccaaggcaaaaaaaaaaaaaaaaattaaggaaggaagcctaagggatcttgtcagtgagataatcattgagttatgtaacagtaagaactggttacccatctggacctgtggattgttctgtagattacaggatttggaggtcctttctaaacctaaaattcagtgtttctaggtaatagctcatttgggggaatctattccaaatgcctgtgatgtttttctttcattactcattcttcgtcacccagagtacccagcggaaggcacagtggaagagcccagctggcctaggtttgatttccactttctctacttatcagctgtgtagcctttaattaattacggttcctctctgagactgtctacaaaataattgatacttaccttgatgcatgtattaatattagaatacaggctaagctactgtatataaaagtaaagcaaaacacactagcttagatatgagagaaatgataggaatttatttatctcatacatacaatccagagggaagcagatcagggctggtgggagacttctgataccagactccatagaaacttccatttcagggccagtggtgactgcttcagttttcattatctcccttcaataggaatggagaaagggtgagaggaactcattcacactgaccttttaggggcaccgtccccaagtgacacacacaaactttgcttccaccagagcttcccaccagaattgtactagccaaggaggctggatgagaagcttatctttagctattgctttactagcagtggttcttctgcttcaaatgattctcgcaaagattagaaataattcattaattcatttatctatattgaattgtgaaatatcttaacaaagtatttagcaagctgcctgatacatggtaaataccaaaaagatggaatcagccttcttacttttccctagtaccttactacttgcaaagtgtggtccgtggcctaatagcatgagtatcaactgggagctttagagatgcagaatttcatccccaagcccagacctcagcctgcattttaacagttggtgaagctctgagctggcatgttcttttataaatctttaatggcgtctgctggcctctgctggtgacattatcttgattgcttacaatgttgtcagaattaaatgagatgacacgtgtaaaatactttaaatctgtgaaatgttttataacatgatttaagtgtacatgtgtgagaaggaataatgtgaatcataggttataagaacaacatttattttctgagacagggtctcactctgttgctcaggctggaatgcctggcacaatcatggcttattgcagccttggcccccaccaggctcaagcaatcttcctacctcagcctcctgagtagctgggactataggcatatgccaccgtgcctagctagttttcatattatttgtagagatgaggtcccactgtgttgcccaggccggtcttgagctcctgggctcaagcagttctcccacctcatcttcccaaagtgttggaattgcaggtgtgagccacaatgactgacccaaaatttggcttcagattttccaaccttgataaacttccttgatgctgtaacgtcatgtgaaaaaggcattctgtttctggagaatgtgcttgaattgccatgcaacctcctaggtacagagcttttattattagttagggcttaactttctaaattgaggggttttagtgtatttttaatcaccattcctctatgatgtctaaatatttcatctttttaagttcttaattacattactgtcctataatttgtgtgatagaatatatggattttgacatcaaatgaatgtggaaatgattctaaaaaactggaaaattttttatcaatggaggcaggagaatcatttgaacgcaggaggcagaggtcgcgccactatactccagcctggcgacaaagtgagactccgtctcaaaaaaaaaaaaaaaagaagttatgcccaaattataaacagccaatccagattcatacaccagtgttgagctataagaaatcaggagaatcaactcatggacttcggttttcttatctataaattgggaaagatatttgttccactgtctcacagtgtttggggggtataacttaatttaagatcctagaaaaatgtactgtgcatatggaaggtgatattaatacctgacgttgtcagagtgaggggtatatgtgaacatgcattctgtatgaaagaatatattcctaaatgattggccagaaaacttgtgagctgaacttgggccctggtagcttcatcagattcatggtatccaggtctgtgcccctgcctccggtgcacaggagcccaaaaagaggcagacacttacacgctgtttctgcagttcagtcaggcatcgggcatgcaatgaaagcagatctaggggatgcacatctgatgcacacagagaaaagcctgggttttagaagactaatcagccaagaagctcacaaaggaagggaagttctgaacgacggatttttctgcatcatttagagttataccttgccctcctgcctgtcactgcaagggatgggcacagtggcagagatgactgctgcatccttaggggcaagcacacacatgcccaatggtcttgggactgataaatttagatgaacatgaggccttgcatttccattctgtattccttttcattaacattcagtagatgagtgctgaactgtgaacttggaagtctatggtgagaggataaacatgcatatgacttaactttccttcaaggactttcagttgaggagataatcaactttatcagagagaacggcaataactaacatttgtactttaaaatagatgttgctgtgttgtacccacattttttaaaacctgcatatatatgggtatttaaaagtaaattgatctgtatcatgtttatattacatagggacaaaagaccaaaaatgggctatacatcaaaatgttaatggtgatgaaaatttaaattatttttattttttattctttattttttacatcttcctcaatggacacatattgctgactgaactataaaaacacagtaagcctcccaagtagttttatgcacacgctctcatttgatcttcacaatcactctgtgaggtcaataatgaacattgatgttatagatgagagaaatggaggagacagacaactcagacactgaggaagttaactgcagtgaaattacatgatacagacagtgttgaacagggagcaaaaggcaaaatcaggagcctaattaagatctcggaaagaaaatgaatagtgcttgaatgaaagggaaatgtaaagattctggaacatagttaggtttagggcagtgcatggctttgtacaggaatctggctccctaccttgagattgggtttagtttgatcagactcagagacagggtgcacagtggttatgtttgggtttgggaccagagagtctgagtttgattttcaactttggcactgcctagctattgaacctaggtagttattcacagactcggggcctccatttacctatctataaaataagaaaaatactagtagctactataaggattaaaggagttaatatgtgtaggaggctttaaaagtatataggacataaggaggactcagcagatattagccacctgaagctaattgtcctcattcctatgatacagggctgatgaagatgttggcagattaatcttaagaaacatgtagatgtatatcaaatgtatatagatgtatatcagaaagtgctgagagctgtagataagggatgcaaaagaattataacattaatacttcttttgaaattattttgaaactatgagaaagtttgtgctggtcttattggataattcggctgtctgcttgaattcataccaacccctccctgattattacaaatgtttggaatctgtgtgtacacttagattttcctaatcatactgtgtcataaggcaagtaattcctcaaattaagaatgattgttttgtcataaaaagacctggatcacaggtcaggagttggcatgtgctgtgagggttagtcttaagtgtccttcttaagaagtatacctgcatgtcactgaaccctggtcaaggcatgaataatgtcgcttggtaaacattgagtctgaggagtttcagggcagtttatactagctgtcatcaatgtttatagataagagtgagatggaggatttatatctggtttctgtgagacccctgcaggcccctgctgttgaggctggttatgtagcaggaatatgtctaagtgaccagcaaaatagaaaaaacaccagctggaactgcatcccaaaagcagcctaaaatactaccagttgagtttaacttaccaagagagaatatattgtatgatactagttgctttaatatcctatgcctagctgttttaaagtttgtcagttctcacacaggtaaattattgaaatccaaaaatattagggcaagagcctattgtaaaccttttttatcctcttatccatgttctaaaatatgtaaaatattttttgtcatttttttcagaccccctggttgtggaatacgaggcattgctggtacaactacccctatcaggtaaggaggcattattgtctgggtttttacacacattaagtatctaccttcggtcaatttcatggtctcaggcaggccccaacaggttggacaaccaccttcatttttggccccactcccgctgatcagtgctggacataatctagtgaggatagtaatttgtgcattattcttagtgaagttcagaatcaaggcccgattgccctagcagatggagtcagcttggaaagtacatttacaagggaataggatcaattagttcaactggtggaaattcctgctcctaacagctgatctgcttctaatcactgaggtaagtctggaatcctgttgacatagtgcagacctgcctcaacagcaagtgggaaagatcaagtgtgaggctagagcaggtacgctgagttcagttcactttgtgacctagaagcagcctccaaatatgtaaatcaagcaccatttccttgagtgcagaaaaatgggcttgtactatgacatgtggaaggattatttctgcaactaaaaacagcatcattgaaagtgagattaaaatcatatcccagaaaggaagcattttagatctctgcccactggcatacctttgcatctttccatgaattcagtgatataagcatgtgttgttgggatccccagatccgtttaaaaagctgggacttgtctcaaagtttctagctgggaaatttctataactccatgttcagttgggatatattatgtaagagaagcaaatgcagctaggtattttgtgacaacatgaggagacatattaaacattataataagcaacttcaggttttttgtttggggtttctttgggttgtctgttgaggtgtttggtctttggggcgtgcacagtcctatggggagcaggcttgccctgtgtcttctttgttacacctagtgtcatggcagagggtggggactggcactggatactccttgagctagttcaacgttaaggacacattgaattggaattccaattggcattttcatctcttacgagtggttttttcacattagaaaacactataaataagcaatagaacatggcaagagagctgagcattcagaggatatttgatagagactaaagcagtgttgacaccaatagcttattttacacaattgtaattctcaggcccaactgctgtttaccgtacttggaacattgtcacataaggctccttgtgtcctgtaatggtatagtgagtagcaaaatccgtgtatgtctacatttctgtttatgaaagtacacacaagtgccaaatgaaatgtaatacctactcttctttttaactgtaatttagtccagaataactttcatgttcatggctggagctgagaaattgcttatttctgagaaaatgagttgctagagctatggtctatactgtagctgcagagggtttcacagcactgtagattcaacatgaaagtttgagggtctgggagttagtaatgtttttaaaaagaggaaacaccacgtgtatggaaggcaagatgctatctgtggggactcagatcaagattgtcttctgtatgattcagcatatagcccccaaaatgtaggacaaattgatggtttctcatgggaacggtgcatctttgaaaatgctgtatagtaataaagaatattagctgatttctttgtgtgtgggtgggggggaactaaacagcatataattattatgtatgcaattatagtactttgtgtgtaagcatgcctatgtaaatatatagattcctgttccaagtcagtctctagccttaagggcacttttaaagaccgagcatgcttatgagacatatttatggtatctttagcatatatgttaaattgataatcgaacagacatttaggtgaaaaagtagtggtctacttcaattttattaaggatacacttattttatataagtacacatattatttgttacatattaaataatttcatatacatgtgtatattctaagtttaaaataatgtgaagttgcattcagttgaaccttgtacagcttggtataagaagcacaagttggacatgagataccctagttggtggtcatggggcctcactagctatgagacctaggcttagcctcttaacctgaattaactgacagcaatttcctgtcaactgtacaatctaggtctagaattatagtactaattttataggatttttatgagaatcaaagaaattaacatgtgagtgagcattgtcaactgcaaagcactcgtcggacatagtaattattataatgggatgaactctgtggtttccagatgctctctgagttgcccttataattcctctggggcctttccccaggtggtgatgtggaagtaagagaatatcattaaaactaaaatttacccttggctcaaagggtcctgagccagggcccgattttctaaacttcatttcagccatccatctgccctgaatatccattcttcatcgttaatgccttcaagttttacaaggacagttcagtaggaagtgtattctactcagggagatgctgaattcatgcttaggtctcagttcaggctgctacaagagaataccctaagagctcatgtcccttcttctaagggcactaaccccattcatgggggctccactctgatggcctaattagctcccaaaggccctgcctccaaataccgtcacattgggattaggcttcatcatatgaatgttagggggacacaaactttcagtccacagcagtgctcattgtcatttagactttaggattgctggttctagtatcctgtcccattgtgtattttgttgtcaaagatctatgcaggacaacttttccatgattcccatgcgtagagtgggtgagtgccagcttctcctgatagtcattcattatgctgctattggtgtacaaaacacttacatttcaattatatttaccatatatggtattgtcttgtgtataggggtatggacttgtttgtgtgatgagtttcaaatgtttttcattcattttaataaagcaagacatttcattacaactcaatataacaattaaaaacaactcatcacaaatgttttttgaaaactctcttgtttttagtgggattatgtgcaaaataaatattcctgacttccactgcctctctgagcctccccccgaccctgagcctctgaggcagttaaagcaggtatcactcccattttacaaataagtaaactaagacccaagttttatacctgctgagctgtagagctgagacgtgatccgatatcctggctgggtgcctagtctggtatctcctggcagccttcctgtccctctgatcttttagtaaatatttttgaataattctttctgatatttgaaatgtactgaacatttttttctaataacaaaaaaaagagctttctgattaatgcagaacttaaatctatgcctcagtgacccatacagcattccagttcctatcacctactgtcttgtccctatacttgcagcagttgtccagggttattctttgtctgtattagaattttttttcaggttgcttaaggaatcttgcagatacttgtgacaaagaatcataaatgctgttgttaaactgaataatgaattgagtcccaaatgttcgtgctaattaatgctttttgagttggagatgaaatgagagtaatatcatcaagctgtggattaaagttatcctcaaagccccatcatctacaaaaagaataggacaggaactgcctttgtgcaggtgcaagaccatgttacttttgagcagtgagcttgagatgtctgggatacaaattgggttccctattaactactaatcattccttttttttctttcaccttcagccactcacaactgaccttcactactattacatcctggagctgtcgttttattggtctttgatgttttctcagttcactgatatcaaaagaaaggtaagagcggttatgtcgtaaagtgcttgcaagcatgcatctttaatggcccttagcaggtgggtttagactctcaaaggcactcacccctgttctcctggcagccctaggttagtacgacttgctgcgttattacagaaagttctctatttttgtttgtgctgttttatatttttttctattgtttcttcgctcatcccctaaaactcagctctcttttctccatgtaataatgtagcaatgaatccccgtagaaatgattttctctcaatctaattcccaagttcctctgttctccaaattaaataaaaagcaagaattctatttgtagctcctgggagagagtaaagtctcagtgtttcaaccctacagaattaattccccaattgcagggttgtccagtgtcaaaatatgtctcggaaatgcagcattcctcagtgaactgtgatctggtttccacctatcccctccactgtaatcacttttgtgtgaccccttacgtgttaaatccacttattctggctttcgtcctaccagcttctgggcagaattggcacttctagctctttactgcttatttttctgtgacaccatatttggattaatccttcaaagtcactttgctgtccttgtcttaatgccccatgctctacatatttgggtgcaacagagttctggacctgaattacaggatgccatctccctggatgattgagttgatacttcctgacacttccaaccataacctacatgccatgaattctgaaatgtttctcttctgccccacattctctctgggtccatacttccacatctgtagtcacagatgatagtactggttgaacatccctaaatctggaaatccaaaatgctctgaaatttgatactttttgagtgttaacatgatcctcaaagtaaataaatgctcattggagcattttgcattttagatttttatattagggatgcaaatctgtaagcataatgcaaacattccgaaatccaaggaaaacagttctaatcccaagcatttggggtaagggatacacaatgtatattgtgttatttttgtacattatatcatttagtcctgacaacaaatcagaggtccagtttgattattttattatttatgcttattttatgaatgatgaaactaagccttacatacaaagtgctcctgactgaagacatggtcttctagtcttgttcttctccagtaacccttagaaccaaaagtcatgtcagccaggacgttttcctttgctctcgtttttgccactccgtataccttcttccttaatgtcactgacaaacttacagttccctctccttttgcccactctattatgtagtctcttaaacagtctttctatctaagtagtcattcttgtttatctgctgcctaagaattatgtttctaaaaccttcaagacaaagttcaaatacgtggaggataaaatgcaatgtcttaatccaattgagctaatacaaaaaaatgccagattgactgagtggcttataaaatctatttctcacggttctagaaggtgaggtgccccagatcaaggcaccagcagattcagtgtctggcaacagcccactttctcatagatgacaaccttctcactgtgtcctcacatggtggaaggggcaagacagctctatgaggcctccttgtgaaaaggcatgagtcccattcacaagggcttctgccaaaaggccccatgtcctaatactatcactttgggggttagagtttcaatatatatatttgagaaggacacaagcatttagtccccagcaagcaagatatgttcgcctttgcacccccatgactatcagtgtagctgctcatcgtgggaatcagtaagttgagggtaaatgaataagcaaaatcagttcctttacattatgatggagcacagtactgtaatgtatcatttcttggttaaatcagtaatctgctaagttgcaaactggtatccaagtggcagctgaaaagcgtttaggagtctgtgggcctactactacccaagtcccctgtccccacatatgctccttccaccatcctacagcagtggcttacttggctggcaaaaagctatcttttctgacttgtatggctacagggcccttaatatggtatatatcagctgattctcagaagtaggtggtccctgtcaaagcgagcttgggcataacagatgactctttgacacccgtaatttgtggttcccttactcattgcacccaacactccgagttggtttctgaaatcatttacggactctttagtgatggtatgtcaagggaatctcttctgtcctacatgagggagccttctttggtcatgtagtgtcaatacatgtagactgattattttctgtgtgccaggtactgtgcgaggctcatgttgcatttattttcttttttgaggagatcttttgtccaggtagtcacgtaaaactcttatataacagagagctagaacattcttcctttttttttttttttaacttgggagaattgatgcacagagtgagtttatgtaagtttctcaaggccatgcaatataggaatgaattagaggctaggcttaccaagcagagccctgtgattcactcttagattagacacatacataatccttgccttgccatgctcctgacattacaggtagttagcctttaacagctctttgccattttatcagtccttctcttgcttagtgagaactagaggtgccatccagagtcaaaagcaggaatagctgtccttggcttccagaagcctagtcctagtaagacattgctataccaaaagttaccaagtccctgcactagcttgagctttctcatcacatgtggaatgtggctttgcagtgagccagcagggctcaaaatatctttattgctgtattagtttgttttcgcactgctgtaaagaagtacctgtggccaggcatggtgactcatggctgtaatcccagcacattaggaggccgaggtgggtgggtggatcacttgagctcacaagttcaagaccagcctgagcaacatgacgaaaccctgtctgtataaaatatacaaaatttagccagatatggtgttgtgcaccaagtgagccaagatggcaccgccgcactccagccggggtgatagagccagaccttgtctcacaggaaaaaaaaaaaaaaaagaaacacctgagactgggtaatttataaagaaaagaggtttgaggtttaattggctcacggttccataggctgtgcaggaagcatgatactgggatctgcttggcttctggggaggccacaggaaacttataatcatagcagaaggtgaaggagaagcaaggcatgtcttacatggtggagcagaagcaaaagagagggaaaggtgccacacacttttgaacaactagatctcaagagaactcacaatcccgatgacagcaccaatgggggatggtgttaaacgatgagaaaccgcacccaggatccaatcacctcccaccaggccccttcatatttggggattacattgcaacatgagatttgggaggggacacagatccaaaccatatcaattgctttaagccaaatgactgttatctcaataattttcgtaggtgaattattttgggggattgaagtgtatcattttgtattactttaacatatataacatcagtggaaaacacctgtaaaagggataattttatagtaaagtttgtggaattgatcctaggcctgtatatattgtcagtgtttagaaatcgattgtatattttttgctagtcaatatgaatagcatgttttagataggtagctcctcttgtcttctgctggtcagattagatttgtacattcctgatgcagctggtttattcttgtttcttgcacaaaaatgggaatttggccgctaccaggcatgcttactccttggcacaggttttcattaggaaggccttttcctctgctgccatctctcattagggagctgcagtgcttgcttttcccctttgcgtcttgctgaatggccccatgggtccttggcagttccatccttattccgcctccatttggaggacctgctgttctagccattagtgaggatttatggcacattctgtctgccagatgcactctccaccttctgtattggaactattaactgaaccctctaaaaacagcctgcttccttatgatgggatagggatgtttgaagacacccattggcaatacagtatggaaatcaacttcagaagacgttcatgaggttgttaatagaagagttatcacagtgtttctttggctcccatattaaataacaatgagtgtcaatggccattttcaaacagggaccaggatttataaacattggctccaaatgcatgcctcagacttctagaatcagtactttaaataggtttgacaatcatttattttgatttattgggttcacgaatttttctaaaatggttttgtattcataaactcttcttttttggcaccttttttttaaattgctgtatttccatatagaatctgaagtttaaaaatgaggggagaacttttcatcttcatggtgacagaacacattgcctcacttgtaatcatttccagagttggtacttatttggtcagtgatgagaaatactattaatcttcccaaagggaagattagatgaaaaataaaagatgtttaaaacatcttttatttcccaaggcttaatttttgttaaaattgtatcctttagcacctgttcacaatgaacatttctactgccatctaaaatttccaaaggaagctaataaatatttttgcgttggagctcagaacagcttgcttatgtctaagccctatgtcccttttaactaagctgctgtttggcttcaaggcctgggcctttggccaatgagttctgctcatgttcagagtccttctcagggaagcatccctggcagagttccagggcccagctggtgaaatcaacttgttgcccttttggtcttaaacccgagagaaacactacatcttataaaagattcctgacagagagagatatgattaagtctagcaagaaacttattgatgagcttgtgttagctctctgctgactttttgcggagaataactggagcccattactgtaagtgctttagatgcctttgggggccgtgtcatgctccagatcttgcctgcttcagttagttttaggggaaaggaaaatgcatgttttaatcttacgaggaagcagcatggaacagaattacgtaaaataatgtacgtgaaactatgtagtgtacggtgcttgacaaatagagcttagacagtacgtggcacataatgacccagtaaggaaagtcaaaaagcacctaccatgaacaccattgattcataaaggaaagggcattttaacataaaagaaagggagaaaggttacatattgtaataaaggacaatcctttaaatttatcattaagtaaaagtccttatttttgtcattttgtcctagactggggaaaacattatgggtgcaatatggcttagaggttaaaagcatgagctctggagtttgtctacctgcccagcaccactcctaattcgatgtgaccttgagcaagttactttacctttctgtacgttggtttcctgatccaaagaatggagttcacataacctaccttatgggtgtgttgtaagtgtaaataagtaaataagtagtacatgtacttagaagagtgcctggcacatcataaatgctcaataaatgtagcctttccttgtagtcattaaggcactccagatactgccagctcttcaccctcaggcacaccaggattgtgcttctcagccaacctcctcttttgtgattgggtggggccatatgactagtgggctgtgaacaatattgatttgagccgcttctgggctggagtattatagttgccggcatggactctctagggctcccacttctagcacagtgattggtaacactggagatgggggctgctccgtcagcctgggtttcttagtgcctcaggcaagcagagtccctggcccccaaccaatgataacatgtaatgagtaagaaataagcctttgttttaaaccactgaggttttaaggactttgtaattgctgcatatcttagcttatcctgactggcacagatgttaataataatatggctagttatcatttcctaggacaatatttggaaataatttgtctaatcagtacctctcaaaatatgctctttgaatccctgacaatctctgaggccctttcaggaggtgtgcaagggcaaaactgtttttataatagtgctaagatgtcatttgcctttctcccagtgttgaaattttcactgagaatgcagaagtaatcatgggcaaaattgctggtggtggcaccaaactactactaatagtagtcattgtactcttcatgccacattcttgcagaaagaaaaaaatgtcagtttcacctgagaatgttcttgatgaagcagtaaaaactatagttgtccctcagtatccatggggaattggttccaggaccaccaacccccgcccccgaggataccaaaattcatggatgctcaagtcttttatataaaatggtatagtatttggccagttgcggtactcccacctgtaatcccagccctttgggagtctgaggcgggcagattgcttaagcccaggagtttaagacctgcctgggcaacatagcaagaccctgttgctaaaaaataaaataaaaataattaaaaataaaataaaattgtatatttttgtacaaccgatgcacatcctcccatatactttaaatcatctctagattacataatacctaatgccatgtaaatgcaatgttaatagttatactgtatttcttagggaataataacaagaaaaaagtctatacattctatacatgttcacaactatccatttttcttattcagacacacccatctatttttatatttatatagatacaaccgtccattttttaaaaagttttcaattcatggttgaatccatgaatgcagaacctatggataatggggggccaacagtattaattttattaaacctctcttcttgagtatatattgaaaaagaatattgtgtgtgatgaaattggaaataggtatgcaatggtgtctgtcttaagaaaaatgcagttctttttcttttgaactgaactttttttcatagaaccccatttttacttgaaagaatgataaactgtggttattccaacttgtgtatttgacagacattgtctagaaaatgcacaaaattagcttgtcacgttgtttcaaagaaagcaactgacattatttgtggtcagtgataaaactcaagctttcaagcaaaaattagatttttggaaagcttatgtgtaccagcaggagcttgacagcctgtcaatcctttacatttctgatgagattggtagtgatattaacaaatgtgattttcaaaaatattttatttaaaaaatcactactcagcgaaccaatattttccagataactaatgcatgatgttataaaatcatgcatgagtgaaagatccattcacagaccaatggattttaatgtagcagaatataaaaagtttattgatatgattttagattccatattacaaccaacttttaagaatatctgacttgacaaattttagtatggtgccaaagaagaatatccataactatctgaaagtactattaaggtacttcttccttctccagctatgtattatcgtggtactgggttttcaccaaatacttcaacccaaacaacatctggcaacagattaaatgtatacacagttatgagaatccaactctctagtattaagccagacattaaagagatttgcagtaatggaaaacaaggccactcttctcaccaattttttttgaaaatgtaatttttagtaaaaatgtattaacatttaatggagtttgtttacaataaataaatgtgttttaaatatttttaaaaatttctcagttccaacagtgggtatgttaatactgatagatatagccctcataaacaaatactctttggtgttcgcaataatttttgaagaggagaccaaaatgtgtgagaatggctggtctggaatattcttaagtctttcctaaaaatgtgactcccataccaggttttgtggctcatgcctgtaatcccagcactttggatggacgaggcaggcggatcacttgaggtcaggagttcgagaccagcctggccaacatggtgaaaccccatctctactaaaagtacaaaaaattagctgggcatggtggtacacacctgtaatcccagctactcaggaggctgaggcaggagaatcacttgaacccgagaggcggagattgcagtgagccaagatcacgccactgcactccagcctgggagacaaagccagactccatctcaaaaaacaaacaaacaaaaaaaaagtgactcccaggtagtgcctcacattgcatcagcatatcctttctttgcttgaaaagctaaaatcacaccagatgacatcggatcatcctggcagggatggggattgatgtagacttctctccttgtaacctcactcctgctacctatagacacagtcaggagggccgcttcacctctctttcaccaaggtgcaaagttgctcttttatgcaacttctcatgattggaattgcaatattctgcccttgaagttcagtttcctctgaggtagatattcccaatcttaggcctgtgtcctgtttctttctcactgctgtgtcttcagaatataagcagggaaaaagagcagctcattttaataagctaccatttgtgatcaaagcattgcaagccagtaccatgtgcagactggtggaagaacaatagaactattgtctggaaaagaagtgtttcatggggtaatttttatgggattttattcaaaggctgccttcagtagtggcttacgctggcaatcaagcatccaagtgccttgtcaaaggagaggctcttagacatctttagatctcatggtcagataaccagccactagtcagccctggttctcatagactcagccacatactgtaattcagggtgcagaagagtgacgaccaggagcctcttcttccagtgtgctgcagagggctgcagcattacagagagccacgcggtgctgctggtctcgggctctgggcacataaattcgggtcctcaggagtcccacctctctcaggaggtcttggtggcccttgggaggtttggtcattcagcttctcatggggagtttctctcaagtcaattctaggggccttgggaaaacacccactttggccgtttatagctctgtctctctccctgaagtcgtgaactccttcactttccatccccataaatataaacaaacccgttcatctgtccttccctttggcctcctgaaaagaggcaccccttccactcaaggctcacccttgcacctttgttctttttgtttgtttgttttttgagacgagtctcgctttgtcgcccaggctcgagtgcagtggcgtgatcttggttcactgcaacctccacctcccgggttcaagcgattctcctgcctcagcctcccaagtagctgggactacaggtgcgtgccaccacacccggctaatttttagtagagacgggcatttcaccgtgttagccaggatggtctcgatctcctgaccttgtgatctgcctgcctcggcctcccaaaatgctgagattacaggcgtgagcctccgcacccggccgcacctttgttcttgatccccatctcttcctgtcttccaggagtagaccttgttctgtttgttagtctgtcacttatatgtgttttccaaagtgtctcctctttcctgcctccttcctcagagtcattttcctcacacgtccgtttctgagaagcaacctgctatggtagttagatacctgagctctggagtcacacaactggattcagagctggcttagcccgtccttactgtgtgactagagaaaatgatgtggcattcccgtgcctcagtttctatgtaaaatagagtttcaaagtcatacttgctttatagggttgttgttaagaataaatgacagtgtcagaaagaagagcctttggcacatgagaattaggcaaatcagagtgtaaataggaattcaccaggtagtcaaggtgggatggggccaggagccaaaagaggagaaaacgcaagcatcacagccagaagaaaaaaaaacaaaaacaaaaacaaacctgcatggccagaggtctgcatagagacaagaagcagcttccaggaaattctgcagctagaattctgtatgtttgtgaggggttgggagtaggaagctcaggcagttgaagaaagaggagttagaatgtggaggataaggctgaggatgatgacaagagttccccaaacccctcctgacaatttacatgccatcccaacctggttgacctgaagaagactttttccatcttctatctaaagcacaaaattgagtccctggttacccattgtcaatttaggcctcaagacctttatagtaaatggatgatggcttttgagtcctgggatgtttctgattttagtagaacacaatctgccccctactgatcattctggatgttttcagcccgaatgggtttatttgatatcataaagggtatttatgtctctgttccaggggttattgcaacaacaaaaaaaaaatggagagttaattctgctaacccttgcatcacttaagactgttaggttgagtatgttttaaatgtctcagaagtgacctttccccattaaaagctgtgcaaactagtgtgattgagccaagggtaatttaaacagaacccagaaggtgtgtctaaagactttcatctccaggcacttgtgatttagcaaggctcgtagtgatagagagcttctgaggatctaaagttcaatgaatagaaagacatatgtacaattaagaaaactatctacatcatttgaaagcagagtgtatttggagagtgtgcttttgatggggagaggaagggaggcatgaaggaggactccagggcattggaaatcaagctccatgctctggccaggcccatcagaagctaaccaacagcactatcttactgttttctattgtgcaaataaaattttattgtgtccttttccatggtgataaaataactaaagattaaatattaactaaataattcacagtagacaagattatgagttcttgatcttgaaatggggccataaatgttgcacaggagaaagattgggtaaactctgcttatacaatggttatttcatttctgtatgtttctagaagccataaagtaatggcacatctagcagtagagaaaataatactgaatccaaagaagcatcttacttttaaaagcttgtgaagtctccttggttttcaaattgttttaaagctgtggttatacttgatcatgagaattttgatggttctctttctttatagtttatctgaattttgagagtaatattgaatggattacatccggacagctatgaaaattaaatctcttgacacattttttggtctgacccaaatgtgttgaagttagccacgagcctatgccattgccacatcttagataatatgacttttccaatatgatgctttcccatatgtcctttgatgtgactctaaggcagggcataaagcttttctgtaaaggaccaggtaataaatattttaatttttggggacgtgtaatctctgttgcagcttctcagctctgccactatagcaagaaaactgccatagacaataagaaaacaaatgggcgtggctgtattccaataaaactttatttgcaaacccaaatctggccatctggccctttgcctatctttgctgtaaagtaggatagcctgttgtgcatatttgatgaacagtggggatgtcagatttgagaatggctagtagagataattaaatcacatcagtatacattttaaaaacattttgatagtaaccacagaaaattcaacatctttaaaccaattaatttcatggcacttggtgtttttaaaatgaagtttgtgtgttacagttatccccctcaaggacctaaatgtgtatacatttagtccaaagggagagaaatctataatctattgggaaaaaagtgttgaagtagattcaattctagatctaatgtgaatgaagttttattcacagactgaattttggagaagggaataattgattccttcctgccaggactcctccaccttataatggaacaaacatttcccaaataagtcacagttcttcattcctttccagattttcctgtaaatatttatcttagggtgcataggctatacataagaaaaaagtgagttctagttagagtttcgaagagccttatgtgaaatacctttctttaaatggtccgtttaaccagctctcttatagtgagccaaaattcaaagccagttgaaatagaaaaaccaaataattcgtgggagattgtacatacattatgtgaactcttcacatcataagttggtaagagatggttatgattctcctcaaattgcctactggggagagacccagaatcaactgatttctgtaaatcaccccaaatatacttttattatttagccattgtcttaagaccctacacaattttttagtcctttatttctttgttttgttttttaaccaaattattaaagctttagaagttgtactgctatttattctagaaaccaccataagacaggacaaagcagcaaattattctgatgtgaatttctggtactacatttcatttttgccttaaggacgtattttgtgatttatttgcacacattagttttaatattaagattgttagtataccatttgggggttttggttttctttgtttaagaggttttatatatattcatcctgatcatcaggactttacccatctccaaaggctgagaagctattatatttttatattcccttaatggaaaagctgcttatgattattcttggtgtatgtaaattttgtctgaaatcctcaccatctccatctgtttattcattctaaaatggagatggagactgagtagctactctcttttgcatgttgccaagttacatgcttaaagtccacttctaccgccagcattctgagttttatgccaaggcagaaaaatcacaagagagaaaggaaaactgtttgttattgatccctaaaaagaaaagcatgttactctgtaagaagtcatatacatttgtatgtgccttgaaatttcaaataagagtactgttttttgtttgtttgttttttaatgaggggtttctattattactgcagttgccataaaatgaaatcagctttaagctatgctgctcttcttctgtttcctagacagtctgaaaatcagttcattgaataaacctggtgctattacctgacttctattcatattagttagattacagacttattaattttattaaattcaggaaagctaatatgcgtcatttgcatcgaagggagaagagccttttttcttgcacttcagaagtatttcatattcctcatgtctgtgcacatctaaatcaggctttaattaaaatcttgctcttctaaattccctttataaagaggttcactaatgtttttcttaatcagttgcaaaaattattcccagaagacactgcataaaattaatgtattatccagccaatgagaatttggggaacagttcctgtttatgtatgtgtatgtattatttttaatgaaaaatgggtgaattttgtttttgtaaaggcatgtacatcaagatgaatttgtagtgcctcctgaaaacaatattatttcagagattctctacagcttgatcattgtgaagggagttccattatatagacgttcagatctgtgtctcaatgagaggtagatccctctggatgtttggtgctaatattttattgtacataaaattcccctagagaaccgaattaacgatgctgattttcattctaacagttggggatggagcccaggtagctggaattttacctgtacccaggaatttctgatgtgaaagctacacagaacagactaagaaacttttctaggttccctaaatgctatttgaaaatgtaataaggaaaaaacagcgttaacttaccagcttttaatactaaaatagatggctcttccttgaattcttttatttgagacttctaatgaagtttgagtgaagaccatgtttgatttttcccccttgtctctgataattaacataggcaaagctactgaaataaaggtcaacattagggtaaatatcaagcagggaacatagaaggagcccttgataatggctgtgagtatgtccagaaacaatatggtagaatagcaggaggttgaggacacaagtaaagcacgtgtccacgccagtctgttatgaataaaggctttggcatcagtcttcagtctgaagaccaataagaaatcacagtctctctctttaattgcaattatagaaaatgcaggaaaacatttcaacctaaaatgctaatgttctttcagccatgactgtgtctatgtgtgcactaatcactttcagcagttgcaaatataaggatggaagttttccaccctgcattgataaaatccaaattggcaatttgtttaaaaatggttatttggaccagattcagtgcctactcaaagaaatgtgttgggtaaggaggatgttagtaacacataaaataattattacatggcctttattaaaggtattttattatgtataatgcgttctgaagcagaaatgtaaaaggtgacatccattattcattcttttttcatattcatacagataggactataatgaaaattggtcttctgccacgggcataactgtgagtccttcagtaataaaacaaatgttttgtaggaccaggtgatttatatgcaaaaaacatctttacaaagcaaattttgtctaaaaaacaaggctcttgtttttaaaggagccgtgctgtattggcaaggccattgggttgtttactgatgttatatcagatacatctcaggaaacttaattataaaatggtactaatcctccataagtgttttaatcaatttatatttattcattttaaaattaaatagagaaaaacccttgttctctttcagtgagccaagagcaatcattcagagctgaacaatagaaaatgtggaaaatattgttctttttaggtattcagctggttaaactttgaaatctgtgtattaagcatagcaaatataaactcagtgaatttctgaattaagcagtgtgtgttttcatttgattatggttaggaaacagtttaaaatattagttgaaaggtaagctctacgttaatggatccattgttttgaagtagttattatctggtagaacactatactccacatgatggaatctaataacagcttggagagaacagattttatctttcagtggaaaatgttatcagtgcaatttttattgtatgtctaaggcattttggtattgtctaactttaatgacttaagaaaaccttaggtactaactgcaaagacatcagaatttcagaagtaggtaaaactggtaagttgcacctgtacataatcacttattaaactcagagtatggtcatcatttctcttctgccagtgagctgagaactagatgtaaatgtgagtctagaggaaggaatatagtggtaggttcttaggccactgcattctcaatgctcagttctgccatgggcagttagaattaactgttggaagacgcatgtttcccctgacagtggaatctaccatcaatgtgtcatgctgtttggagactaggttaattgaaaataagagaaatcgttgcacttcatttcttaaattatctgacctcatttaggaaactaatatactgtttatcctagcagtaaatcaatatgtatggttgtccataaatgttaggcactttccagggtagaaaataacctctggacatgttcactaagctgtagacagaatcacttaagcaattaaagttgttgaagttgacttttgaaaccccaacctgtagtgacatcaccagctactcagctgctaaataaagagggtgcatgtgtgggctctcccacactcgctccccgccacatatacacaaatatgaaattagtaaagacttaaagtattacttaatcactgtggctatgaagcctagaattatagaactgacaggataaaaataacctgatccagtctcttaattgtatagatagccagactcagtggctcaagcctgtaatcctagcactttgggaagctgaggcaggtgcatcacttgaggtcaggtgttcgagaccagtctggccaacatggtgaaaccccgtctcaaccgaaaatacaaaaattagctgggcgtggtggctcacacctgtaatcccagctacttgggtggctgaggcacaagaatggcttgaacccaggagacggaggttgcagtgagctgagatcccaccattgtactccagcctgagtgacagagcgagactgtctcaaaaaaaaaaaaaaaaaaaaagtatagttaggaaattacccctaccaaaaatgacaaaattaataagagttggattacaaattggctgttatgaaatagatgttccataattgttcaagacacctatatttttcagtagtctggtcctgtcgataagaccctggttttaacattcttgcacttatgtttaaaatagaaattgccttaaccacagacaaaccaaacaaaaaaataataactgaattggagaatagaaattagagacagaggcctctctgagttgtggaaaggtggataggtaagtgagggtccaggataggtaagtgggggtccagaagaaagtggctgtcacccagtgaatcaggaaccagggcaggagccatgagagctaaagggttacagaggaaaagtacaaggcagttcagaaaaagagacaccactaggggcctcctccttccccttgggtagaagattaagtcgaattcacaaggaactgagaagtctacctaatctggtttctgttgcctttgtaaaccagatgttcagcttggctgaacatccaccaaccttagcactgtcacccacactgattctcagaacaaacaggaatagtcccaagggaatgttgtaggatggagtttatgaagacatctgtaagaataaaaacctagccctgtttcattttcatgactacaagtagtattagagagtacttataagtgctttgtaccttttccaatatgatagataaaattaagtccttacaaccccagaaataattttattcttgacccttaacctcccaatttatatctgaatacaaatgctacgtagaacagttacatatcagggattaaatagtagcgtgattactttttattcaacaaagttaaaatatctttttaaatagtggtaatagataagaagaagctactaatttttacaatctgtaatgttgctgctctggcttctacacgtctctgcttcttacttgactccagccacactcacctcctcactattccttgaacacatcaggatagaaagagtgtgacgggtaatgcctttgccttggttgttttctctggcttgaatattttctccccatctctctgtaagactagcttcctcatcatctttaagtcaccttcttagagaagcctgccctggtctagcccctctgtgtactattatagtctatctcccccagcaaccaggactcctcacccttctcatgattgcttctttttcccccatagcacatttttaccttctactataagagatcatttacttatattttttgtcttttctcccctactagattatacaggttccacaagggcaaaagtagttgtctagtttgcttacttattcatcctcaaagcctagaactgtctagagcatagtaaatgctcaatcactatttttaatgaataaatgaccatatgaatattgacttttcaagataaaaatttaggtttactcccctagatttaacctacatgttgtgctttttcataatcacgatgtgctcatacgtcagttttcggatatgcttttcattttcttgctgtctcccctagagagagagagattcaaataaatctaccctagatgaagagtctatggggaatagacctcttcctccagaggcttcaaatagagcaacattagggtcagtcttggcatttaagtctcaaagaaattcagacttactctgagagagatatatagattagataaaagtatgagtaaaagagacactatatttctaagcaacagaaattccatatcacaacaaaccatgtccagatggtcaggagataatatcagaaaaaaacaatcttcactgaggccaagatgaggttcccttgaagccgaccaaaataaggatggtcaatttactgttatttctgcaaaatatatttttttctaatgtctatggacagataatgattaaaattcagggcttcaatccccaccagtatgcagtatacctaagtaacaagcatgcatatgtacccccctgaatctaacataaaacaatttttaaaaattcagagcttgtttgtgtaggtcctatcagaagagccaacatggtaggattcttatttgagtatcccaacaggcgtattctgggagaaggatgctaacaccgagatgcacattccaagaaatctgagataacagaaaacaatcacccccgtcttaatccatttgggctgctgtggcaaaatactgtagatttggagtcctgtaaacaacagaaattgatttcttatagttccagaggctgggaagtccaagatcaaggctctggcagatttggtatctgatgagggcccatttcctgattcatagatggtgcttctagctgtgtcttcgtatggtggaaggggcaaagcagttctctggggtcccttttacaagggcactaaccctattcatgagggttctggcctcatgccctaattacctcccaaataccccacctcctaatattatcgccttgagcattaagattttaacatgaatttggtgggcacacaaatatttagaccatagcaccaccttaaaccttgctatgtggcttatcaacccttctgtaggcagtggactgcccaggctgggagccatacgatgcccttttcctctgaccttaacctactgtcccttcatagatgccacactctggtcaaagacacagccaatacctgccgaagccccaatcattagtagtcagagaagtggtccagttaaacctgtacagttgccccaaagatcttcctaaagttcaaatgcaagtagtgcccttcttttcttgaaattatgtagtgatttctcccttagcttcaaattatttggcttggtacaaagcactctttgtgatatggtctttgtcctggcattgatcgcattcttggtagtcactgatgtcctcctatctcctgtgaccctaaagaagtgctttgccctttttgccatatgatgacacagctagaagtcaccatctatgaacaaggaagtgggccctctccagataccaaatctgccagagccttgatcttgggcttccactgatctcctatgtgtctctcccaacacgtgatggactcctggaggataagaattatacgttattcataccttattcatcctcagtgctaggtttttggaggttctcagtaaatactggttcagtggctgaatggctaaatggaaatgtgatgttgctaaactctaatatggatgtttcttctttcctcaaggactttggcattatgttcctgcaccaccttgtatctattttcttgattaccttttcatatgtcaacaatatggcccgagtaggaacgctggtcctttgtcttcatgattcagctgatgctcttctggaggtaaaagttttctttcatctttaagaatacaaaatccaaaatttaggaagtccccaatctcattagctcttcagtgttatgctagatggtgcttgggtacaatagtaaataactacattgaaactgcagagtgtttctttgtaggttaagctggtgaaaatgagattctaaattagtatgtaaacttttatacaaaaaaaaagttgttaataaaatgctgaaaacctttactgttctatacttaagaaatgaatgattttacaaaggaaaatcattatttgattaggttttgttttgtgtgttgtaacttttaccctgatttattgggaaattttgtaaaacgcagtttagttactaatggaaactatacatcccagtaaaattaagtaggggtcattgtttttattgccaatacacatttacctaaggtttttacagtggaaagggcatatgaattgcaaattttatgtagaaactatgttttctatatatgtaagtataaggaatatctgtggaaatattggttacatatgaattggttactattatttagaattcttaaagtggtaaaataaataaatatgttctagcatatttcaaaaggtaaaatcccaaggaaaactgtgatgtgatatttacttttaactgtggctcctgtgaagagtcatactcaataatgttcataattaaagtctttgcattttatattaagaaattaatataactggtcagaattaccttataagagtacaaagcctatgtagaaatggttcttacaatctgatctgaattctgatttttttttcctttaggcccaccgttttgctttaagtgctttgttttgccacctttgaagcatttactatactgtgaatgtagactagacatgccctcaaataatgacctgttattgcaatataagcagaattctatgctataaaatttgaatctaccataaaggcaattaaggtttgaggtatatacagcactttgttaaaaactctggtcctttagtgttatgaaacagaaaaatagtcctaatgggctaggtaagtccaacgataatttgttgctatgatttttaagtgattcaagctaacctctattcagcatattttttagtaggataaatataattagtataagggcaatcccctggaaatgagttaccatttggttaaatcttaagtttgcttgaatgtagaaatttatgctgcaacctaaggctgtacaatcaatcctatacaattagccaacttcattgcctgtggagatggctggcatgatgtttggtagtgccatgattcaaaaaatttctaatcaagttccacttgtatccagaaaaaaaaattcagaaatctcagtcatgtggcttaaaaacaaatgttcttcatcacctagattctcttaaacattataaagtaaataacacgtagagtattcaattaatgagataggtcacctgtcagctcctcaacatgttatcttatggcctagacgtttctgaaaagtttgtgtttaaagcttatttactgaatactggtgaaaaaatataaaagaaaaatttcatgatttacctagccaggagaaggtagaaggtaccttttaacataatttatggtgttacacctgaagtgttcatgaaattaaaagcttataatcctaacttccacccagttaatagatatttccccttaggaatacattcctctcatagctttgtgctttatttaaagcttttaaattatagcctctgtggataatgtcaacaatcttttcaaatctgactcagttaatttaagtttccaagaagtagaaaataatgttataaattcagaaggcatcatgaatttataaccctgtgtgtaggtgctgtgaattctatgcaaaaatgtaaaaagagatgattaagcaaaattgttttcagtctcacctgtttttagaatcatctgtaaaaaaagtagatggtagagaaagggatgtgatttcttccctagactaatttataatataaaaagtcttcacttaaatcactgtcataaattatgagagtacttttcacagacccttgaacattagtggctttcatctaaaaatgacccattcatgtagttttgaaaattctacctaaatggattagttgaaatgacatcatcttgacactttcttcatttctaagttcatgagagtaagccagaagagcatctccccagagtactccttgtgcctgtttaaagaaaacctacaattttaaggagaaaggaagaaaaacacagaaaagctccatatattctatataaagtttgtggccccggtatttgagattcataaaaaggtttaaaggattgtccagcacttctgtttgaactgttaggccagatttctgttttggtgtctctggcttgctagtatcatctatgatgcaagaatctcttatttttctctctgtttttctgaaatcaaccatacaaatgaatttctcaggttgctgaatattttattaaatctgtaacagtcaggaattctacttatggctaatgctgcctttcactcaacttacgggtaatttataaatactggtgcatgatgtatgacatttcaatcgcaggctgaaatgcataaaaatgcaggcaattttatgcatctggtaaggtatatcttataggagattcatgcatattgaaagaaactttttattatcagtttaactacattaatatatcacattcctttctttcataggctgccaaaatggcaaattatgccaagtttcagaaaatgtgtgatctcctgtttgttatgtttgccgtggtttttatcaccacacgactgggtatatttcctctctggtgagtatgccagtctccttcctgatagagccaccctttccaaataagctttctgaaccattttccttttgaattttactgtaagtatttacaggtttaaatatattgggggggaggggaaatacctcaagaagctgcttgatttcttcttccagaagagggttgcactctttactaatgatttccacaggatagttggaaaaggatgtggcttgcatggcttctgaagccacagaaagccatctgtcatagaaggcactagtctagaatatgactcaagaacctcagctgtgaaggttggaattaagaaagaaaccgtggtgttgcaaacaagtatatgacaggaatctcctgtaccaggggttcacagagggttgtccctggattagcagtagcagcatcacctaagaacctgttagaaatgcacattcttggccccaccccaggcccactgagtgagaaactctggatataagtcctggcaatgtgttttaataagccttcctgatgattctgctgcatgttaaagtttgaaaaccactatcctagataattcttttcattagctgtatacctttctaaccaaatagagtctttgaattatatccaaagtctcttccagctttgtgttacttggcaaatagatgcttttcatatttcttccaacttactgaagaaaaacgttgaccaagagggattcctgctccacccctgaagaatttctttaggttgacctcagtcccccaaacaccaatcttcctgtatgatttttctactcattactaagccttctaactgttagatcgtcatgcctgctatttccccaccttgtttcaggtatataaaagagctttgtcagaggtcttaaggaattcaggatttactctgttgagtcactccctgcacaggtagaggcagagtcagaaaaagaatgtgaagtcagattttagaaaacctttgctgactcctgggtcttcattctaagtacttgcccccatctgtgtgattagccatctacaacagtaagcttaccagtctagaatatccattctttgccttttccatattgtttaggtgtggactttaaaattccaatgagctgccattttttgtgtgtatttagtgaaaatttactggtcatttgctgcattaccagcactgagatggtactggtaatgctgataattcagttagacatagggctgcccttggggcatttacagttgaattcctacaggtccttttaatattccagtttataatttggggtatggggtgggggaggccagaggttataaattttttttccaaacatttactggacataggtaatatagatggattatcaatatttaaatagttttgttgcatttactgaggagctctgttggctaaattatacattatagcagatatatttgtgtgtgtgaaatagtgactcacctgtagagggtaaggtgtaatggaggtagatcagactttagttttaagaagcatttcatagacctatttccccttcaaagactgtgctttaggtagaagaaacaaaattatttcccctgccttatattccttttgttttcaaccaatttctttggattcaccaacaataccttccaggttcctcttgactatatttgaattcatcatgagtcatcagaatattggtaattgatgggtttagtaacacttggcttattctctgttatatcagcaatccatggtcctcaaagacagcatacaccatgattagccttttaagaaccatgcactgctcctccagacttctcttccagtcacaatacatccttctagaacaaccctgtccaaaagaaatataatgcaggctttatagtaatacaatattttctagtagccatactaaaagttcttttttttttaaaagatgaaaggtgatatccatttaaataacatatttaactcagtatattcaaaatagtatttttttttttttaagacagagtctttccctgtctcccaggctggagtgcagtggtgtgatcttggatcactgcagtctctgcctcccaggttcaagtgattcctcggcctcaagtagctgagactacagcaccaccaggaccggtctaatttttttttttttttagtagagacgaggtttcaccatgttggccaagctggtctcaaactcctgacctcaagtgatccacccgcctcggcctcccaaagtgctgggattacaggcatgagccaccgtgcctggcccaaaatactattttaacgtatcaacacattaatattaaaatgttttgagtatttacagtcttttaatttatattaaatctttgaaattcaatgtatatttcacattaccacacatctagatttagtttaactacatttcaagtgctcagtagccacacgtgcctagcttattggacagtgcatttccagaaaagaacaactatcacagtaaccagattcgacacattttctggggtctgagtatcttgattgacattcttaagtctgctgtttgctgcgtccgtacgagtcaggatagtatactggttagctgggacgtttggaccagtgtgcatgggttcaaatcctgcctccactgcttaacacctttgtgctgaagtttcctcatctcttaaataggaatgatgatgatgcccactcacagcattgttgtaaacactaagtgattttatgtctctatagagctaagaaacatgtcaggttcatagtaattgctatgtaagtattggcttgttaagtgagattatttatttaacgtgaaaagagagacctcttaggaaatgagtaagaaaaaaagaacagtaactcaatagaagtatttggagtggctctgaataggtacggttcaaaaaatataaatgacaaaattatagaaagatttaacctcaccataagcaaattgtagcttccagaaatacagtcatgtaccatatagctatgcttcgtggccagtgatggaccacatatatggcagtgatcctacaagattataatggacctaaaaagttcctatgagaacatcatagcgcaatgcattcattactgatgtatttgtgttgatgctgctgtaaacaaacctattgcgctgccagtcactcctcattcttccctcgtaccatcccctggcaaccactaacctgcttgctgtctctgtgaacttacattttgtggtcattttatataaatggtttcatgcaatatgcgatcttttgtaacagttctttcagcttcctgatgttttcaagatttatccatgttgtagcttgtatcagtacttcattctttcttattggtgaataatattttattgtatggatataccacattttatttatccattcatgaggtgacagacttcaggattgtttccattgtttggctattatgaataatgctgctattaatgtttgtatacaagctgttgtgtgaacacacattttcagttttcataggcatatgcttaggaatggaattgctggattacattgtaactctaactttttgaggaactaccaaatgttctttttctttagtttttgtttttgttttttttttttgtttaaaaaaaaccaaaaaacaaaaactaaagaaaaagaacatttggtagtgtttaaaaaaaaaaaaaaaaccaacggggtcttgctctgttggccaggctgggctacagtgatgccatcatagctcattgcagccttgaactcctgggctcaagtgattctcctgcctcagtttcttgagtagctaggactacaggtatgtgccacaatacccagctgatttatttatttatttgtagagacggggtctcactgcattgcttaggctagtcttgaactcctggcctcaagcaatcctccagcctaggcttcccaaagtgctggtattacaggtatgagccaatgcacccagcccaccacactcttttacagagttgcagcactattttacatctgaccagcaatgtatgagagttctactttctctacttccttgccaacacttacgatttttcatattgtattcattttagtgagtattaaatggtatcttattgtagttttgatttgcatttcaaattctttacccatttgtaatttggttatttgtctttttattgttgtaaaagtttatgcacgattatatatctgaatgatgaacataataatgtatattatatataaaggacttatccgatatataatttgcaaatgttttctcccttactgagggttgtctttcacttccttgatgatgtcctttgaagcataaaagcgtttagatttgataaagtttgtctattttttcttttgtcacttgtgtttttgatgtcgtaagaaaccattgtcaaatccaaggtcatgaagatttactcctatttttttttcctaggagttttctagttttaactcttccatttaggcctatgctgtgttttggggtgatttttgtgtatggtagaaggtaggtatccaagttcattcttgtgtgtgtggatattcagtcatccccacaccatttctcgattggctattgcttttattatgatcatcttcagcacgtaactctaacgaagcaaacttgtgtttgtcacattcctcatttaatgccctttactggctttcattcatttccacctcttggaatcacactatattttatctgtggcctgcttcctaagttgactcattcgtcctgcctgggaactcttcatcctgtctaataagccaggaggtcagacacgtttgcacagccctttctcctctccaagctgggatgctatccaagggagtgttgattatttctgtccagaggacatctgggatgcaaccctcccacacacaggtcaccaaaactgatctctccactgttccttcctgatgatatcactgtcctctgtggcatccctgtgtagatggttccagccaatgcctggccttgctgttcctaggacatggcttaccccagaaagtgcaatttttatatccactctgtgctgctgttggccctgctgacctgtttaatgaccctattttggaggggaggataaagaaagtggcaactcctcctcttgcccatcactacactgcccacagcctcaccacagaatcccttgctttgctttttcttgttcacagtctttccaggattgagagataagtagaatatgatgggggaagagacttttgttgtcaaataattcagctaccacatgaataattccagtagaaggaaaccctacacctctaaagacagtcccttccagttgcacacagtggccattattagagagttctgccccaggctgtcatagtttacctcccaatactttctgcctttttctcctagttctgaccctggaacgatatacagtgtctaattcctgttctgtacctcagcccagccagtattcaaaaaacaaaaaaatccaaaaattcttactcccccctttcctattatcttcatcaagataaacactgtaaattccttcagtcacatttttctctggctttcatgcttgtcttttctgattctgaattttattgtatcaaatcatctgggaacattgcatcagttcttcaaaatgtagttttctctaccagttgtcttaataataccttgttattttgaatcagtacttgtatgattatgtcatataatgactgtgaaataatcttgttaatactgttatgagtttcctccaggtacacgtgatggtaatctttgtagaagcatcatcttctcacattttactaacatatgaaactctgaaattgtaacttcataatatgaccatcctagaagccaagataatgtgtctgtatttcctgttctctgtaacaacattcttcttctgtaattacatatctttttgctaaaacttgagcaaacatatgaataggtttactatatcaagagtcttactgctttaccagttttatcaaataatcaaatatttagtgggtctctcaggatttatctggtaggaattccttcctaatgtgtccagaattggtgggttcttggtctcactgacttcaagaatgaagccgcggacccttgcggtgagtgttacagctcttgaggtggtgcatctggagtctgtcccttctgatgtttggatgtgttcggagtttcttccttctggtgggttcgtggtctcgctggctcaggagtgaagctgcagaccttcgcagtgagtgttacagctcttaagacggtgcgtctggagttgttcattcctcccggtgggctcgtggtctcgctggctcaggagtgaagctgcagacctttacggtgagtgttacagctcataaaagcagtgtggacccaaagagtgagcagtagcaagatttattgcaaagagcgaaagaacaaagcttccacagtgtggaaggcaacctgagtgggtggccactgctggctcgggcagcctgcttttattctcttatctggccccacccacatcgtgctgattggtagagccgagtggtctgttttgagagggcgctgattggtgcgtttacaatctctgagctagacacaaaggttctccacatccccaccagattagctagatacagagtgccgattggtgtatttacaatccctgagctagacataaaggttctccaaggccccaccagagtagctagatacagagtgtcgattggtgcattcacaaaccctgagctagacacagggtgcagattggtgtgtttacaaaccttgagtttgagacagagtgccgattggtgtatttacaatccctgagctagacataaaggttctccaaggccccaccagactcaggagcccagctggcttcacacagtggatcccccaccggggctgcaggtggagctgcctgccagtccagcgccgtgtgcctgcactcctcagcccttgggtggtcgatgggactgggcgccgtggagcagggggtggcactcgtcgtggaggctccgtccccacaggagcccacggagggggtgggaggttcaggcatggcgggctgcaggtcccaagccctgccccatgggaaggcagctaaggcccagcgagaaatcgagcgcagcgccagtgggctggcactgctgggagacccagtacaccctccgcagccgctggcccgggtgctaagcccctcattgcccagggccggcagggccggccggctgcttcaagtgcagggcccgccaagcccacgcccacccggaactccagctggcctgcaagcgctgcacgcagccctggttcccactcatgcctctccctccatacctccctgcaagctgagggagtgggctccggccttggccagcccagaaaggggctcccacagtgcagtggtgggctgaagggctcctcaagtgccgccaaagtgggagcccaggcacaggaggcgccgagagcgagcgagggctgtgaggactgccagcacgctgtcacctctcactaacacatccttaaataatttgattgttcctttattaaatgacatctgtagaatcagatagtttcactgttgatacaattaacaacagactttcatatcaatatctttttcaaatacatacttatttttcccagatggtgctgtatgtagtcaagatcaaattttaaccaagtctttatttatcatatacttttaaagatttgggtttgtagtcagtattcaaaagcttcaatggtatatattggatacatgttgcactactattatcaaacgcaatcactggtgccccacctacttgccatcactcaaagtgttaaaagtttaaatattttctcttgtatttaaatttttggaaagtcatgtctagttagctctcctcaactcaaaaatctatgcattgtagccttgactttgtagtcacacagtcagtgatctgatcctttttgagagtaaatctacccatcattgtaagctgttacaattttcattgatctgcatctctctctcttatagtccacttatgtgtaatctctacgttcctaacaatttcccgtaaaagctgtggttttaatatggcatagattgtactcaaactcattgtaacatccatcaacagtgccttacagtggctactcagtatttgttaagtgaattaggtactctttaattataaatggtctcatgtccattttcttagttgatttccttaaatctttgcaaagaaagataggtgcaatttctccgttaatacacagagaaaggagattcaattagtcagtgattcaccgggctctctggactctggtctcctaatatcagttcaattcaacaggtgcttactatgttccatttgtcctttctacaatacaatattctcttatttaaggccataaagcatttgatgagatacatttttggtggtagttcaataaaaaatggtcatttaaaaatgattgcctctgtcgttctgccccagtcaagataacatattgcaaacgttatcatctatcagtgatacattagaatctggtaaagaaaggagaaaattcacaaagatgctgaaagagaagtggcatggtacagtggctagaaaggctgcttgttttgagtcacatttctcctcccacagtgtctgaagaccagatgtgtgatttctctgcacctatgtcctcatcagtaaaataatggtaaatactctacctaccttaccaaaaatgttaaggatcaagtgtaatagtattttacaaactataaaattctttataaatattaggcatttttcaaaatgtgctgttattgttaaagatataaattcccattatagccaagtggtcagaagttcttattatattttataacctcctactagtctatattaaggaatcataaccatagatacatctgaaataaaattctaaaatggtctatccaattatgaggcttaaactgtctcattttagtggcttctgttctcagtactcagtaagcatgtaatattgaaactgtaccagtttgccatattctcacaaatcccaagtgaatgggcataccactgttgccagaacctcttcccatggccagttaatgattttccacatctccagtcatgtcccatgaagtgccaaggccttggctacaggagggttagagtcaaatacgtacctttactggtcagctactgttcagacagaagcatctgccttctcagaatgttgctttctgttgctctgttcactgaaaagtaggggaattatctgtggatttgttctctctgaagatttctacaattaaaaaaaaaacaagttgactgggcatggtgactcatgcctgtaatcccagcactttgggaggcctgaggtgggcagatcacgaggtcaagagtttgagaccagcctgaccaacatggtgaaaccccatctctactaaaaatacataaattagccgggtgtggtggcatgcgcctgtagtcccagctactcaggaggctgaggcaggagaatcactagaacctgggaggcgaaggttgcagtgagccgagatcgcgccactgcactcctgcctggagacagagcgagactccatctcaaaaaaaaaaaaaaaaagttacagaggagactcagtcatccttttaccattttccatgataagatttgaaattcatctagacatgtaggagaagattagctttttatctgatttatttttcaaaatgtattttaccaaagtggcatggcttatatgcttttctgaattgttgataaggaacagattagtctcagacttcacacatttgagaaacctgacttttcatgcaatcccttgacaaatttgctctgaaatttgccttggtgctggtctatgttaaatatattagaaagatttgaaggatgaaacctgctatcttttgggcataaggtattttggtgtgtttttagtaattcttacatctatcagcattgtttaataccttcacaggatgtgaaagaggttagatggaaataatgtgtgttgagatgtctctttcagatgaacatacaaattttaatgtaatttcaggattgaagggctagaccagaggtccacaaagtatggcctgtaggacaaagcagcccactgtctgtttgtatcagtaaagttttattggaacacagccttgcccatctattaatattgtctttggctgctttatgctacagtggcatggctgagtagttgtgacagggttatggcccagaaagcctaaagtatttgctctctggtctcttgcagaagagacttgccaactctctggctaagccattaaacattagtctcgtgagtaataataaggcagtgtgggtggagtgaagtactgaatacattcagacttggaatagtctttaaaactgttgtccacgttaggggaaaaaaaaaatgcaactactcttttttttttttttttttttgagatggagtcttgctctgtcacccaagctggagtgcaatggcgcgatctcggctcactgcaacctctgcctcctgggttcaagtgattctcctgactcagcctctcaagtagctgggattaaaagcacccaccacgcccagctaatttttgtatttttagtagagatggggtttcaccaggctgaccaggctggtctcgaactcctgacctcaggcaattactcttaatattgagaagggagaacagaatatgctctcgattaagtaggctttttccttttgtgacttgaatcaacaaaaaaatgcattgtcgccggccagtcgcagtggctcatgtctgtaatcccagcactttgggaggccgaggagggcagactacctgaggtcaggagtttgagactggcctggccaacatggtgaaaccccatctctactaaaaatacaaaaaatagccgggcatggtggcacacgcctctgtaatcccagctactcgggaggctgaggcaggataaaattgccagaacccgggatgcggaggttgcagtgagccaagattgtgccactgcactccagcctggccgacagagcgagactctgtctcaaaaaaaaaaaaaaaaaaaaaggtgcattgtcctagtaacgctctctacacagaattaatgtcttaagtgttccttcccagtccctgcagagaaggctttgctggaggaagagaaaaaataaaaagattgtttgctcaaggtattacaagatgtgtttaccatctagggagaaaattcagtatgaccatttcatctgttttaaaaatatctgagtgtcgtaataaagtctcatgctaggaccgagatttgaaaattgtgtatttgaccaggcatctcacttacttgagagaactgatgttttatggaaagtcctagagcagatgaagaaccgtcgtcaactatgtttctatttgcttaggctgttatacagcacagttatataccaggctagtgctctccatcctcacttcccatcacctccctgactttggtcttgggtctctcctgccaactttccactcccatccatgctgagcttcctcccaactgtcctaagctcagccttggactgccatgtgcctgtcctttgccttcttccctgtgtggaccagtaccagaaccatcccagaaaccttccctgcagaatcccagagtgcagggctctgtggtgctatcagagcaggccacgctggctgtgtcctttagttggcagaacctcttccatgcctctgatggcagtgttgccaaggagacggaaccacaggatcattggcatccctagaatccttctgttccttgtggggctatgtcttatcatatattatcatttaacttttgatatctttgtgtcttgtttcccaggcaagagagcaaacacttcacaaattcctcatagataaagaatcatttcttctttatcgatctgcttatcacacgttactgtgagcctgctgtgcatcaggcacagtgtgggtgttggggatgtagatattgattaggttatgtgcccaggaacagctagcactaaaaaaccatcaataaatatttgttaaatggagaatgaaattttagcgtttcccctgcagtttggcacaatgacgactgagactttgcagcccatgtgcgtctttccttaagatacggaatcggcccagtcgaagaagacagacaagagtgacttagtagctttcaaaagcaggagcatcccagccactgaattgttttgatcagatagaaacagatcagatggaaacagtactgcctttagtaagtttaataagtcctgcctttatccacagctggtcataaaacagaaatgcttagtttataaagtggattgtcagtgaattggaaatacaagcatcaaatgtatttaaagaaaatcacaaaacaagtaggtctactaaaatgcagactctggctagctgtgaccagcagcctggtctgaggctttgatgattgcgtgttgtatgttggctcctgagtgaagcaaagagagagggcagcatgggaagggaaggacaaatgagaaatagcagggggtggggaattatcttgccccttccatgcagtcgtccaaggaagagttctggcataaagattttaaattctgtatgagggacctggtgagtcatccccagccaccctgtggatttctcatcaggcttactgtgttgtcaattaggtgcccaacctcaaattcgtaacaagctccatgtctctcagggcaagttgcagctacccaatgtaactatcttaagtacttttttgaaaggacggcatataaacccacttataattttcacaaacagttgtgtcttaagactactttatattctacagtctgcagccatgcattaaagagacattgcaaaataaatatttaatttgatttgtttggcgactaatacattgtgttgtgatctgtgagttattccgaagttatgaagaaatgtagaatctaggactcattaaaatatttattaaaattgttcaaaaaggccattggaaacatgttcaaagaaatgattctgcatacattccatataagaatgaccagactgaaacaattccaaatgcttttaaattctgagagatacagaagtactgttttaatcacttaatatttttagatggtctttgtaattgatatataaatatagcaaaatgcatctaatgaaatggaattgtctgttagctgtaattctgctacctagtggtgtatgctaattaaatagggaaatatttgggattgtttcccaaaataacatccagagagtgccctgagtcacttctgttccaaacgagcctcctacctgctaattctgtcgtgctctgcagtcataactgatgttaatctgaagcagcacaagactgtgaaccatcaaataatagtaaaatatttttcagtggctttttattataccttttgactaataataaatgaacaaaacaaaataaggaaaaatttctagttatcactgagttaaccagagtatttccattaatcaagattttagtataccaaattttctagtttttatctcatggaaatataagggtattttatcttttgtatgctactgaagggaaaacatcatcatacagcaatgaatacttcaaggtgatgttcaagtatcatttgaccatgggaagggagggacaaaggagaagtagcagggggtggggaattatcttgccccttccatgcagtcatccaaggaagagttctggcataacgattttaaattctgcatgagggacctggtgagtcatccccagccacccttggggatttctcatcaggtttactgtgttgtcaattaggtgcccaacctcaaattcataacaaactccttgtctcttcagtgaattcagaagatacgtgaagcactgaaggaatttttctttgtgtacaagttccttaaattacttccctttcctagaacactgcattatgttaggagcacaatttgccaagtcagcatgtcatgaaaaatgatcagaaccctttcttatacattaagtctacaatatatcggagaaataagtcagttgcttcacaaaataggttaaagctgctgtgaagaggtagggaagaaacagagcttgaatgtctctctaagtaatgaattattcatggcacttgacccccttcttctttcctagccatatgattgcatttatttcaaattgtgtctcccccatcccattaaaaaatttaagtagatgttaaattccctactctcagtagcagtcacatggcattttcctgaagcactgttataatggaattgtttggtaatcattcctttccttgtcacgtttctccactcaagagtgagttccagcagggctaggaccacatctcattctccctttatgtgctcagtcccttgcacctggtgctggtgcctcttgcagttcatctgtgtgatttattctgcatcttaatttcgaattcaccttcataaatggccctccccagactggtagcttgtttacttaattcaatctaatatagtataaccctttttactgttttctccccaaatcaaggaaaaatattctgaatgccaaagtaatacttatttaacttctctcttctcctgagcacacatactctacctaattctcctccattctattattttctcaccccacatgctgtcccttacagctgttgtctgggttgaactctctttcaggcatagtatgtaggggactggcctttgggcaacccataccagacataactgacttgtggcttttctgactctttctctctccctttttttaaaacttgctctctatccatccttcaaaggtttggggaagatgatgaaagattgctttattctgaaaataactacatacacaagtagggtcattgtttatttttatcttctggcctgctttttttccagaaagaagtcaaataaagtgatgcttggttgtgtgtttacaatgcaaagagatagataaatatatatatatcaaatagctatatttacgtatgtaaaaaaaaagatacagtgatgccgagttgtgcttaatatgatctacatcagataagtatcacaccagtggcttccatgagttcatggggcttcttttcgtaattaaatgtggagatattgtcacttgcttcctgctgcaaaacaataaaaggaataaaatggaatatgtttatcacataaataagggccttaatggttttgagatttcagacaaaacaacttcattgcatttacgtgaaaacccaacagtttcattgaaactgtattttgctggcactttttgtgcttgtagagtcttggtacaacaaataggccttaaaactctcatgttatcatttagaactagaatcaggatacgcttctctggaccagtatcttgagaaccttgaaaaacagctaagtggatttccacatcacctgagaacagatggagattgttttccccttagtgaagaggaaagagagttaattttccttcatgttaacactgttcccagtatgcaatgacaacttgctgctccttattgcttctacatctgaaaacttcttggcagtacaaagtaatgcacttttattggagaaaagggagaaaaatttgacagtaaggtatgtcagttactagagccgtcatttaaccaaatgcgtatcttacagtagacgagtatataaagttaagagataagcagctcaactccagcacaggaggaagactgaataggtttctagggagtttttccagtcataacaaaagcctctgacaattctggaaacatgatgatggtagaggagcaggtaaaggttgacaagggtcttgcccaagaatctggattgcaatggacacatgtgatagtgatcacttcccatgcgtaacgtggcttatcgtcaggaaagtttctcaggccttctcttgaacccattgggggaaaaatcagattgccaatactttgcttcaaaatggaggggtcagcagtatcaaatactgcagggcagatcaaggcaaatgaaattaccagtcgctgtgaaattgtacatgttctcttcttcatccataaaatgggagaattggaataaatctcacttgctaaaagttttagagctaaaagctctaaaagttttatgatgttatgctttggcaatcatgagggggttggtgaccttctagttcaaaaaaaatgtatagaattatccatgcaagggattctggtataggaggtgtgggcggtgagcaaaaagagatagtggacgtagactacttgtttaaaaagcctgcagtgtatagaaggaaaaaaaaataagctgaccatcagttattggctgggagatgcccaggaaagacatgccttggctcacaccctggggcagattctgagggcactgctgctggaggctttcagctaactgtgcccatcacagctgagtgacaaaatgtcttgcagggagatctgagcggcacatgtccttggtataatttatgccactataaataggacactaacactgaaccatttatgccactataaataggaagctaacactgaacctgatgaacgaatccatcaggaacaaaagacagacagacacgcacacacacacatgcacacgcacacatcagcatggctgtatttggccatctatcagtagtcaacggttaatcagactgtatattgggaacatacatggctttgttttcttacagacttaaatttgaagaacagtgatgatgaactcattctatatcactttggtttaaaagttgcttagcaatgggacaaaaacaaaagcaactaggtttatatttagtgctctatctatatgcatctggagcacatttcggaaataattcaaaaaggccaattcatttcatgccttctgctactaaatgaatgtgggagtcaagctgctattttcacagtgcaagacatttattgttgacttaaaaaaactctcccacttgcacataatcactatcctgacaaatgacactatagagtttcagctccttaagcataaggtagaacaatctttaagaaataaatattaggccacaggagttaaacataaagtatcatccaagcacagattcaaagcatttaaacacatacattattctcaagtggaccagttcttcactgagtatgtgttctttaggtttgcaagactaatcttatgtctcacccctcctcaattgaacagtattggcactttgattattcagtcagtgtaggactttttaactccgtgccaggctcatttgcagctatcagtgctgatacaacttcatgccatataatacttttaacagactacttccacacccctgcaaaaaaaaaaaaagttaataagcaactgatcaattaaggttaatggtagatttaggcctataaattgtacccatcttagtcatttctgcttcctaaaaatttatacaagaacagtttttttctggggtaagagggtgtgattgacaccctaattctgtttcttctgtttagattgtggaaatataatcagaccgtttcagggctctatgagtgtgatccttggacatgaaacagtttccgagtacagagtatgaagtgctggtgagcttttgtcaccaacagcacttaagaagtattttggccaggtgcagtggctcatgcctacaatcccagcactttaggagactgaagaggcaggatgattgcttgagctcaggagttcaagaccagcctgggcaacatagtgaggccccatctctactaaaaattaaaaaaaaaaaatcagccaggcgtgatgtcacatacctgtagtccctgctacttgggaggctaaggcaggaggatcacttgagcctggatgattgaggctgcagtgagctgtaattgtgctactgcactctgcctaggagacagaaggagaccctgtctcaaaaaaaaaaaaaaaaaagaaagaaagaaatatttttctaggcagctgagtggggtgactcacacctgtaatcccagcactttgggacactgaggcgaaaggactgcttgaggccaggagtttaagactagcctgggtaataatgcaagaccccatgaccccatctctatgaaaaactgtaaaaattaaccaggcatggtggtgttttgatttggtattaatttactcttagtaaacttgataaaatcagcactcttctcatacttttgttaccattactgtaagtaagtgtaataaggccttccttggtaaagagtttttgtgtatattaagtaaatatgcacatgaaagtatctcaaggtttaaagcactgtatagcactgtgtctatttcatttgaaaacgatagttgatacatgtacacaatgaggaccttatcagacccaagtgggctttttttttaaaaagacagaatcttgctctgttgcccaggctggagtacagtggcacagtcatagctcactgcagcctcaaactcctgggctcaagggatcctcctgcctcagcctcccaagcacgggcactacaggcgtgtccactgtgcccagctaattaagaaaaaaaaatgttttgtagcaacaggatctcaccatgatttccagcctggtctcggattcctggcctcaaggatcctcctgcctcagcctccagtgcctggccgtaggtgggccttagataagggtacctatgtagaggaggattctttgagggaaaaaggcttaaattgagaaacgtctgactgttcaaattagaacagggaaagtgaagaataatccagctgcaacatttagtcaaagagaatcgtgtgatggctagcattttccttccaggttttcagatggagctgatgcatgtgtaaggacagccctggcatggcaggcagtgcacgacaggcttgctggcagcatgtcactcatgcctgcccttcccctttactctcatgctacctcgccctcacagaaggtgatgaaattctcttaggctctctcgcctctggtccctgtctgataaatgtgtggatctgactctattttcggtggatttgtctagaatttgtgctaaggggatccgttggtggctgtaccatctctttctctccaccactttttatccgatcctgtgaagagctattgcttcctgcttctgtctaccttgacctcttcctgatagcatgccagcctcttaagaggcacaagcaattgtgatagaggccagactgaggactaggatgacagcatcttccattagagctgtactcactacagttgtgtctgtaatacataagagggtctcaggaaaaacacaatgaaaacctttcaagactgattcaattaagtgcctcccaggagagactgagccaccaacaatggaaaattcaatattggctcgcagaaagacgcttagtcacataaatgtcctttttctctaatgtgtaaggaaaaaattctgcggcgtccttttgaaaatctgacatttgcttttttaaaaagtgctacctctttcaaattctttaataccagtattcatgggaaattcattaggggtgatgtgaaattataaaatgaagggctgcagtgtctaaaaccttttgttctgatacacatttgaaatcctgcatgaaattacccatgcttatgactccaggcagggaccaaaaagaagagtgtctgttgagcttgaaatgcgagtgtggatgccaaggattttgctctgtgtcttttatgtgaataaagaaatataatgtgcatcttcttttcaaaaactgaattcaatattaagcagcattcagggaatgagcagttttcttttgtcctaaaagtgccattgtaatagttgaacatcatatgtacagtttataaacagcttttgagctatgtattgggaaatatttagtgacagccatttctgcagcaggttcacgatggcatcaacaggtgaatgtgaactattgttattttctttaggtgtgataatggcattatggtgagtgttttttaagagtttgaaatatgtatagatgagatatctgtacatatatatagagagaggtatagatgcaaacacactgaccatgagttgattattattaaagctgctgaagaatgtgtattgaataggtcaattgttattccattttctatttgtgggtatatttgaaattttcaattataaaggttacacacttaagtgaaatagttttattttatatacagggtgagagactcaaattatgagttaggattccctctgtgacaaatgaagctgggcgtggtagtccaggccttgctttctgcttacagctattagcacagggcttgttacatgtgaccaacaggaagaggtgtgaatcagcttggctctgcaattcagtgttggtggatggtgtgaagattttaaatgacagatggtggtgattattaaatgataaataatggcaacttaccaggaaccaaacagaaaatagtcactttatgtttctggtatgcatctgaattattcttgttatataatgacttttttaacactgttgtagatgaacagtgcttacgactatggaagtttggaacttcagagaatttaaaactctatcatactgttacctctcattcctctgattagaatttacatagattaagcaagtagtctgttgagggatagacttctaagtaagcataaaatggaacattataacttggagtttgcatcacagattttttataagttgttggtcaaagaaaatgtcatgattttttaaagtaccaaatgtaaatcgtaaaaagcttaggcacagggctaaccaacagggatacaaaatgaatgtagtacccgtgctccagaagcttgcaatccagttctaacattgggcagccagctgtaacccacagcagacagccagaagtggtaaacagcagtagaaaattttacagtagaagttgtttgtttgtttgttttggggggtttttttgagacagagtctcactctgttgccaggctggagtgcagcggcactatctcggctaactgcaacctccacctcccggcttcaagcaattcttctgcctcagcctcccgagtacctgggactacaggcacatgctgccacacccggctaattttttttttttttttttttttttttgtattttagtagagacggggtttcaccatgtttcccaggctggtctcaaactcctgagctcgggtaatccgcctgcctcggcctcccaaagtgctaggattacaggcgtgacccactgcacccaggctacagtagaagttttgatgaattctgagccaggcagtgatgatggtctaactgagaaaatgatatttgagctgggccttgaagaatgaataaatagtaaatgggaagaaggacatccaccctaagctgacaccatgagcaaaagcggagagggaagaacaggatacaatgcagaacaaaatcttactccgggaatagagtctaaggttggtcatgtggtaaaaattgagtatattaaaaatttccatgaaaattcctaaatttaccatgtgtgcaacaagatgatctcactaagaaaggtaagcaaggtcagaactgagaagagccaagggtgcagaagattcatgttccctatttcaagtgagttaagaggagtggcagatggagtctcccgcgttaaatttattttttatttactcttgttattttatgctgttattttattccattttatttttttgctaagcataaatagtggaatcctcaattatgacatgatgcaactgactccactgccttctgtgg

SEQ ID NO: 1244 - DNA, 708 bp, Homo sapiens
ttgtcatttttttcagaccccctggttgtggaatacgaggcattgctggtacaactacccctatcaggcaggccccaacaggttggacaaccaccttcatttttggccccactcccgctgatcagtgctggacataatctaccactcacaactgaccttcactactattacatcctggagctgtcgttttattggtctttgatgttttctcagttcactgatatcaaaagaaagatgccacactctggtcaaagacacagccaatacctgccgaagccccaatcattagtagtcagagaagtggtccagttaaacctgtacagttgccccaaagatcttcctaaagttcaaatgcaagactttggcattatgttcctgcaccaccttgtatctattttcttgattaccttttcatatgtcaacaatatggcccgagtaggaacgctggtcctttgtcttcatgattcagctgatgctcttctggagctcagccttggactgccatgtgcctgtcctttgccttcttccctgtgtggaccagtaccagaaccatcccagaaaccttccctgcagaatcccagagtgcagggctctgtggtgctatcagagcaggccacgctggctgtgtcctttagttggcagaacctcttccatgcctctgatggcagtgttgccaaggagacggaaccacaggatcattggcatccc

SEQ ID NO: 1245 - protein, 167 aa, Homo sapiens
MFSQFTDIKRKMPHSGQRHSQYLPKPQSLVVREVVQLNKCPKDLPKVQMQDFGIMFLHHLVSIFLITFSYVNNMARVGTLVLCLHDSADALLELSLGLPCACPLPSSLCGPVPEPSQKPSLQNPRVQGSVVLSEQATLAVSFSWQNLFHASDGSVAKETEPQDHWHP

SEQ ID NO: 1246 - DNA, 528 bp, Homo sapiens
atgtggacttcgttaaggcctggtcctgctctcttgggggccccacacacaggagagggatgcacctgttacaccaactcttctgtgggaagtgtggccacagcattctgggggtcattgggttggataggggagctggaaaggtttgggcccttagagaaggccagatttgtagccaaaccgtgcgccatagccctcaacattcaggccaatggaccacaaattgctccgcccaatgccattctggaaaaggtcttcactgcaattacaaagcatcctgatgaaaagagattggaaggcctctccaagcaactggactgggatgttcgaagcattcagcgctggtttcgacaaagacgcaatcaggagaagccaagcacgctgacgaggttctgtgagagcatagccacaagcatgctacctaagagaggtggctctgatgtcgatcattttgaggaggagagatccaagaagatgcaaggagagcagattctcaatttaggacgaagctctgattctgtggaaccc

SEQ ID NO: 1247 - protein, 174 aa, Homo sapiens
MWTSLRPGPALLGAPHTGEGCTCYTNSSVGSVATAFWGSLGWIGELERFGPLEKARFVAKPCAIALNIQANGPQIAPPNAIKVFTAITKHPDEKRLEGLSKQLDWDVRSIQRWFRQRRNQEKPSTLTRFCESIATSMLPKRGGSDVDHFEEERSKKMQGEQILNLGRSSDSVEP

SEQ ID NO: 1248 - DNA, 3939 bp, Homo sapiens
cgcggaggaggcggcggcggcgggcgggagcagcggcggcggcggcacaggctcggggccagccgggcgcgcatccccgggcgccctgcgcggtggagagcttggcgggctgcgggtgccgcaggacaggagtggacaaagcaagatggcagggatcttagcctggttctggaacgagaggttttggctcccgcacaatgtcacctgggcggacctgaagaacacggaggaggccaccttcccgcaggctgaggacctctatctcgcttttcccctggccttctgtatcttcatggtgcggctcatcttcgagagatttgtagccaaaccgtgcgccatagccctcaacattcaggccaatggaccacaaattgctccgcccaatgccattctggaaaaggtcttcactgcaattacaaagcatcctgatgaaaagagattggaaggcctctccaagcaactggactgggatgttcgaagcattcagcgctggtttcgacaaagacgcaatcaggagaagccaagcacgctgacgaggttctgtgagagcatgtggagattttcattttacctttatgtatttacctacggagtcagattcctgaaaaagaccccctggttgtggaatacgaggcattgctggtacaactacccctatcagccactcacaactgaccttcactactattacatcctggagctgtcgttttattggtctttgatgttttctcagttcactgatatcaaaagaaaggtaagagcggttatgtcgtaaagtgcttgcaagcatgcatctttaatggcccttagcaggtgggtttagactctcaaaggcactcacccctgttctcctggcagccctaggttagtacgacttgctgcgttattacagaaagttctctatttttgtttgtgctgttttatatttttttctattgtttcttcgctcatcccctaaaactcagctctcttttctccatgtaataatgtagcaatgaatccccgtagaaatgattttctctcaatctaattcccaagttcctctgttctccaaattaaataaaaagcaagaattctatttgtagctcctgggagagagtaaagtctcagtgtttcaaccctacagaattaattccccaattgcagggttgtccagtgtcaaaatatgtctcggaaatgcagcattcctcagtgaactgtgatctggtttccacctatcccctccactgtaatcacttttgtgtgaccccttacgtgttaaatccacttattctggctttcgtcctaccagcttctgggcagaattggcacttctagctctttactgcttatttttctgtgacaccatatttggattaatccttcaaagtcactttgctgtccttgtcttaatgccccatgctctacatatttgggtgcaacagagttctggacctgaattacaggatgccatctccctggatgattgagttgatacttcctgacacttccaaccataacctacatgccatgaattctgaaatgtttctcttctgccccacattctctctgggtccatacttccacatctgtagtcacagatgatagtactggttgaacatccctaaatctggaaatccaaaatgctctgaaatttgatactttttgagtgttaacatgatcctcaaagtaaataaatgctcattggagcattttgcattttagatttttatattagggatgcaaatctgtaagcataatgcaaacattccgaaatccaaggaaaacagttctaatcccaagcatttggggtaagggatacacaatgtatattgtgttatttttgtacattatatcatttagtcctgacaacaaatcagaggtccagtttgattattttattatttatgcttattttatgaatgatgaaactaagccttacatacaaagtgctcctgactgaagacatggtcttctagtcttgttcttctccagtaacccttagaaccaaaagtcatgtcagccaggacgttttcctttgctctcgtttttgccactccgtataccttcttccttaatgtcactgacaaacttacagttccctctccttttgcccactctattatgtagtctcttaaacagtctttctatctaagtagtcattcttgtttatctgctgcctaagaattatgtttctaaaaccttcaagacaaagttcaaatacgtggaggataaaatgcaatgtcttaatccaattgagctaatacaaaaaaatgccagattgactgagtggcttataaaatctatttctcacggttctagaaggtgaggtgccccagatcaaggcaccagcagattcagtgtctggcaacagcccactttctcatagatgacaaccttctcactgtgtcctcacatggtggaaggggcaagacagctctatgaggcctccttgtgaaaaggcatgagtcccattcacaagggcttctgccaaaaggccccatgtcctaatactatcactttgggggttagagtttcaatatatatatttgagaaggacacaagcatttagtccccagcaagcaagatatgttcgcctttgcacccccatgactatcagtgtagctgctcatcgtgggaatcagtaagttgagggtaaatgaataagcaaaatcagttcctttacattatgatggagcacagtactgtaatgtatcatttcttggttaaatcagtaatctgctaagttgcaaactggtatccaagtggcagctgaaaagcgtttaggagtctgtgggcctactactacccaagtcccctgtccccacatatgctccttccaccatcctacagcagtggcttacttggctggcaaaaagctatcttttctgacttgtatggctacagggcccttaatatggtatatatcagctgattctcagaagtaggtggtccctgtcaaagcgagcttgggcataacagatgactctttgacacccgtaatttgtggttcccttactcattgcacccaacactccgagttggtttctgaaatcatttacggactctttagtgatggtatgtcaagggaatctcttctgtcctacatgagggagccttctttggtcatgtagtgtcaatacatgtagactgattattttctgtgtgccaggtactgtgcgaggctcatgttgcatttattttcttttttgaggagatcttttgtccaggtagtcacgtaaaactcttatataacagagagctagaacattcttcctttttttttttttttaacttgggagaattgatgcacagagtgagtttatgtaagtttctcaaggccatgcaatataggaatgaattagaggctaggcttaccaagcagagccctgtgattcactcttagattagacacatacataatccttgccttgccatgctcctgacattacaggtagttagcctttaacagctctttgccattttatcagtccttctcttgcttagtgagaactagaggtgccatccagagtcaaaagcaggaatagctgtccttggcttccagaagcctagtcctagtaagacattgctataccaaaagttaccaagtccctgcactagcttgagctttctcatcacatgtggaatgtggctttgcagtgagccagcagggctcaaaatatctttattgctgtattagtttgttttcgcactgctgtaaagaagtacctgtggccaggcatggtgactcatggctgtaatcccagcacattaggaggccgaggtgggtgggtggatcacttgagctcacaagttcaagaccagcctgagcaacatgacgaaaccctgtctgtataaaatatacaaaatttagccagatatggtgttgtgcaccaagtgagccaagatggcaccgccgcactccagccggggtgatagagccagaccttgtctcacagg

SEQ ID NO: 1249 - protein, 205 aa, Homo sapiens
MAGILAWFWNERFWLPHNVTWADLKNTEEATFPQAEDLYLAFPLAFCIFMVRLIFERFVAKPCAIALNIQANGPQIAPPNAIKVFTAITKHPDEKRLEGLSKQLDWDVRSIQRWFRQRRNQEKPSTLTRFCESMWRFSFYLYVFTYGVRFLKKTPWLWNTRHCWYNYPYQPLTTDLHYYYILSFYWSLMFSQFTDIKRKVRAVMS

SEQ ID NO: 1250 - DNA, 24546 bp, Mus musculus
  misc_feature (1)...(24546): n = A, C, G or T/U
cttatcaaatcagctaccttttgggattcttgtctctgaagagatgaggtctttcagagctcagttctctggggactcatctgaaagtgctaatgagacgctccatgtgtgtgcttgtttctttaagagtgtgtacttaacacagtactcctctgccctcttggggaatgcagttttagtcacataaattacttgaaatgtgtttaaaagttttatttatttagacagtacaattactagtacaatattaagaggggtcttaacggaattaaactgaagaaaaaaaaagttacaagaagccccctaaaggaagtctctcttccacctgtaagctgtaactgagccatggacagtcacgatacagcaaagtgagtttgaaagctacctttccacaggcctccctcagcattccctctgaaagccatctagtcgtgactgtgcgggtctcatgactggacattgccctgtcttaaaggattttagctagagaaaatcagaacagaagagctaaagcctggagagttattttctgactctgtgaaatgttcagggcaagaaaaacccctcgtgctgagagacagcagtggttctatggtgcattggtgttggggagccatggcctgacttctcagcatctgcctgctcctctgttccagcctctccccccaacattgagttaaagaggtgggtgcacaccccaccttcccattggtgaccacacctgctttcccactgaagaagtagaatttgaattcctttggcatttggattgtctttccaaaatcagatttaagtcccacaaccaggagaagagtctgtgctccacggatgttccgaagtagttgaaagcgcgagttctcaagcagtgactgagagcgttaatggggttttatctcacttaagagtgtgctgaaaactacagattcaaaagggagacaacaggaacagaagtgcatccttagcttccgggaactgaacatgtccaaccagagaactgaggcgagtgtgtccagctccccctcccccagctaggaaatccttcagcgcctgcatgtgtgacacagattctaggatcccgtcgccggaagttacatcaggacccagagagcaaattgtggcaggagaaggccctcaaatatctttagcacttagtggttgtatggcctcatttataaggaggaagaagaggtagcaagtgggggtggggagaacccctaaggggttttagagtggcctttcttctcattgaaaatcaaaatgaagattacccttgtcacatgtttaaggtgtacccatgaagacttctaatcagtaggatcattgacagaaaaataaacaaacaaataaataagactagtattttattttattatgtcttttaagaaaatactagctgggtataatggcggatgcttttaatcccagggatcctagacaggtggatccctgagttcaagaccaaccttgtgtacaaagtgagttccaagaaagctagggctacacagagcaaccctgtcccccccaaacaaaacaacaagaaataaacaaataaataaacaaacactagaacgctttatattgaaatgcttttcaaattattgaggcttgttgggactgagctaacaactcacggatgttagaactcattctcgtgtgggaaaaaacaaatcctaattcaggctgtcgtgaggtcttgtggttcttcctttatctcctctccatcctctggtttatatggtgtgtggaactaggagagatggtgaggaagatgttttccaaaaacacctcctggccaaagcctgggtctgcaaagcagcctggaccccaaagcacagctccagagaagaaggctggcttctcctctccatggcattgctcagggtatctgccccactggctgtaccaaaactcaatttccatgcagtgctgcctctctgctggtcccaaggacatcctcgtctaagtggagaagaatctgggagtgctttcaaatgttcttaaaaattaacctagacatggtggcacaagcgcttgaggttggtgaattcagaggcagctgggaaaaaaaaaagttttcaaaagtgtacgcagatgcgatgtttcctgaagacgttagccagaagggtctgtgtgaaactgaactagagtctgttagagatgagtttgagaacgcacacgtttggatccggtaggaatcgcagggacggttccagaaccacctgctcactgctgtgggcggggctacaggcgccacgccctctgcccacatgaaaatataaatcgttagcgttgtgtgtcttgttatcaatctggcactgcacaataaccatatccacttggtctcaatagcaccaaagcttcccgttcttgcaggtaaagatttcagggttggagtccgtgtgccaggctacatttgtaagggataggtagatggaacccaaaatgtctgcatttggtattaggtccaatattaatgcatttaaatattattgtgataaaaatatttgctagtgaactttgctaatgataagtatcttaagtggaaccctaaaataatcaccaattttgaaaaaaaaaaaggaaaaaacagaccatcttttgtgtttgtttagaaaacatttaacactttagttagatgagagtttaggaaatcataaaagtacaaagtcatacttggagattataattttctctgtctaatgccttaatcaatagtaactgtaccgtgctttatccacaaagccatccaaaccaggtaagtgttacagccctgtgtgcgctcactttccttgtgcatgtcagcatacatttgtatgtatgtatattcatttcttgcctaaaaataaactttgttaaatgtactttgtgtatctaaaaggactgctaacaagcatagccgactctgaaattattcccgaatgaaggcaacattcatgctattatcagacttgaaataggactgactttttttttctttttcagagactattttaagtgattttatttttaatcttaatgtgcactaaaacatttgattaaattagatgtcgtttggtcactttaaagccgcataactcatcagaatggtttgcaagtctgtccacattttgtgggacatgggataggatcatactttcatggacacccagaaatttggcatcatggtaagaattcatttggaagcgacttattgaatgacatcaattttcctccaagttctgttctcttgaatccacattgtcaccacccctatccccacccgtatgggagtgtgaggttatctacttaattttaaccaggatggtattgtgctgttgaattacagctcagcacatttcccaaatgaggtttattttggtttggtcttctcctgaaggatacatggctggaaggcccgagggatgtttgtctagaaaaagtgactgcagacaaaactccactgctctgccgtcccagcagcgtgcacacatgactgttttctgtttttctttctctaccccctttactaaccgctgactgttgtggttaaacttcactacatcctccacagcgttgacagctgatgtatttagcagcatgtacttcttagtgtcttctggtttatgcccacccttgtgctccttccccagagtccagtttttcactgtctgggtgtgtacaatacagagaaaaggcagcagccatcaggaggggtgggaggatttgggttaaggtaggaagcaactgcaaggaggagtcccagggtgggagtggggggagtgcacatttgaacaaggcctaagagaaagtccctgtgtactcaagataggacaagtccctggaggattcatggggacccagcagaacagtgcccctctgagccaaagagcccccacctgaggtagctccctgagcctcaccaatgccagtgctggcagctgttgaagaatggagccctgcctctggctccatcctgcattcctttggcagctttctcccaagacttcatttggacctagggagaccaggagaggtagcatcaggtggcacggggaacagcagatgtgaagagaaggaactgcccgtatctgaagactctaactgtccccctgcctggccttggcaaactgctcaagagtgggtggggtctgagaacacagataccacaaagggtgagacaacccccacctcctgcaaggcccgagtttaaccctgtgggcttatccagatatccataaccccgccttttccaaaagcaaagtggccaagtgtttataaagcagcccaaactcccctccctgtgcttctttctctccttggttccttttctcataccttcctatgtttgctttgcagcaaatgacaatgatctgcccatggaggagggcatggctttcaccataggtaactagatgctgggctcctctgtggagagctggggcccctggatgaaactggcctttgctgaggcttgcggtcctgcaaaggactaatgaagctaatcagcataatgaaataatttggatgcatagtaaatgtgattaaataatatcctctagccccgtcttcctaaatcagatacttaccgacacatttaggagaccgcagccatccaacctctaattctgttaccggcataatgtgctgtttggttttctgtttgttttgttttttcattaacacccagtaactagaggcgattaagtcccttgctctctgtcagcaagtggcatgcgctccatggtggcccattcctggctgatggcatgattggtgtcaccaacaaattccaatcacctagggccagcaaggcctcctagttctgactgtaggacttaatggagaagcaattagagtaaaataagaaaattgttatttgctgattaatgaacattttgagcatgttttaaaaattcaaatattttttaaaaactgactggaatttataagagggactggtgtttgggtggttattatccacagggtcctaattaaggcttgattaaaatgcccttctttctcaaaaaaaaaaaaaaagaattatgaaccaggcaacttcatacatttttttaaatgatgttgcgtttcctctccctactgtttagtttatagtgtactgtgtaagcagcatcaattattagcccttataagatgacaacaccaactgtgggtaaaacactcagggagggaggggcctccttataacctctctctctctcatgttacttactgaaacaatatctactatactaaatagtttctctcctacagagccaatcatcactgaaggttccccagaatttaaagtccttgaggacgcatggaccgtggtctccctagacaaccaaaggtgtttgccctgtgatttttgaactgttggggaaagggaaggccgaggcacactgcagtgtcccgacagcagccccgtgtgtttcaggtctgcgcagttcgagcacacagtcctcatcacgccaaggggagtggagatactgaccaaactgccacaagaagcctgagaatcggccagaaggccaccaagacccagaggactgagaaagcatccccaggccacacacaagtctgcagtgtctaggagaaaacgcagagaggacgggctctggggactcaggtccaacaggacagcccttgtggctagaaaaacaaacctcccttcctgggcaggtggttcgcccttttcctgtccatattccgcccaagtttaaaaaaaaaaaaaaaaaaaactctcaaacctattgtgtccagtctgtacgtgtggcagctacagagggggaggggcaggtgattagttttagagtctccaaactttaacatgcatgcagaaagggaaacaaaaacaaaacaaaacccagaactctttctttaaactctcttttactctggttcacccgcccccaccccacccttgttgatcttaacatggctgagctgtgggcacttccagaggcaagcacctgcttccaccccaatttcctcttcattgaggtttgccccagagaggatgagccagggagcattgcctgcaaacgttgtcttgactgtggaccataggtttaggctttctgaagatgtgagcagtccaaaccccttacagatccctgaggctcttcaccagcagccagccatgcttgatccccctgccagcctgagacgctccccccactagaccatttgttgtactaaaaatttaagctgcaaccccattctttagattttgagtttagagcccagctagtccttaaattgtcctctcctgactgcagtcctgggacaggcttccctgggctatacaaatcaggtattcctgagacttcacaggatctctgagagaaaagacaccaggcacatttgagataaggtcctagttgggctcatctggaactccgttttaactatggatcaacttgcctgcagggcccacctgcttcaggagcagaaatacattcctgcccaaagcactctgctttcccttgttgtcagagatctgttgaacctaccttcagggtgggctaggctgggcctcacaggaagacagtcctcacaggaagacagtcccctctgggcatggccagcggggggcaagaacatcagaacctctgtgaactctggcttgtgttcatgcaaatggccaggtggcccgagtccttaatagggcttggatcgtctggggagccaaggagattttacatttgccaggattgatagcatagaggcacccccagggagttagcaggacacccagagccatggaggaggaggtgggaagctggggacaagtactgcccacagtggtacatttcagctctcctctaaacttgggaattcatccatggtccccaactccccagatcagtttgtctacatctagagatgtagagagttgtgtggcggcaattctaaaccgactttgtttgagggtaagaaggaatggggaattttaaagatcaactggcaaacttttgaggtgttctggaattcgccaggcagagactcagagactgaagctgtgaccacggagcatccatattccctagagaggatcagggccagctgccttaaagatacttgccagagaatgacttcacttcttttctagagcaatcagattagcatgtagtgtctttatctgcagatcagtttactcttaggtccccctaaggatagttttattaggaccacaggatttcaccaaccactgggacaattattgcaggtgaaggtatttatggggaaggtatataatctgatttagtaatctagcctgtgctgctaaacgcagcagctctgtaggaaacaaacttaaaggaattttgtgtaatgttctttgaagttaagactgagaagtagggttcgtttttttgttttgttttgtttttgttttttaagagcctcctctcttccacttcctcatcagctgaccaactaaattgacctgacgcctaaccctgaaccgcagggattccagacaggaagtgtaagctggctacctgagctgttggctcctgaggtgactcccgtgagttctgctcccgatctggaaccttcaggaccaatgggagagtctaagttcctttcatacttgggctggcaaaggtctgagcattttggagcaggtgtgtcactttagagttgggtcagttggaggactgcacaccgggactcacaaagtagagataagatctcacttcctgaagtttgctgaggcctgtacactctttcagggacccggctcagtttctcccaagacttgcttccttgagttaggaaataattctcaagtgtgctccctcacctacacacagctcagttctaaatgtggccagactctgaaaccctatcgtgcccacccgttcccagtagccagcctggcctcctgctctgctaagtggaaggacagagcacctagtagacccatggtcgctctctggttccccaacccaaccagtctctgggataaactggtcctaggcaatccggccatccgacgtccccataccttgcactaaattccaagagacaccagtccagttttccccatcccaaccccggcgcacaaccgcagcgatcacttacatgggcaaggcccgcaaggcgaagagaccttcggttcagatggcatccaagcggctgcgttgggcgcacaggacggcactccacaccccaaaacaggcactaagaaggagctattaaaatcgcgagtacgacaggaagaccaggacgaggcgagttggagttcttagttggttggtgttacaaagcctcaccttgtggtttggcgattaaggaaaaaacaaaaacaaaacaaaaaacctttcaggcgatggcaaaccctttattggtttacgaattttggactgttgttttttgttttgtttttttcctctttcttttgtttttctcttttgctccaaccaacatgctgcatgaaatgtttctgcgcacagcctcatgcctttaatcagaagaggaaatctttaggcaggagctgctgctgaaggagagagagagagagagagagagagagagagagagagagagagagagagagagagagagagagagagagagagagagagagagagagaatgagaatgaatcccctgtactcatatctgtaacgacatcaccgatgtaatttgttttgaatgttcatttttattggtgttccctctgccaaaatgtgcttgattacagaggtctccctgtgatcactgtgcactccagataggggaaggtgccgcggcgcaggttcagctcaggccagatcaaatccccgggctgtttaacgctgaaaggctgcatgttgctattagtgttaaatatatggctaattatgcgtatgaaaattaaacatcagtgttatgctaatggggcgccttcagctgcggatctgagcacttgagactaccatttaatcaaatgaatcagtaactaatacgtgtgcacgtgtgaactttcacaagatcatttcccccggtccccgtcacaccgctaaattatgaaagaaataattatcaacactttctaattacctaacaaagtaatttgggattcatcgtggggctggcgggattgggaaccaacagtccctagcaaccagcgtagtttgcgccacgcgaggtggtgtgtggtagtagtgggggggtggagtgcgagagaatcttttgtgcacttttcaacacttgcacccagatggtagacagcgcgctttggcagctctttccttcaccagcttccccacctcacccccgggcccggaggctccagctttggccactggaggtgaggaagagatcgggcgacagagaggggcatatctaaacacaaatattcaagcctaccactgatcaggatttgctgagggtgtcggtgtctccctaggactcccaaaccccaagtactctggccagaccccaggaggtcggaaaatgaccacctggcaggagttcgatgcaccagccaccaggcgactgcgggccctcaggactccacgctgagccgcgccctcggggcgagtgagcccggggctcgtggctcagggggagtggagaggggagggggaggcaggaaggttgggagggaaaggaggggggaggcggtgcggccgcctttcctgggtggagaagcgtgggttcctggctctccacgcgcactgctttgatcagacccgtgcagcctcgagctggagtggccagctgggcctggagagatgcgagcaagcccctgggaacggtggcaacggcggggcggcggccgagtgagtgagttgggccagagggcccccaaacccagatccccgggatgtggccgagagaaccccaacctgggaggcgcggcctggagcgcgctgagctaggcacaagacgctcagaaggaccgctggctgcaggctacctgggttgtcgcccagtgcgcgactccgcgatccagagaccgcggccggactctggagcggcgctccgcaccggactaggtgacctcaagaagaagtggtccggggtcccaggcgttgggggcgggcgaagggtggggacagcaagggggagggcgacggcagggcgcggctggttggtttctggggcgggaagcgcgcgagggaggcgggaggctggagtcgcgcgccttcgaggttcctgcgcggacgccgcagcccattgtgcgtcccgctccgcgcgctctgttgcagaggagccccggccgggacgtgtggaccggattctccccaggccgggccgcgtcgcccgctctagtccagccgagcccgagcttctcggaccaatccccggtgattatgcaagagagccgaccaatcagctccaccagctcatgaatatttatgaccttggctgagtcaaagctttgaaccgagtttggggagctcggcagcatcatgcttagacttttcaaagagacaaactccattttcttatgaatggaaagtgaaaacccctgttccgcttaaattgggttccttcctgtcctgagaaacatagagacccccaaaagggaagcagaggagagaaagacccacacccagaccccgcgagaagagatgaccatgaccaccatgccagaaagtctcaacagccccgtgtcgggcaaggctgtgtttatggagtttgggccgcccaaccagcaaatgtctccttctcccatgtcccacgggcactactccatgcactgtttacactcggcgggccattcgcagcccgacggtgcctacagttcggcctcatccttctcccgaccgctgggctacccctacgtcaactcggtcagcagccacgcgtccagcccctacatcagttccgtgcagtcctaccccggcagcgccagcctcgcccagagccgcctggaggacccaggtacgtgcgcttgccagggacaaggagagaagggaaggagaataggagagagggggagaaggggagggggaaagagaaaagacaagagagtgtggggtagagaggtgggtgggggtggggaaagcgcggaagtagtagaggtttcggatatcaatctgtggatccttgtcactgaaaagaaaaaaattataagtcaattcaatttacaactgtccagcaaaggataaatccgagcgcgtctcctggcactggctgggcctctgggccgctcggtgcgccgagcacacaatgccctgctggaaaacagaaacccacatgtgcacgtattagtctcggtaattatttattgcgtagcgctataaacaatgtatgcaattaagggtaattaaacctcaactaccgcctgcaaaaaatagcaaactttctctgcaaaggcaatagctgcgctcttgggaacgacccaattctgtctgcagcagccagggacgtgcgctcggaccttgagggaccttcgcagtctttcagggtttcttgaacgttcttttccggaccctacttctgccaacccatccatagacattcattctcgtccctcctcactaaaggcagtgcagcattaacaagggtctctgcttctgttgtccctccaggggcggactccgagaagagtacggtggtggaaggcggcgaggtgcgctttaacggcaaagggaaaaagatccgtaaacccaggacaatttattccagtttgcagttgcaggctttgaaccggaggttccaacaaactcagtacttagctctgcctgagagggcggagctggcggcctccttgggactcacacagacgcaggtacctggccgctctgccaaacaagcctcgggagctgggctccagccccaggcttcacattttttgttcgctgggcctctggttctaggtgtcacagtccgccccccaacccccgtgtgtgtgtgtgtgtgtgtgtgtgtgtgtgtgtgtgtgtgtgtccacctctgactttcagcgtctcctcttcctccctcaaactgtttgccctagctcggaccctactctctgacctgcaggctacctggtcttctgaccaggcagggaactggaaggatttccccagacgttttgtttggaggttctgaggtcacacgtgcctgaacaactggaacaatagaagggggatttaatcttcctttgcctttaaagtgtgccactaatcactcaggtcctgggcctaagcctgcttcccccacctccttcttcttgcgaggtggcagaggcagatccttccctctggcccttcacttcccaagttccagatccttaagaagaagggggaaaaaaaaagtgagatttttcttttttcttcctgcacttctctaagaccctgggcagttcctaggcattcgaacgagggccagtctgtctctagatttaggttggagctggggaaagcaaatacaccgttgggggtgggggggagaattggtttgagtctaaagagtttaacaaagacgctgtagcctcttccaatagtcctacgaggaaaggagatctaattttaacaaatgcccccgccccccaccccgttcctatctaggttttaaattttctttattgttattgcattgtgctgcatgaggtcttccataaacgtcgcccaggtggcatcgtctcatttgcaagccaaggcctggctctcccctgttctcttattcccggctctgatagctgctctaaaagttgccaacagcggctggacctggggctcaattttctggcctttggccctcatggggtgtggggaggcggtggtctctgcccctctgtcctggagctgtcagctttcccaaagcaaggagggcgggtattgttgtccacccgtcccttttctccttggacctgggtaggctcaatggtcatagtccagtcacgttgtcgcccgatcctgcaggtcaagatatggttccagaacaaacgctccaagttcaagaagctgatgaagcaaggcggggcagctctggagggcagcgcgctggcgaacggcagagccttgtctgccggctccccaccggtaccacccggctggaatccgaactcctcatctgggaagggctccggcagcagcgctggctcctacgtccccagctatacatcatggtatccctcagcgcaccaagaagctatgcagcagcctcaactgatgtgaggttatcagttcgcactcacccgcttcctgcccgtctcccttggcccggcccctcccgcctccaggttcatccaccttttcgcacgccctgggccaggaggagaagagcccacgagcgggagcaggggtgggggtggggagctaaaaataaaagaaaaaggaacagtgaaggcagagggcttgctgcttctcggagcccctaaaagtctgactcagcgacctttcagcccgaatctggtttgggccacggtgaacagcagagtggcctcaaagcgcaggcacagccactggagacagccagtgccacaagataacccgctggaccggaccagactctcatctttgtgagactatcaggaaaaacaaatacgtaggagggggaaatacgctcttttttgattctgtccgtctttgtctcctttttgcactgtctgtgcgccgaagtcaaggtcctcgtgtgtctgctgtcctcattctacgacctctccaaaaagtcaccaggtctgagccacaccggtctgccggcagcccatccaccgagtcctggaccactttttcctgaatggtcttcttccgggccctgcttgaccatctatgtagcttgtttgggaaatgggggaaatcagagggaggggggttaatttattgaaaaacagacttcatctgacgctgagtgttggccaattccaaattctctgggacatggagtgggcgctgtccaaacatactatttaccttaaacacaccagaagagggaacaaggacaggaaagtgacttttaaggtgcacagtaacttttgtacttggctgaaatgcagaaagggaaaacaggatgccgtgcattttacatgctccaaattattaaaaataacaacaaaagaaagaccgaagtaaggaagtaagatatgtaaaaccaataggatgttgtcaaaaacgtttggacaagaacacctggccaagaagaaaaatcatactttgggcagcaagagagaggaccaatgagccttggagagaaaataatttgtcctttatgtaaaagcaccccaattccaggtcgctttaaagtaagacacaagcagcggctcgaccacagaacacaagtcatcaccctgaatgcacgggctctggtgcaagatctaattgctgtacatattattgttgttattattattaattattattattattgttctgtaaacatgttgcacaagcttagcctctttccgttctgttgtgtgtggctgtaaacccgatgctttgtgaaatgagaatcttgacattttacttgtgaaatttggaaaatgtgaccgattgaaatccaccgtgttttgtgttctctatgtcaaagtttagttttatattgagaatgttaacttattgctttgtatcttggggggggggcgaactttgtaaataagttataaagtttctttgagacagtaaaattatggtttcaagaaagagccattgcctcctgtgctgtttgaagggaaaggaggggtgcccctcctcaactctggtacattaacatactacttactacttagcatactctttactagggagcgattggggaccactaatatctcactaagatatcatactaaggtctgtggggtgcccccaaaggcctgtttctcttgctcctccccctcagcgcggcctgagatccttgcctagctgggagagatggcagtcctacagagtgttggggcatttgactcaggagcaggtgttttagggcagagttccactcaggtgctcaggaaccgaaaggctgagaaaagcagaactccagggcagcaggcttggggactggagctctcttctggtgccctgtcatttctcaagaaccctggaaacagagatacccggctctgccccagcctccacccggatctgacctgccagatttcgcttgaccgcaggcacaggatagcgccttggcagggacaggaagctcatgtcttccaagccaccgccccaatcaatcactgaggtccttggggacagagcttagtcccagggagccactcgagcctcccactggggaaaaacaaaagaagaaaaaaaaagagccattcttgcttattgcctagagacttgcctctacatactcacgaactagatagaaaggtcaaagcacagggagattcggtgaattttgaaactgagctgaccatagtcattcaacatcgactcctacccccagccccgagtttcagatgccagttcattctgagaacacttccctctggtagagcattggaattaagtttgcttctaaagagcaatgactctaagagggaccagggaaccaggctgaaccccttgcatgtctgatggtatcaggcccagcctaacccagcctagtcccagcccaaaccccaatctcaaaccaaagactactgaaaacctctggccctgacggtcggttttgtgctgttctggcttccttggcaccctcctgctgcccgaggggggctccgcctttggggggtcctttccggcgcgcggtggggagcagatcctggaaggcagtgatctgtgttgtgacaagcacccatttttcaattggtgctggtgaaagatcagatgcgcggagctcttccgacgccctttgggaaggggaggaggaagtggcggggctggagggggagtcctctaatgggagaagaccgggaggtagggttggatgaagctggggactttgatgcctgttctaggactgaaattgggacctttcctctgccggccgcatcagaaccaactggtgagatcagatcaagatggtactggctagacccggattgaaacggaggaaatccacttctcaggctaggcccaggcatatttgcagatgcctgaatctaggcctggccggattcagtttcctcggggatatgtgacttctctagcaaggagacttttctcactcatctgactcagtccacagaggacagctagtccccagccgctctggccacaagcaaaatctgtttggtcaagctgattttaatactttgagacattagcttatactaatttaataatctcttgctaacagttcaaatagagaaattattagttttagctcaaggaaggcggtctttagttaggctctattataattataagcagttgtactttttaaaaatgttaatctcaatataggcctaattaatactgccttgttactgacaagcagttcatcaaatatctgattcaaagattttcataatgagtatattaattaaactatgaataatctaaaggtggttatatttaaacaatacctcattataatgattaaatactgatttcgaatattatgtcttaacaattgtcacatagaaaacacaacctttccttatgtatgagtctgtaatggcaaaatgcaattttgggattttttttcccttgttcaaaaaatgtgaacctcattttaaaacacttctgaaataggttacacacagcttaatgattatcaaaatgactcttttctgcaaaaaaaagaccccaaagtgcgcgtacagctgcaaacccaagagggtcagcatcatttcactgtattctcttcttgattacaagccgggcccatcaaacacaacataattacagtaatttcaggtttatttattctaatgcagtttccccatctctctggtaattatgagcaattttttcgcccagggaatctttttgcattaacaaaagagataacgcactgaaagccaaatttgctgcgcattgagaaaagggaaaaaaaaatcaaataggtgcgagctgccatctctgcaattctccggtaccggagcccgcaaattgcttgcaggtgtatggagcaagcttgtcaatggccgggcctccaaattagcaaatgcacagcagcgaagtaatgaagacagacttagcaaaattgctaaacaacagatacctctttaatatcctctctctcacacacgagctctaaagggggtaggggtgggggtggggcacagtcccaacctttccctcactggtcttggcttttggtagctcggatgggctgagcggtcctgtgagtggtgaaatctattggtgggggagagcctgccttttgacgatattttaagaagaagtaactgaaaacatctatggtccacagcttgcctttgctgatcactatgttgcattactatttccttcttcagggaatctgcacctggcccaggttagatggttcttcagacttcctgatttctgcacttaacagctaagcaccacaaaaagttctcagaatcccttccacttctgtggccccaagtgtgaatttgtaggagtcctttaatgaagaaacgaactgaatctttcccctctgaaggaactgtcatctgctttcccaaagaagagcaggtctgagtgccggatacagatagactctgatttattaaatcaagaaaaattgggcacaaagtagaaatgaatgcctgcccccccccaccaccaatgaacctgtatcctaatattgatccctttctccctttatcttctgaaagtccatttgcagaattatctgggttttgccttcctctcacctggggttaaagacccttgaaatcacagactaaagcaaacttttctgttacctggctcccatagccatcagaacccacatctagttcagcacagagtgtaagggcttctttctcccatgcccataaaaatctctttcctgtcccgaatttcacagtaaaccccaattccaaagtggaaaagcaaaaagctccaaaaggtgtttccccgggctcaagaaacattatcccccnnnnnnnnnnnnnnnnnnnnnnnnnnnnnnnnnnnnnnnnnnnnnnnnnnnnnnnnnnnnnnnnnnnnnnnnnnnnnnnnnnnnnnnnnnnnnnnnnnnnnnnnnnnnnnnnnnnnnnnnnnnnnnnnnnnnnnnnnnnnnnnnnnnnnnnnnnnnnnnnnnnnnnnnnnnnnnnnnnnnnnnnnnnnnnnnnnnnnnnnnnnnnnnnnnnnnnnnnnnnnnnnnnnnnnnnnnnnnnnnnnnnnnnnnnnnnnnnnnnnaaaaaaatactcctgacatcgctgacaagaagttttgatggaagaattagctggtgcatacataatcactcccccccccccactcccggagcgggagccgctgcggcagcaaagcgcagtcttccaaccctctgaaaaatgaaaccggtttccacccttaccttcttcagtgtctatttcagataatctggacacacactctttgctacatcaaatcaaaagggtcgaaggcggcttttggctgggagaatgacaggaaagcaaaagaaaaaaaaaaaggaaaaaaaggaaaaaataaaaccaaggaagaatagaaaaatacaaaaccccgaccaaaaccagagcaaaacaaaaccagaaaaccaaaaagaattccccagccccatcttcctatgctgagaacagagtggaggaaagaggtccccaggaccaggcgcctccagagcgccgcaggctttttgcatctctgagcttgcagaatagaactgaaaatttcggctatatagcctctgtctttatagctgatgaaaaaaattgcagattattagcataaatgtttactcttcattacgctgatgacattgtgcactcgagatcttggtaatctttgggaaaattatgagtaatttttaaaaattttaaagcagcagcagttaccatgcaattcaggctaattctgcgtaggctccgaacggatataattatcgaggagtcaagatgttatgctaaaaactatgcattgatattcccatttattatgtacatacaactttgacaatgttgatgcttgaaatagcaggaaattgtcttgcgcaaaaattacagtccatattaggacatctgaaattgcgaagaattatatagtaattgcaggctttcagatgggagagccagaatgctcaaactagtgcaaatgtggataaaattacagatcagagcaaaaattaggggaaaagggggtctgggatttttcaggttggctataggattccggaagtgtctaaagccacatgattgctgcagctttaggggagacattcaagcctcaaatagcgccgtggccagggtggctttaattgaatttcttgggctcttttgttttaataggggcaaatgaggaaattgaccacccaagacaaattttcactgttctacctccggagaatgtgttgagaattgggtccccttcctcgctgagcgttctctgcggcagggactctggggaggtctcagagacccccaccctaaacacagcaactgagaaagccactggacagagcgccccccccccgcccccaacacttccatttttctttttcttttgcctcctccttctcccatgggccccttttccggatttccttcaccacctccacagtgcagctctacaggccctgggatgggatggactgcgccctgggggccggctggccgctggtgtgtgtgtgtgtgtgtgtgtgtgtgtgtgtgtgtgtgtgtgtgtgtgtgtttgcgcgcgcagactgaggaagtagtgcctagaaagatcacctccggaaaaaggccaatgacctctcggtgcctacacgtgggagccagagcctgctgtttaggggcttcacatggggaggggcaaggaaggtttgagctaggggtcctccatgcccaccctgcgaccacctgagctcttgttttgtttcgccgtcctgagattgcgttgtgcaacaccctccctcaacccccaagacacttactccccatttgggcggtgcttctctagggcattgagacaccctgcgactttaagaagccgaggccaggcctgcagagggaggaggctgggaggggagtgtcccccaggaggaggaactgcgaggcgccctgcatcagaagccttagctatgctagggttctaagcggttgcatccctattgtttagggggagcaatagttcccacctttatggtgtcgggtgttggacccgaatcccgagagaggctggaatgtgaaaatcctgactacttgatctgagcggacctaagttggtctctcaggatcactctgtctgctctgcccccctccacctctggcctccagctctagcccagcttggggacactttgcccaactaccttgtttcctagagcaagggccggacttaagacccgacacaaccggtgacactgggactccaggactcttgaggatacccggaatcccttaacactgtagtgtttgcgctttggccatggatgatgatggggggagccataagctagagcgaccccagagagaagagtctgtctagaaactctcttgagttctcacgtggaggcgccaagtggctgctcctaagacctgcctgcttcctaccgccccaacctcctgaaacatattgtctcttaaccggaggccccagggcggaatgtaacatcttgtaatgtggcaatcactgccaaatccgtccccgctaggggaactcctgctggggcgtgggggggggggcgcttcggaggagtgcgggcctctaagtcccgtctgtaatggggtgtgtttgtgtgctgtgggttggagattactttccaggcagatcccaggagggaatggaagactagctgtaaggaggcctttttaggctgatttgggtgtcagggcacttgagaggcagctgggccagggagagcctggtcctctagctaggaccttgcttgagagccacactcaactcccttcgactccacatagaataagaaggaagtgctgtgtacctctcaggaaaagatcgatcggtcttttgattctcaaaaaatctgaagctaaacagtctaaagccactgacggccctattccctggaggcaaaggagcagtcttgagacttttggacaagtgctggtggcgtttggtgtggggcagttgctctccggttctgtgctatccggatttttgaagggcgaaggggcctttttgcaatctcaggagttgggaagagagagttcctaacagaccgggagagcaaacactgaatttcttttctatacctttctgcctcttctgcctgagaactgtttgtaaacaaagctccaacctccccccaccccacccccccagtaaacctgatacttccctcaaacctgtcccaccagtctcggaaatccttactaggcacggatattcataattttcacaagtgatcctgaaagcaagccgaggaggaagacttttaaacggtcccatattgcagccgacttgaggagaaccgggacgcgtactctctccttttggcctccccaacccgggagccaggaattctgggcagccggaggggtttctgtgcaaagaccagaacagcgcgggcttgggagtggagcaggagggctcaggatctggggagacctgcagctggcactacagaattcagtgctctagcttttgcccgagtatgggaatgcgaggaacccccctttggggtgtggagcagagaaggcccggcaccccttaggtcccaccccgcccccgcttccctgcgcttgtcatatcctgtctttggcctgatattttacacgagtaaatggaaggggattacaatgaagatttatgtgtgctccgagcgcggctggtttcccagtgtagggagccgaaatcgccgcttcccatttccatttttcattcctactttggggagcgcaagttagtgcgggtgggggggagagttgggggagcttgtctgcgcggcggcgggctgatccacagggcttggcgtctctgggcgggctggagactgtgagaaagacttgcgaacgcgtcgcccccggcggggctggagccggcccccaccccctggagcccggctttgtttctctccctagcccacccctccgcctccccgcccccctcacgtctagagagcgggtgcatctcagcgacctctttggccccttctggttcacgggaacgcccccttccccctggttcctgcaccctcctttgcccactgcagggcgaaaggcgcgtcgtggccctgtacgaccccgccgccgccgagtgccaggttcggtgactccggcgagtctgtggggcctcggcccaccccggagaggggccgcccgccctccgggctcccaggctcggctcatgccaaggcctgttgcgtgattccaacttgggctgacattccctgcccggggcgctccggcgtaggcctcttaatcatcttgtctgctgcagatcctcgacaccagccaatttactgccccatctttcccggctggtttcagaagccggggaggggagtgcgcgcaaaggaggggagggcataaccttaagagaaaggctggtaccagctattggcgcgcaggggaacacacacatacacatcgcaaagcagaatttggcagtgagggagtgtagggggttgagatgcgagtttggtaggcagtggttgcatagaaagttccaagttccaggccattctgaattgtgcaaccccttcatttccagagaccatcctggatcaccgaggaggcccgacctcaatttgattagaaaacagtattcgcttttatgtccagaaagtcacttccatttttttggttatttgtgcccctccacccaaatacgaggtgaagatactgggatgacccgcataaacttttcaggcctgcgtttttagcaagcagaaatttctggtctgtgcccaacttcctctgcagtacaggctgatctcttggagggcatggtagaagctcaagcctcatgtcgaaaaggaccagttcctctccctaacctttccattcaaggcgaaattagaaaagtctcttaataatatcggacttcaggagtaaagtgcccctcccccgacttggagcattgcattaaaacagtaatagtaaacaccaaagagccaaaacttatctagtgcttatcacaagcaggcgttgttacatcattgcctcattaggggttcattaagttgttcactattctgagccatagctgttattagttctcctatcgtagagatctgcaaactgcaacacagagagactaagagggttgcccaaggtcacatagtcagtggttgatgctgggggagtgtgtgttgcggggtgggtgggggctgtgcttccaacaacagacttcagtgctttcagtgaaacaggcttttagtttagacctgtagggaaggccagaaagtagggtcgtttccgaagctaagagctggtcctgtgaggactgtagtgggaagcaaagttcagtgttggtggaccttccctcctgaagagtgtgaggtgtaatgtgcatcattccacagcaatgagcatccatctctatccgccgttatgactgcattttcatgtttgtgtcagcatgcgtaacgggagtgtgtgcctgggtgtgttcgaaagtgtgtgtgtgtgtgtgtgtgtgtgtgtgtgtgtgtgtgtgtacgtactagcatagcacggtgttctggggttgcccagcattccaaagcagccagccatgcttcacaggagtgactcactgagttctggtatctgccagctcccaaaaggcctggggggggggggggcgggcaaatggagggagggaccattgaaggagtctgatcccagactgttgcagagcttaggtcctgggcatttggttgcccatggcagcttgggtgcgctgcctggctagcattgtggacgcggtcgcggcggagaccgcccaggcgcggggcggtggcgccggcgccagagggaccaggcgggcggaggctggagccgcccggcgctgagtgactcacgccgccttaggctgaagaactgcgggcggactcgggagaggggggaggagctgaacccttcaccgaggccgtagtacccatctcggactgtgcgcatctcatggccattgcagcctcggaaaggtgtaaatgtgcagttttgttcatccgattccggggcggggacccgctcaaggtccgagccgaggtaaccctggcaccaaggaaaaagcacacactccaatgaaaacaataatttattttaaataatctcttcatattgtaaaatcaacattaagagtatgttgctttcataataaataacccccaaataccttgcatttcaagaacaaagactttaggacaagataaaaacaaattcaaatcagtagcttaatttaactgagaaaaattttcaaagggggaaaacatagggactgctgaggtcactgctacgtcgcagctttcacaactcgggggcggtttacaaaaaagtctgaaaagatgagaaatttttatacaaataaatgtggggaaatctgcacagacacccttatttacaaactctgcatcgaagttcgagctaatagtccttaattcatcttaaaaaagataatttaaacacattttttgcagcgtccacat

SEQ ID NO: 1251 - DNA, 2779 bp, Mus musculus
caggcgttgggggcgggcgaagggtggggacagcaagggggagggcgacggcagggcgcggctggttggtttctggggcgggaagcgcgcgagggaggcgggaggctggagtcgcgcgccttcgaggttcctgcgcggacgccgcagcccattgtgcgtcccgctccgcgcgctctgttgcagaggagccccggccgggacgtgtggaccggattctccccaggccgggccgcgtcgcccgctctagtccagccgagcccgagcttctcggaccaatccccggtgattatgcaagagagccgaccaatcagctccaccagctcatgaatatttatgaccttggctgagtcaaagctttgaaccgagtttggggagctcggcagcatcatgcttagacttttcaaagagacaaactccattttcttatgaatggaaagtgaaaacccctgttccgcttaaattgggttccttcctgtcctgagaaacatagagacccccaaaagggaagcagaggagagaaagacccacacccagaccccgcgagaagagatgaccatgaccaccatgccagaaagtctcaacagccccgtgtcgggcaaggctgtgtttatggagtttgggccgcccaaccagcaaatgtctccttctcccatgtcccacgggcactactccatgcactgtttacactcggcgggccattcgcagcccgacggtgcctacagttcggcctcatccttctcccgaccgctgggctacccctacgtcaactcggtcagcagccacgcgtccagcccctacatcagttccgtgcagtcctaccccggcagcgccagcctcgcccagagccgcctggaggacccaggggcggactccgagaagagtacggtggtggaaggcggcgaggtgcgctttaacggcaaagggaaaaagatccgtaaacccaggacaatttattccagtttgcagttgcaggctttgaaccggaggttccaacaaactcagtacttagctctgcctgagagggcggagctggcggcctccttgggactcacacagacgcaggtcaagatatggttccagaacaaacgctccaagttcaagaagctgatgaagcaaggcggggcagctctggagggcagcgcgctggcgaacggcagagccttgtctgccggctccccaccggtaccacccggctggaatccgaactcctcatctgggaagggctccggcagcagcgctggctcctacgtccccagctatacatcatggtatccctcagcgcaccaagaagctatgcagcagcctcaactgatgtgaggttatcagttcgcactcacccgcttcctgcccgtctcccttggcccggcccctcccgcctccaggttcatccaccttttcgcacgccctgggccaggaggagaagagcccacgagcgggagcaggggtgggggtggggagctaaaaataaaagaaaaaggaacagtgaaggcagagggcttgctgcttctcggagcccctaaaagtctgactcagcgacctttcagcccgaatctggtttgggccacggtgaacagcagagtggcctcaaagcgcaggcacagccactggagacagccagtgccacaagataacccgctggaccggaccagactctcatctttgtgagactatcaggaaaaacaaatacgtaggagggggaaatacgctcttttttgattctgtccgtctttgtctcctttttgcactgtctgtgcgccgaagtcaaggtcctcgtgtgtctgctgtcctcattctacgacctctccaaaaagtcaccaggtctgagccacaccggtctgccggcagcccatccaccgagtcctggaccactttttcctgaatggtcttcttccgggccctgcttgaccatctatgtagcttgtttgggaaatgggggaaatcagagggaggggggttaatttattgaaaaacagacttcatctgacgctgagtgttggccaattccaaattctctgggacatggagtgggcgctgtccaaacatactatttaccttaaacacaccagaagagggaacaaggacaggaaagtgacttttaaggtgcacagtaacttttgtacttggctgaaatgcagaaagggaaaacaggatgccgtgcattttacatgctccaaattattaaaaataacaacaaaagaaagaccgaagtaaggaagtaagatatgtaaaaccaataggatgttgtcaaaaacgtttggacaagaacacctggccaagaagaaaaatcatactttgggcagcaagagagaggaccaatgagccttggagagaaaataatttgtcctttatgtaaaagcaccccaattccaggtcgctttaaagtaagacacaagcagcggctcgaccacagaacacaagtcatcaccctgaatgcacgggctctggtgcaagatctaattgctgtacatattattgttgttattattattaattattattattattgttctgtaaacatgttgcacaagcttagcctctttccgttctgttgtgtgtggctgtaaacccgatgctttgtgaaatgagaatcttgacattttacttgtgaaatttggaaaatgtgaccgattgaaatccaccgtgttttgtgttctctatgtcaaagtttagttttatattgagaatgttaacttattgctttgtatcttggggggggggcgaactttgtaaataagttataaagtttctttgagacagtaaaattatggtttcaagaaag

SEQ ID NO: 1252 - protein, 283 aa, Mus musculus
IGFLPVLRNIETPKREAEERKTHTQTPREEMTMTTMPESLNSPVSGKAVFMEFGPPNQQMSPSPMSHGHYSMHCLHSAGHSQPDGAYSSASSFSRPLGYPYVNSVSSHASSPYISSVQSYPGSASLAQSRLEDPGADSEKSTVVEGGEVRFNGKGKKIRKPRTIYSSLQLQALNRRFQQTQYLALPERAELAASLGLTQTQVKIWFQNKRSKFKKLMKQGGAALEGSANGRALSAGSPPVPPGWNPNSSSGKGSGSSAGSYVPSYTSWYPSAHQEAMQQPQLM

SEQ ID NO: 1253 - DNA, 25451 bp, Homo sapiens
atttaaacttgtaaatgtcatgatgaaagtatcaataaatggtttttaatgtttaattcataactatatgttttgatattaatttggaacaatataaagcagatttttaaaaaataatctctttctattagattacgcacatttaaacaataagtggctcaggcaaaataagtcattttaatgtcatctgtgatggatttttcttgacagctactgtaaattacaattatactgcttctctctgcacatgaaagtaagcattgcaataaattatcttttatttcaatccatcatgtctgcttttcagaaacagaaaacctcaaataaaagttcagcactattgtaagaaaaatacagtaatttgtgatctggtttgaaacaaaaaaaatctactacttttttggaaaacagttgttggctttcaaaaatattactaattgtacttaaacattccttttcattagaaggaatccctggatttgtgcatttcttcattcataactactgcctaaaataaatatctagaaagagtaaagaaaaatttcataacttatgaaataacatgccatttgagatcatttattagagatgtgactatttggagattagtgctgtttataggattaatgtaaaattggcaataaatctattttcatgtgcatttttatttctttataacagcatgtacgtaaacatagtactcctctgccctcttggggaatgtatttttagtcaaaaaactagttgaaaagtattaagaaatttaatttacctaggtgacatttaaattgagtataactgcctcatgaaaaggaattaaactgaagaaaatggtcacaagatgaaattccttaaaagaggtatctttttcatgtataaactgtaactacaacatgaattgtaatcagacagtataataggaaagtaagttcataaacaacctttatgtatcctcctctccctctccaaatattccatataaaaggcctcaaatcacaagtgtgcttgggttcatgggcagatgtcacactgtcttaaaggatttttagttagagaaaatcagaagatctactaccaggagaattcttttcagtaggtttcagcagagcgaagacagattttatccgtgaaatgtccagggcaagaaaactcttgtgcacagaaaagggttatggcctgtggtgactggtgtttgggagcacttcggtgcttctgcctgccctgctgtttccattttccccagcatgccagtcaagagctgcagacatactccaactccccatgccacagttagggttaccagtactttctttcaaattagaggagtgaaatttgctactactggtcacttggattgtctctgtgaatttggacttaaaccctacaatcaggtaaataatcttgtgctccccatttattccaaaataatagaaagggaatgcttttaaacagtaattaggaatattaatgagatcctatctgacttagttccagtaagtgctaaaaaccacctaccaatccagaaggaaaatactctgcaaagcaaacaggagtgtatactcagctcctgagagtcaggcattaagatgtgctcaagcagggaactgggggaaatttggcctgttcttttcctctttccacctggctgtgaaatcctctaacctttgcatccatgacacacagattctatgatactcctggagccagaagttccagcaggacccacggagtaaattgttgtaggagaatgctcttagatatctttagccacctagtaattgcacagcttcttttatgcagaggaacgagaggtatgatggggggagggaccctaagtgttttttcagagtgggctttcttcctctcctctcatcggaaattaaaatgaagattgccattgtaacacacatttaagatgtagccgtgatgcctgccaatcagccggatcctctaaaaacaaaaaaaaaagaacctagatttttttttttagaagagaaaatagaatagtttatattgagtgttcttagaatcattgaggtttgttgggattgaactaacataatttataggtttagggagaaactgttcctgtaaaaaaaaaaaaatctagattattatgtcctatttaattatctttcttccaccctgtattcactcttcatcctcagtgtttattcagaaactgtgtggcacaaataaaaacaccttgggaaacaccaaatagaaatacttgcccaccaaagatccacagaaataaccataaagtacaacgtaagagataaaaaccttgacttaccgttcctgtcctcaacatatgtatagcttacctatttctgcactaacagttacatcaaaattaaatctgaataagaggctgcccatctgctggttatagtgacatccaggtctaagtgaagctgtcttacaagtctggggatggttaaaattatttagaaaaatgtataaacatgaatggccataaagatgctggctgaaagcctgtgggttcatgttaaactaaacttagagtctgttagagactctagtttgagatctagaaacttagttctgttaataattgaaatagtagtcctgtaaatcccaatctagtgttagggttaggggcattttgccctttgtccacatgaaaatataaattcttaatagtatatatgttcttgtttgtctgatgctccccaaaataaacatgttagctgatttcaaggactacttttcaatcttgtagatgaagattttagaattggagtctgtgtgcttggtttcagatggaatgtaaaacatttgcatgtaactaatgtagtgcatgcaatgtacttctccacatacatgtaatgaagtaactaatgaagcactaagaattgggaatcacaatactagcttatcttaagcatcctagtgattaaaaagcattctttatgaattttgttaatggtgcaggtcttgaatggaactctcaaatgatctcacggttttggagtatttcaagaatattgacaaagtagattgagcttttcgtgtgagtgtgcctgttggtaaaatgtgtaacactttgaaatagagcagaaaaagggaaccatagaagtagaaagtcatatttctatattgtaatttgttttatatttggttccccaatcaggagtaatttatagtctttttgtgaaacctcaaaaaagccaggcaggtttttatgacctgcattatatgcacatatatcccggttatgtatggcaatcactatgtgtgtatacacactcacttgttgtctaaaagtggctttgtttgaatgctgtacaaaggtaaatgactcaaacgactgtgttggatagatatgtaccttctctcttcatatatccaaagacagtggttgcaggcaacagcaaaaattaaaattattacagcataatgaaaacacatgaatgttattatctgactctaaatattactgactttttctttttcagagaatattttaaagtgactttgttttatcttagtatgcctgaaaaacttatctaatttaattaaatattttttggtcacttttaaagccacataactcatcagaatggttttcaagtctgtccacattttgtgggacatggaataggatcttactttcatggacatccagaaatttggcatcatggtaagaaagttcatttggaggctgtttcttgatcagagatcaagatgtggcagctttgaccctgaagctcttcctctgactttgaatctgcattatcaaccttgtgtttgtgtgtgtgtttatgtgcagggggcaggggaggggggtctgcttaattttaaccgggacattactgtgttactggattagagcccagctgtttcaatcccaaaataaggtttattttgctctctgtcttctcctgaagggtgcatggctggaaggcacaagggatatttgtgtagaaaaagttactgaaaacaaaacgccactgcatcagtgtcccagcagcatgcacatatgactgtttctgtttttctttttctacccccttttctagctgctgactgttgtggttaaacttcattacatcctacacagcgttgacagctgatgtatttagcagcatgtactccttcgtgatttctagattatgcccacccttgtcttccttccccagaatctcttgtttttcactgcctgggtgtgcaccctatagtgagaagacaggggtgggcccagaggggtgggaggatttggattgaggtaggaggcagctcagtggagcaccctcaaggcaggtccacacctggacggggatcaaaggaaagttggtcctggggccttgacctgtgcccctatggacttgattggtccatagaaggactactctttcggacccatgccctcgaggatcgctggacacccagcaggtccaaaccctctttggaccaaagagcccccacctaggcagctcaagaggttcaggtgagagtgcagaaacggcttgtcagccttgtgccctacctggtgccaatgtctggagtgaagctatttgaagtcaggcccctgctccccacaacctgcaccaaaggaggcttccctcctttgcatccttccccaggacttctttgagtgaggggtgtgggcaaggcccaggacccagtagtaggctgggagacctagtagcctgggggacagggagagggggcgaggaagcctgacgtgtctgaaacaaccaggctgcccctgccaggccttggaaaactcttctgggggagtcttgacccagagcacagataatgcaaagactcaggcccagtagccccgtgtttaactcctggtcactatccaggactccagaaatctccacccttccttctctaaaagaagagaaataaaacgaccaagttttttaaaggggcctgacccctgtaatctgttttttttttctgtcctccccatttcctattctcaccccccatgttttttgttttgcagcaaacgacagtgatctacccatggaggagggcatggcattcactataggtaaattgagctcctcttccgagtgagtgcgtagctcctggtggaagcttttgccactggcctaggcccggcagtccggtgaaggaccaataaagccaatcagtgtaatgaaataattcggatgcactggaaatctgattaaataatatcctcaagccccatcttcctaaatcagatacttaccgacacatttaggagaaggcagccatccaacctctaattctgttaccagcataatgtggtgttgggttttttgttttgttttgttttttcattaacacccagtaactagacacgattatgtcccttgctccctgtcagcaagtggcatgtgctctctggtggcccgttcctggctgatcctgtgattggtatcaccaccaaattccagtcacctagggccgtaaagacatcctgtttctgactgtgggacttaatggagaagcaattagagtgaaataagaaaattgttatttgctgatgaatgaacatctcgagcatgtttttaaaatttaaatatttttttaaaaattggtatttataagagggactggtgtttgggtggttattatccacggggtcctaattaaagcttgattaaaatgcccttctttctctaaaaaattacgaactaggcaacttcatacattttgaatggcgcagtgtttcctcttccaactgtttagtttgtagtatactatgtaagcaacatcaattatcaacccttgcaagatgacaacatgagcctgtgggggaagcacttgaggggagggaggagaaacttctcttttttaataatcagccggaaacaatgtttaacaagaatctgatgaggtcactgcagtaaatatttttcctcttacagagccaatcatcacggagggatcccctgaatttaaagtcctggaggatgcatggactgtggtctccctagacaatcaaaggtgtttgctttctgctctgttgcttttaaattgtatgggaaaggaagattggtccgacggcgcgcttgtggcccggccggagcttgcgtgcgcgttctgacggctgggtgctgtgttacaggtcggcgcagttcgagcacacggttctgatcacgtcgaggggcgcgcagatcctgaccaaactaccccatgaggcctgaggagccgcccgaaggtcgcggtgacctggtgcctttttaaataaattgctgaaatttggctggagaacttttagaagaaacagggaaatgaccggtggtgcggtaacctgcgtggctcctgatagcgtttggaagaacgcgggggagactgaagagcaactgggaactcggatctgaagccctgctggggtcgcgcggctttggaaaaacaaatcctggccctggactcggtttcccagcgcggtcaacgcatctggaggggactggaggaaacccccttgttggaagagattccaagagaagcacggttttctctttcccttgccctgactgttggagtaaaaaacctcttaaatccattgtatcagaggtccttacctctctgacagttacaatgatctttgtatctgaactttgcacgtctgccgaaaaatccgaacctgttgactgggatttttaagaatccgtttctcccttttgtgtattccatattggccggccccaaggatgctcgcagaagccagcccccaaccccagcccttccgtatctttcccctccatcgcggctttgcgatgaaagattagcccgcgaacagaggcattgattacaaacatgtccttggcagtggactctgggcctggccattcttcaggtttctgtcaatccagaaacgcgactttcctggacccctgcggctcttcctcccccgcccacatccagccctccaaggccagtccagaggtgaagtttgaggccctccccccacccaccccacacgcacgcacgcacgctagaccgtttgctgcactaggaattcgagcttgggccccactcgcccaggtgtgaacagtggctgattagtgggcggtctagtctctaaaatgacccctccccagactggcccttctcgcatcgggacccgcgcttgcacgctgcaggagccgcaaacgtcagctgttctggaaaccgagagggtcccagagagaggagatacgggcgcatttgagagcaagggcctacttggccgggactgaagcttgcgagttgagctccagttcggccggcagttccatcccgcttcaggaacaggaatccaagggcccacgctctgtctgccaagggccattcctgcccggagcaccctcctttcccttgcgcttgctctccggtacctgttccgcacctgagctcaagggcagggagaggccgggcctctggcagtccacgaaggaagccgtctgccttcggttatgattttaggaacaagtccaacgagggtgttcaagcagttaatggttgtgctaactcttgtttctactgaagcgggttttgcaaagctgacatcccttaaagataacttgggctttcggaagcggcaaggaaatggcacctgtagttgccaggacaggtggtgtcctcggccaggactaagagccagctcatctttgtaacattcataatacgggaaactgaggaccaggtggctcggaaaagagatgagttccagcttttacctaacacagggttctctcgtcgtcccccaacccctccagctcggcttctttgtgtccagggttgtagatttttggatagaggtgtttctgattctagtgagtctgagaactggaaaagaccaaggaggggttgatgatttacaaggtccatagaaaaactttttgtgtggtcggaagttggccaagcagaggcccacagcctgatgctactgccccccacccccccaaagatctgaattccctaaagatcaagagggttcagctggccttgggagatgtttgctggagaatgacttcagttttctcctaaggcaatcagattgcaaccattagcattgtatcttatctgcaaatcagtttactccgaggttccccaaggatagttttattaggaccacaggactttactaaccactgaggtaacacgctgcttgtgcagcaattattttgaggtggaggtatttatgggacaagtttataattccatttattaaagggactaacctaaagtgtgtgggtgtatatatatatgtgtgtatgtgtgtaccaacactcagcagctccctaaagaactccctttaacatgctttgaagttgagattaggaagtagatttaaaaatacctcgtccacgccttcctgtccctcttccagctgaactggccgaaaacctcacccagagccactgggattccagccaagagtggctgcggctaacaccaccaggacctcctggtcctgaggtgactccagtaggctccatgaggaatcccggaccctcaggacaaatgggagagttttgttttctctcagagtgagggcaggcaacaatttaagcaaaccggcattcagaacaggtgtcaccttagcagtagggggtgggagggatccactccaagttcactgagtgcagctaagatcccacattgagaaaccagctaccgccagcggctcggcatcagagggcccgcgctcagtgctcctccctagacctttctgagctaagaaataattccggagtgtagccatctcttgctcacacacaacccgcttctaaattaagcaaggctctgaaacagtatcccgaggggctcatgccggacttttgttccaagaaggcaaccaggtcccctgtgctaccgcaaaagtctttgatccttttccagctgtggacacagagcacccaagagactgtcgcgatgtgcggccgtctctccccttcccccaccttgcaagtctctggaatacactgtccctaggcggcccggccgtcgggtttcctcacgccttgccctgagctccgggaattaccaattccgctttccccggtcccaaccccgaccccgcgcccgccgcggcgatcacttacttgggcaaggccctcagggcacgcgcgagagacctggggcccggcagtatccgagcgactgtgctgggcacacggcgtggcactccataccctaaaacaggcactaggaaggagcaattaaaaccacaagtgcgacacagaaatcaggacgagccgagcggctcccggagttgcctggtggcggaatcattagctggctgttgctacaaagcctcaccgtgtggttcggtgattaagaaaaaaaaaatcttttaaacgttggcaaacccgttattggtttggcgtattgggttttttttgcttttgcttttctttttgctccaaccactctgcctgaaatatttctgcccccagcattgtgcccttaaaccaaaggagaggaattctgcgggcagcagcagctggtacagaagttaaaaaaaaagagaaaccccctctactaatatctgtaacgacagcaccgatgtaatttgttttgaatgttcatttttattggtgttccctctgccaaaatgtgcttgattacagaggtttgtcctgtgatcattgcacactccagacaggggaaggtgcagcgatgaaggttcagctcaggccagatcaaatcccgggctgtttaacgctgaaaggctgcatgttgctattagtgttaaatatatggctaattatgcgtatgaaaattaaacatcagtgttatgctaatggggcgccttcagctgcggatctgagcacttgagactaccatttaatcaaatgaatcagtaactaatacatctgcacgtgtgaactttcacaagatcatttccccgttcccgtcacaccgctaaattatgaaagaaataattatcaacactttctaattacctaacaaagtaatttgggattcaccgtggggctggcgggatggggaaccaacatccacttacagccagggtggtgtacgccacaccgcgagggactggctgtattggtagtagtggcgatggggtgggggctcttgtgcacttttttgtacctagcaccccagaagacagaaggagcagcggcagatcttgcctccactagccctgccccctaggcctggtggcgcgcgctttggccactggaggtgaggaagatcctgggtggcaacgagagacgtctacacatagataagggagcctaccacaggcctgggtttgctgcgggtttcggtgtcccccagggactcctaaactctggaagtcgcgctagacctcaggaggccggaaaatgaccacctggcgtcggtggctccagcagatctgagcccctaggccccctgggctccacgctgagccgcgctctcggggcgagtgagcccggggctctccgcgcatggggagtggagaagggagggggaggaggaggaaggctgggagggaaagaggatgtgtgtgttgggggagggggcggtgcagccgcctttcctgggaggagaagcgcgggttcctggctctccacgcgcactgctttaatcagacccgtgcagcctcgagctggagtggccagctgggcctggagcaatgcgagcgggccccagggagcgacagcggcgttggcgcagcggccgagtgagtgagttcgcagggagggcccctaagccccgactccagggatgcggcagagcgtaccggggaggcgcggccggataggcgctgcgctaggcacaaggctcttaggagaacctctgtctgttggccgcctcgggcgcccccagtgcgcgactccgcgctccagaggcagaggtcagtctcctcctgagccgccctagctctgcgccgaactgagtggcagcgacgagaagcggtcccgggtgtccggtgttagggaccgctgaagggtggggacagtggtaggggggcggcggcgcggagccgctggttggttcctggggaggaaagcgcgcgagggaggcgggaggccgatgagccgcgggccgcaggggccccggcgcagacgccgcagcccattgtgcttcctgcccggcgcgctctgttgcagaggagccccggccgggaagtgtggatgcgtctctcccgaggccgggccgcctcgcccgctctagtccagcggagcccgagcgcctcggaccaatccccagtgattatgcaagacagcggaccaatcagctccgccagctcatgaatatttatgaccttcgctgagtcaaagctttgaaccgagtttggggagctcagcagcatcatgcttagacttttcaaagagacaaactccattttcttatgaatggaaagtgaaaacccctgttccgcttaaattgggttccttcctgtcctgagaaacatagagacccccaaaagggaagcagaggagagaaagtcccacacccagaccccgcgagaagagatgaccatgaccaccatgccagaaagtctcaacagccccgtgtcgggcaaggcggtgtttatggagtttgggccgcccaaccagcaaatgtctccttctcccatgtcccacgggcactactccatgcactgtttacactcggcgggccattcgcagcccgacggcgcctacagctcagcctcgtccttctcccgaccgctgggctacccctacgtcaactcggtcagcagccacgcatccagcccctacatcagttcggtgcagtcctacccgggcagcgccagcctcgcccagagccgcctggaggacccaggtacgtgcgcttgccagggagagggagaggaggaggtacaagggagagagggaaagaaggagcgggggagaagaggagagggagagagagagaaagagaagagaggagagcgaggtggggtgggggtggggagggcgcgggagcagtggaggtttcgaatatcaatctatagatccttgtcacagcaaataaatttttttaaaaattccctcaatttgcaactatccagccaaggataaatcccagagcgtctcctggcactggctgggcctctgggcggctcggtgtgcagagcacacaatgccccgctggaaaacagaaacccacatgtgcacgtattagtctcggtaattatttattgcgtagcgctataaacaatgtatgcaattaagggtaattaaacctcaactaccgcctgcaaaaatagcaaactttccctgcaaaggcaggagctgagctcctgggaacggctctatccctcctgcagcgtcccgggacaggccctcggattttgggggacccttccctggctttcagagtttcttgaacgttctctccctggtgctgcctccgccacccttcggtagccactcgctctcggctgttcgcactaaaggcggcccctcgtattaacaacgggccctacttctgctgtccctccaggggcggactcggagaagagcacggtggtggaaggcggtgaagtgcgcttcaatggcaagggaaaaaagatccgtaaacccaggacgatttattccagtttgcagttgcaggctttgaaccggaggttccagcaaactcagtacctagctctgccggagagggcggagctcgcggcctctttgggactcacacagactcaggtacctcgccgctgccgctccgttctgccacgcaggctttccgcggccggcctgcgcccgggtcttcatttgttgctcgctgggactcagggtcggggtgtcactgtgtgtatgtgtttgtgtccacccctggctctcagcgtgtctccttcctccctcattccctctgccctagctctgtcactgctctcggtatcccgagctgcctgccgtccggccctctgtccctggacaatctgattagggcgcaggaaggatttccccagacgatttgtttgggaactcagaggtcacacgtgcctaaacaactggaacaatagactccgggcttaatccctcctttgcctttaaattgtgtgactaatcactcggggcctgggtccgcgcctcagcctccctcctcctcctccttcttaccggttgggggtggggggagatcctttcctccgccctctcacctctcaagtcccagaccttagagaagaaacgggaccttccttcccggctttctgtaagactccggggagcccgtgagcgttcctgacggcggcgggcgcgggtttccgacgtccggtccgggatttggagcagagctggagaaagcaaacagacactagtgcaagaatggttttgaatccaaagagaagttcagcaaaaccttgaggcctccttagtccgtcccaactcaagggcagaaaagatggcgcatagaaaagttgggtcgcgttgcaaataaatttcctccactccttcctaggttttcgattctttttattgatgttgatattggaattgctggctcggtgttatgcaggcgctgtatcttccgcaggcggtagccacggtcggactgagcccctggcaggctaaggcctggatcccggttctcccctcatcacaactcctccctggctctctgagagctgcccccgtgggctgacggcggcgggcggttcggccttcgagcctttggctcttatgggggaagggaggaaggagggatgtctctgcttctctggcagggagctgccagctggcgcagggttgggaggtcctatctctgctgttctgcggtcccttttttcctccctgtgacctaggtaggctcagtggtcccagcctgagtcacgttgttgtccgctcttgcaggtcaagatctggttccaaaacaagcgatccaagttcaagaagctgatgaagcagggtggggcggctctggagggtagtgcgttggccaacggtcgggccctgtctgctggctccccacccgtgccgcccggctggaaccctaactcttcatccgggaagggctcaggaggaaacgcgggctcctatatccccagctacacatcgtggtacccttcagcgcaccaagaagctatgcagcaaccccaacttatgtgaggttgcccgcccgtctccttcttgtctccccggcccaggtccctcccgcctccaggtccatccatcccgtccggaaaagaaggacccagagggaagaaggaacagtggaggcgggacgccctccatctcctcggagccccgcgaggtccggcccagcaacttcccggcatccgcgctctagcctgaaccctggcctgggccgagcagtggcagcagagagtggcctcggagggaagccactgccacctgagacagcccaagcagcaagataaacccgctccacccgacccgccgaccttcagctttgtgggactatcaggaaaaaacaaaacaaaaacaaaatgtagaaaaagcaaaagctcttttctgtcctgtcagtctcctgtctccttttgctctgtctgtgcgctggtaaagtccaggtcctcatccgtccgctgtcctcattctgcggcctcagcaaaaagccacaaggtctgagcggcccgggtcctgccgggctgaccatctccggatcctgggacactctgcctgaccatctgtgtagctggtgtgggaatctgggggcattggagggagggggttttatttattgagaaatggacttcgcctgaggctgtttgccaattcagggttctgctgggcgcaaggaacgcactgttcaaacgcactgtttactttaagcgcacggggagaaacgaataaggaggacgtggtgatttttaatttatacagtaacttttgtacttctctggtatggagagtttggagccgaatgatttgcattttttacatgtccgacattatttaataaataatttttaaaagaaaagaacgataaatgaagccaacatgattttctcatttcgggaggaactctgttgcttcgcctggacaagaaggaaaatgctgatttcctccttgggtagaaagagggagcgagggcaaatggggagtagagagaaaacaggcgagaacaagcactctaattccagtgggctttaaaataagacaaaatcagctttacaacaatccctagaggctcgaccacagaataatgccagtcaccaccctgaacgcacaatctccagtgcaggatctaatgactgtacatattattgttattattattattgttattattgttgttctgtaaacatgttgcacaagcttagcctttttgcgttctgttgtgtgtggctgtaaaaccccatgctttgtgaaatgagaatcttgacatttttcttgtgaaatttggaaaatgtgatcaattgaaatcaactgtgttttgtgttctctatgtcaaagtttagttttatattgagaatgttaacttattgctttgtatcttgggaaaaaaactttgtaaataagttataaagtttctttgagacagtaaaattatgatttcttgaaagaactgctctcttgtgctgtgtgaggctgtgccagggggccaggccaggttcccgcctctggagacagttcatacagggtcagcgacttatcaacttatcggtgatagaatggagaccctgtaccccagaaacaccagggtatcgtcagaggcctgtgaggtgccccattgggctttttcttcctgccttgctccattgacccccaaggtgtctgattcctacctgaattggaagggtaaggagagaatgcctggcgagggttccccaggaagggggctcaggaacaggtgcatcagggcagggctgacgctcaggaaccaaaaggatgttgaagaccggctgagaggagatgaagtcagagttcaaagtcagccggccaggacgatttcagtttttcccacacccagccagctcttgagaggccgggaggttgggaggctgagaggcctgaaagcagagacactgctttgcctctagccttcctccggatcaggcctccctgcttttgcatgcccggaggcgctggattccgtcgcggaaaagacgcagccagacgccaagcaggggcccggaaagacacgtctgtcagactgcccctctatcaatcagtgcgctccaggggacagggcacagtcccaggcagccaccctgggagctccacagtgagaaaggcaggttcctgcctaatgatccggggcctttctctgcacctcacagaaatggaggtgctaaggaaagggtggctgacactttggaaccccaaaatctgaccaaagtcaagcacaccactcccacctcatcccagtccgaaagtcccaaggccaggcccttatgggagcacctctagtgaagcgcttgctcagattagtttcctccagaggaacacgggcttcaagggactagaaccagattggttcccttctcgtggccctgcgtcccagcccagccccaacccccaccccagatctcgcagccgagccgaggcagtcccggagagctgcgggcccagacaggctgccaagcgctgttcctacttctcccgcactcgccttccagcgctgctgcccgcgggagctggccctccacctttggggggtcttttcaggcgcgcggtggggagcagagcccggaaggcagtgatctgtgttgtgacaagcacccatttttcaattggtgctggtgaaagatcagatgcgccaggctcttccgacgccctttgggaaggggaggaggaagtggtggggctgctgggggtggggggaggcggtgtgatggaagcagggaaagtagtcgggggtgggggaatgatgccggggacctccaagccccttccaggcctgagattgggacttctccgcagcacctagaagaaccagcgctgatgggagagatcagacctcagaaaccaggatgtgggcagtcagatgggcctcaaagctgaggaaagaatgaatttcccagctcccgcgcggggtagggggtcttcctaggttcaatttcccctaggagatgtgactttgctagtgcgaagatttctgtccggcatctgactcaggtcccccagacggcagctagggcccaatgcctcaagctacaggcaaaatctgtttggtcaagcggattgtaatactttgagatattagcttatactaatttaataatctcttgctaacagttcaaatagagaaattattagttttagctcaacgaaaacggtctttagttaggctttattataattataagcggttgtactttttaaaaatgttaatctcaatataggcctaattaatgctgccttgttactgacaagtagttcatcaaatatctgattcaaagattttcataatgagtatattaattaaactatgaataatctaaaggtggttatatttaaacaatacctcattataatgattaaatactgatttcgaatattatgtcttaacaattgtcacttagaaaacacaacctttccttatgtatgagtctgtaatggcaaaatgcaattttgggatttttttcccttgttcaaaaaatgtgaaactcattttaaaacacttctgaaataggttacacacagcttaatgattatcaaaatgactcttttctgcaaaaaaagaccccaaagtgcgcgtacagctgcaaacccaagagggtcagcatcatttcactgtattctcttcttgattacaagccgggcccatcaaacacaacataattacagtaatttcaggtttatttattctaatgcagtttccccatctctctggtaattatgagcaattttttcgcccagggaatctttttgcattaacaaaagagataacgcactgaaagccaaatttgctgtgcattgagaaaaggaaaaaaaaaaaatcaaataggtgcgagctgccatctctgcaattctctggtaccggagccggcaaattgcttgcaggtgtatggagcaagcttgtcaatggccaggcctccaaattagcaaatgcacagcagcaaagtaatgaagacagacttagcaaaattgccaaacaacagatatccctttaatatcttctctcacccacactagctctaaaaaggggtaggggtagggagagaagcaacagtccccagccccctcctcactggtcttggctttcaggagcctggaggggctgggtagccttgtgagtggtaatctaattgtgggagaactcatatcttaaatcgaggcactatttaaaaatataaaactggaaacgtttatagttcacagcttttcctctctgatcattatgttttatttttatttctttcttctggaaatctgcacctgggctgggttagatataatagctcttcagccttcttgattctgtacgagtttttagagccacaagaagttttaagattccccccacctatatgcacagaagtgtgaatttattcatagagagtcatctgatgtagaaactaactgaatctttcaccttgaagaaattgtcaatttctgtcaccccaggaaaggtaggtctgtgcgctggatgtggaacccgagatactagatcaagaaaaattgggagcaaagaagcaacccaggcttcctggctttaaatctttatcctggtatccatctcttcctttctgtatcttttataaactgatttcagaattacctggtttttgtcatcccaccgcctggattaaacacccttgaaattataggctaacgcaaacttttctgctcttcatcccgcatggccataggaacctccatcaaatgcagtacagaaggcgagggtccttccctcccatgcctcaaagaaatcctcctccggtccccagctccacaacaaacccctagctccagcgtagacagacaaacggctgtaaaaagtgccttccccaggctcaagaaacatgtcacccccacccaccgctttcctaccccctccctcatcccccaatcttcgaggattaacacttcctgaaacatcaagtgtttttataaaaaggaaaaaaataatcctgacatcgctgacaagaagttttgatggaagaattagctggtgcatacataatcactcccccaccctcctactcccggagcgggagccacggcggcgggcgcagcgcagccttccaaccctctgaaaaatgaaaccggtttccacccttaccttcttcagtgtcaatttcagataatctggacacacactctttgctacatcaaatcaaaagggtcgaaggtagcttttggctgggagaataacgggaaagaaaaatcaaaaaagaaaaaagggaaaaaaaggaaaaatagaaaaatacaaaaccgaccaaaccagagtaaaacaaaaccagaaaaccaaaaacaatcccccagacccatcctcctatcttgagagtaaagagtggaaagaggtccccaggaccaggcgcctcagagcgccgcaggctttttgcagcgctgcgcttgcagaataggactgaaattttcggctatatagcctctgtctttatagctgatgaaaaaaattgcagattattagcataaatgtttactcttcattacgctgatgacattgtgcactcgagatcttggtaatctttgggaaaattatgagtaatttttaaaaattttaaagcagcagcagttaccatgcaattcaggctaattctgcgtaggctccgaacggatataattatcgaggagtcaagatgttatgctaaaaactatgcattgatattcccatttattatgtacatacaactttgacaatgttgatgcttgaaatagcaggaaattgtcttgcgcaaaaattacagtccatattaggacatctgaaattgcgaagaattatatagtaattgcaggctttcagatgggagagccagaatgctcaaactagtgcaaatgtggataaaattacagatcagagcaaaaattagggaaaaagggggtctgggatttttcaggttggctataggattccggaagtgtctaatgccacatgattgctgcagctttaggggagacattcatgcctcaaatagagcattggccagggtggctttaattgaatttcttgggctttttcttttaataggggcgaatgaggaaattggccacccaaggcaaattttcactgtcctcccgtgaacgtgccgaggagagaatccttttccccgcgtacctgctctccccagttgaatgcccgggaggccccgaggggctccccaccctaaaagcagcaactgagaaagtgactgaaccggataccccctcctgccacctcctcctttctttttctttcctgttcccccctcctccttccttcggccccattcccggattctggcaaacccctccacagtgcagccgggccgggccccgggatgggcagaccgggcccagggggcgggggggcgggatgatgggggagctggctgactgtgctgtcggtgccaggcggggagcatctcgggagatgcccagggcagttttgggaaggtgggacgtggaaggtaggagcggagggtcggactgtcccgccccgcgaccgcctaggctcttcttttgtctctaccgcctggagatagcgtccccccacctcccaaacattcacttcccacttgggcggcgcttctctcgggaaccgagacaccctgcgactttaagaagccgaggccagacccgcggagggagggggcggggcgggggctgccccccgagcggggagcgcggtggcgcccggcgggagaagccgactggagcgcggccaccgctcggagctgcagtgcctcagtccggttctccggccagaagtccccattgttccgggtgcgatgatttcacctcccgggtgtccgagactcctggaccacaatcgggacggagaagcggcagcgtgggcagcctgccacgtttgctccgtgcgggccccagtctgtcccccggggtcacccgagcgtgctccaagtccagtcctttcgccctcgcttctcctgccccgaagttgtaatcctctgcccagcacccccgacccgcctcgtgggccggttctgcaccttctcccactcggcacccgaccctcggcccccatctcctagcccgggacccgactcgactggggaccctccccaaaagggcctctttcggagcgctgccacgcagcccgcaaactgccgggacactgcagcttgtgcgctctggcccgggaggactagtgggggagccggagaggccgagggaagaaaggtctgtctggaggctgtctgcgttcttggcgtggaggcgccgagctgctcctccaagacctgcctgcactttcttttcctgaaacacagtctccccgccccgcccagcatcaggccgcagggcggaatgtaacatcttgtaatgcggcaatcactgccaaacccttccccgcgaggggaactcccgcgggggggaagggagatcgaagggatgtggggcctcagcatccgccttcactggtgtgtgtgggggcgggggtggtgtgggctggcggcggcgtgcctggcagatcctgggtggggagggaagggaaaggtcggccgggggaggcttccctggggctgctttgggtgttaggatcctgctagaggccgccagtccccgcaggacctagtgccctagcgccaaggctggaagtaacgcggcccccaggatagcgccccatcctacagcttctaggattcctggaccccaaagttgaattcgaagggaaaggacctatctgtatttttggaggaggagaggatctgtagcttaattctcaaaggagtctccgaccctaaacaggttaaagccactggtggtcgctgttccatggagggaaaggagcgggcttttgacttttgagcgagttcgggggacgccaggagtgggggagttgcactcgagttttactgcccgtaagaacgactttttgagaggggacggggcttcttgctcccggacattgttctcttgggcggaggggaccacttcagagcttctctttgcacccgcctcttctgcccctcgtcttctaccactgaactgtttgtaaacaaagttccagtcttcccccgctctctccgcctccaccaaaccggtatttctcccaaattcgctccatcagtctgggatcgttacacagggcggatattcacaattttcacaagtgatcctgaaagaaggcctaggggaagcctcctaaacggtcccacattgcagcagggctggtgaggcctgggatccattctctctcttttctgcccttcccatcccggagtctcggggccggcggcgggaattccgcgcagccggaggggggtctgcgcccagcggagcgccgtgctggggcgaggtggctgtgggcagagcgtgcaccggggttggggggagaaggggattgaaggggcggggggcgcgggagtacctgggcggcaggcagttggccctggagctcagtgcccgcgttctgcctgagttgggagagccctgccagagggtggagcggagagggccgtgcacccctcactcttcagcttccctccccctgcttcccagcgcttgtcatatcctgtctctggcctgatatttcacgcgagcaattggaaggagattacaatggagatttatgtgtgttctgagcactgctagtttcccagcgtagagagccgagatcgctgcttcccatttccatttttcattcgcgctttggggagctcagtagagcacggggggagcgtgtctgcgcggcggcgggctgatcacaggactccgcgtctccgggcgggccgggagactgtgagaaaggcttgccagcgcgtcgcccccggcggggctggagccggcccccgcctccaggagccaggctttgtttcctcccttgcctacccctccccctttccgccccctcatttctgggacctgggcgcgtccttgcaaccccttctctttgcccttctcgtggtctgcggaaacacccccttcctctggccccttcaccctcctgctctcggcttcgcaggctccctggggaaaggcgcaccgtggcccggcccgaccctgtcgtcactgggtgccgggtaaggtgactccggcgagtctgtggggcctcagcccaccccggagctgggagctcccgccctcccgactcccaggcttggctcatgccaaggcctgttgcgtgattccaacttgggctgacattccctgccccgggctctccagcgtaggcctcttaatcatcttgtctgctgcagatcctcgacaccagccaatttactgcccgtctctccccgctggtttcgggaggagggaggggagtgcgtgcaaaggaggggagggcacagtcaccctcaggaggaaggctggcaccagttagtggcactaaaaagaaaaaaaaaacaaaaaaaaaagaaacaaaacccacagaatttggagctggggtgcgggtggtggacagggatgggggtctgccaggcagcggttgcttagggaaacccaggatcataggtcaatgggcttcaacccaggcctccctagcctgggaaaacaatgcaaaaatgcaatgggacactggatcgtgtagcccccctgctttttccaaagccgcaactctctggaccgcatggttgtaaaccagactcagagaaggccccaaagcaatctgctcagaaaagtcatgattctcctcaggatgatgccactgagcccagaaagtcacctccgccccgtgtctggttttggcagataagttgaagacacacagcacagatggcctcatcctagaggagacgaagcctggacctggcaggcggggctctgtggctggcacccagcccctctgcagtaggggagaatcccttcagagggcatggctgaggttcaaaccccaggtaggaaggggctttcccagccccaggatgttgctcttccacacaaagtgaagttggaaagcctctgggtaactgtgggtttcatacccctctctgggggtagtgaaaaaacagtaatactaaatattaaatagatataatttagtgagttgttaccatgtgccaggcactgttacactgttgcctcattaaatgctcacaactgcaagctatagctgttaatatttctcctatcttacagatctgcaaactgtaacacagggtggttaaatgggttccccaaggtcacacagtcagtgattgaagccaggaagcttccaactgcgggccctagcactttcagggaaaggccctagcactttcagggaccttcattaaccaccaacccctggcctttgtagggaatgccagaaagcagggtcacctccaaagttgtaagctggttgtgtggggcccaaggtagaaagcagagcccagtggtgtgtggacatcccccccaccaagagtatgaagtggaaagatgccactctcataccagtgtatataagtctgtgagtatgtatacatgagtgtgcatatgtgagtttgtctatcagtgtgtaagggtatgaatgcgagtgtgcatgacttcgtgtgtcagtgttgtaagagtgtgatggagtatgagtgtgtgatgtgacggtgttcgagtgtgtgtcattgtgtgtgcgcctgagaatatttgagcatgagtgtgactgtgagagtgtgtatcagtatgggtgagtgtgtgctagtatagatgggcctgtgacagtgtgctcagtgtgtgattgtgtgtttgcgcgcgctcgagcacggccccgtgtcgttggggtcggcttgcattccagagcagccagccatgcctcccgagggtgactcacagagctctcagttcagtcccgaagggcggtgggacaaacggaggggaaggttcaaagtagggttccgaccctcaggctgctgcagagctcaggtccctgacaggaggtcccccgcggcggctggggtgccgagcctggccatctaggcgggcgcgggggcggtggcgccggcgccggaggggcagggcaggcggaggctggagccgctccgcgctgagtgagtcaccccgccgccggccggagaatccctcgcggggactcgggagggggcggggcgtgaaacccccggtgcggccccacgcccagcgcgcctgtcctctccttgccgcacctcgcggtgtcgcagcctcggaaagatgtaaacgtagctctcggccggctggcttcccggcctgggcagcggcttgagctctgagcacgtgactgaccggaccctggcaccaagaaaaaagcgcacacatccaatgaaaacaataatttatttaaataatctcttcatattgtaaaatcaacattaagagcatgttgttttcataataaataaccccaaaatacctttcatttcaacaacaaagactttaggatacgataaaacaaatccaaatcagtagcttaatttaactgaaatgtttttaaaggaaaaaataaaaaggaggggttgctgaggtcactgctaaactgcagttttcacaactgggggt

SEQ ID NO: 1254 - DNA, 2696 bp, Homo sapiens
ggaggagaagcgcgggttcctggctctccacgcgcactgctttaatcagacccgtgcagcctcgagctggagtggccagctgggcctggagcaatgcgagcgggccccagggagcgacagcggcgttggcgcagcggccgaaggagccccggccgggaagtgtggatgcgtctctcccgaggccgggccgcctcgcccgctctagtccagcggagcccgagcgcctcggaccaatccccagtgattatgcaagacagcggaccaatcagctccgccagctcatgaatatttatgaccttcgctgagtcaaagctttgaaccgagtttggggagctcagcagcatcatgcttagacttttcaaagagacaaactccattttcttatgaatggaaagtgaaaacccctgttccgcttaaattgggttccttcctgtcctgagaaacatagagacccccaaaagggaagcagaggagagaaagtcccacacccagaccccgcgagaagagatgaccatgaccaccatgccagaaagtctcaacagccccgtgtcgggcaaggcggtgtttatggagtttgggccgcccaaccagcaaatgtctccttctcccatgtcccacgggcactactccatgcactgtttacactcggcgggccattcgcagcccgacggcgcctacagctcagcctcgtccttctcccgaccgctgggctacccctacgtcaactcggtcagcagccacgcatccagcccctacatcagttcggtgcagtcctacccgggcagcgccagcctcgcccagagccgcctggaggacccaggggcggactcggagaagagcacggtggtggaaggcggtgaagtgcgcttcaatggcaagggaaaaaagatccgtaaacccaggacgatttattccagtttgcagttgcaggctttgaaccggaggttccagcaaactcagtacctagctctgccggagagggcggagctcgcggcctctttgggactcacacagactcaggtcaagatctggttccaaaacaagcgatccaagttcaagaagctgatgaagcagggtggggcggctctggagggtagtgcgttggccaacggtcgggccctgtctgctggctccccacccgtgccgcccggctggaaccctaactcttcatccgggaagggctcaggaggaaacgcgggctcctatatccccagctacacatcgtggtacccttcagcgcaccaagaagctatgcagcaaccccaacttatgtgaggttgcccgcccgtctccttcttgtctccccggcccaggtccctcccgcctccaggtccatccatcccgtccggaaaagaaggacccagagggaagaaggaacagtggaggcgggacgccctccatctcctcggagccccgcgaggtccggcccagcaacttcccggcatccgcgctctagcctgaaccctggcctgggccgagcagtggcagcagagagtggcctcggagggaagccactgccacctgagacagcccaagcagcaagataaacccgctccacccgacccgccgaccttcagctttgtgggactatcaggaaaaaacaaaacaaaaacaaaatgtagaaaaagcaaaagctcttttctgtcctgtcagtctcctgtctccttttgctctgtctgtgcgctggtaaagtccaggtcctcatccgtccgctgtcctcattctgcggcctcagcaaaaagccacaaggtctgagcggcccgggtcctgccgggctgaccatctccggatcctgggacactctgcctgaccatctgtgtagctggtgtgggaatctgggggcattggagggagggggttttatttattgagaaatggacttcgcctgaggctgtttgccaattcagggttctgctgggcgcaaggaacgcactgttcaaacgcactgtttactttaagcgcacggggagaaacgaataaggaggacgtggtgatttttaatttatacagtaacttttgtacttctctggtatggagagtttggagccgaatgatttgcattttttacatgtccgacattatttaataaataatttttaaaagaaaagaacgataaatgaagccaacatgattttctcatttcgggaggaactctgttgcttcgcctggacaagaaggaaaatgctgatttcctccttgggtagaaagagggagcgagggcaaatggggagtagagagaaaacaggcgagaacaagcactctaattccagtgggctttaaaataagacaaaatcagctttacaacaatccctagaggctcgaccacagaataatgccagtcaccaccctgaacgcacaatctccagtgcaggatctaatgactgtacatattattgttattattattattgttattattgttgttctgtaaacatgttgcacaagcttagcctttttgcgttctgttgtgtgtggctgtaaaaccccatgctttgtgaaatgagaatcttgacatttttcttgtgaaatttggaaaatgtgatcaattgaaatcaactgtgttttgtgttctctatgtcaaagtttagttttatattgagaatgttaacttattgctttgtatcttgggaaaaaaactttgtaaataagttataaagtttctttgagacagtaaaattatgatttcttgaaagaac

SEQ ID NO: 1255 - protein, 253 aa, Homo sapiens
MTMTTMPESLNSPVSGKAVFMEFGPPNQQMSPSPMSHGHYSMHCLHSAGHSQPDGAYSSASSFSRPLGYPYVNSVSSHASSPYISSVQSYPGSASLAQSRLEDPGADSEKSTVVEGGEVRFNGKGKKIRKPRTIYSSLQLQALNRRFQQTQYLALPERAELAASLGLTQTQVKIWFQNKRSKFKKLMKQGGAALEGSANGRALSAGSPPVPPGWNPNSSSGKGSGGNAGSYIPSYTSWYPSAHQEAMQQPQLM

SEQ ID NO: 1256 - DNA, 1846 bp, Homo sapiens
gtacgccacaccgcgagggactggctgtattggtagtagtggcgatggggtgggggctcttgtgcacttttttgtacctagcaccccagaagacagaaggagcagcggcagatcttgcctccactagccctgccccctaggcctggtggcgcgcgctttggccactggaggtcaagatctggttccaaaacaagcgatccaagttcaagaagctgatgaagcagggtggggcggctctggagggtagtgcgttggccaacggtcgggccctgtctgctggctccccacccgtgccgcccggctggaaccctaactcttcatccgggaagggctcaggaggaaacgcgggctcctatatccccagctacacatcgtggtacccttcagcgcaccaagaagctatgcagcaaccccaacttatgtgaggttgcccgcccgtctccttcttgtctccccggcccaggtccctcccgcctccaggtccatccatcccgtccggaaaagaaggacccagagggaagaaggaacagtggaggcgggacgccctccatctcctcggagccccgcgaggtccggcccagcaacttcccggcatccgcgctctagcctgaaccctggcctgggccgagcagtggcagcagagagtggcctcggagggaagccactgccacctgagacagcccaagcagcaagataaacccgctccacccgacccgccgaccttcagctttgtgggactatcaggaaaaaacaaaacaaaaacaaaatgtagaaaaagcaaaagctcttttctgtcctgtcagtctcctgtctccttttgctctgtctgtgcgctggtaaagtccaggtcctcatccgtccgctgtcctcattctgcggcctcagcaaaaagccacaaggtctgagcggcccgggtcctgccgggctgaccatctccggatcctgggacactctgcctgaccatctgtgtagctggtgtgggaatctgggggcattggagggagggggttttatttattgagaaatggacttcgcctgaggctgtttgccaattcagggttctgctgggcgcaaggaacgcactgttcaaacgcactgtttactttaagcgcacggggagaaacgaataaggaggacgtggtgatttttaatttatacagtaacttttgtacttctctggtatggagagtttggagccgaatgatttgcattttttacatgtccgacattatttaataaataatttttaaaagaaaagaacgataaatgaagccaacatgattttctcatttcgggaggaactctgttgcttcgcctggacaagaaggaaaatgctgatttcctccttgggtagaaagagggagcgagggcaaatggggagtagagagaaaacaggcgagaacaagcactctaattccagtgggctttaaaataagacaaaatcagctttacaacaatccctagaggctcgaccacagaataatgccagtcaccaccctgaacgcacaatctccagtgcaggatctaatgactgtacatattattgttattattattattgttattattgttgttctgtaaacatgttgcacaagcttagcctttttgcgttctgttgtgtgtggctgtaaaaccccatgctttgtgaaatgagaatcttgacatttttcttgtgaaatttggaaaatgtgatcaattgaaatcaactgtgttttgtgttctctatgtcaaagtttagttttatattgagaatgttaacttattgctttgtatcttgggaaaaaaactttgtaaataagttataaagtttctttgagacagtaaaattatgatttcttgaaagaac

SEQ ID NO: 1257 - protein, 67 aa, Homo sapiens
MKQGGAALEGSANGRALSAGSPPVPPGWNPNSSSGKGSGGNAGSYIPSYTSWYPSAHQEAMQQPQLM

SEQ ID NO: 1258 - DNA, 2121 bp, Homo sapiens
caaaaatagcaaactttccctgcaaaggcaggagctgagctcctgggaacggctctatccctcctgcagcgtcccgggacaggccctcggattttgggggacccttccctggctttcagagtttcttgaacgttctctccctggtgctgcctccgccacccttcggtagccactcgctctcggctgttcgcactaaaggcggcccctcgtattaacaacgggccctacttctgctgtccctccaggggcggactcggagaagagcacggtggtggaaggcggtgaagtgcgcttcaatggcaagggaaaaaagatccgtaaacccaggacgatttattccagtttgcagttgcaggctttgaaccggaggttccagcaaactcagtacctagctctgccggagagggcggagctcgcggcctctttgggactcacacagactcaggtcaagatctggttccaaaacaagcgatccaagttcaagaagctgatgaagcagggtggggcggctctggagggtagtgcgttggccaacggtcgggccctgtctgctggctccccacccgtgccgcccggctggaaccctaactcttcatccgggaagggctcaggaggaaacgcgggctcctatatccccagctacacatcgtggtacccttcagcgcaccaagaagctatgcagcaaccccaacttatgtgaggttgcccgcccgtctccttcttgtctccccggcccaggtccctcccgcctccaggtccatccatcccgtccggaaaagaaggacccagagggaagaaggaacagtggaggcgggacgccctccatctcctcggagccccgcgaggtccggcccagcaacttcccggcatccgcgctctagcctgaaccctggcctgggccgagcagtggcagcagagagtggcctcggagggaagccactgccacctgagacagcccaagcagcaagataaacccgctccacccgacccgccgaccttcagctttgtgggactatcaggaaaaaacaaaacaaaaacaaaatgtagaaaaagcaaaagctcttttctgtcctgtcagtctcctgtctccttttgctctgtctgtgcgctggtaaagtccaggtcctcatccgtccgctgtcctcattctgcggcctcagcaaaaagccacaaggtctgagcggcccgggtcctgccgggctgaccatctccggatcctgggacactctgcctgaccatctgtgtagctggtgtgggaatctgggggcattggagggagggggttttatttattgagaaatggacttcgcctgaggctgtttgccaattcagggttctgctgggcgcaaggaacgcactgttcaaacgcactgtttactttaagcgcacggggagaaacgaataaggaggacgtggtgatttttaatttatacagtaacttttgtacttctctggtatggagagtttggagccgaatgatttgcattttttacatgtccgacattatttaataaataatttttaaaagaaaagaacgataaatgaagccaacatgattttctcatttcgggaggaactctgttgcttcgcctggacaagaaggaaaatgctgatttcctccttgggtagaaagagggagcgagggcaaatggggagtagagagaaaacaggcgagaacaagcactctaattccagtgggctttaaaataagacaaaatcagctttacaacaatccctagaggctcgaccacagaataatgccagtcaccaccctgaacgcacaatctccagtgcaggatctaatgactgtacatattattgttattattattattgttattattgttgttctgtaaacatgttgcacaagcttagcctttttgcgttctgttgtgtgtggctgtaaaaccccatgctttgtgaaatgagaatcttgacatttttcttgtgaaatttggaaaatgtgatcaattgaaatcaactgtgttttgtgttctctatgtcaaagtttagttttatattgagaatgttaacttattgctttgtatcttgggaaaaaaactttgtaaataagttataaagtttctttgagacagtaaaattatgatttcttgaaagaac

SEQ ID NO: 1259 - protein, 165 aa, Homo sapiens
RRPLVLTTGPTSAVPPGADSEKSTVVEGGEVRFNGKGKKIRKPRTIYSSLQLQALNRRFQQTQYLALPERAELAASLGLTQTQVKIWFQNKRSKFKKLMKQGGAALEGSANGRALSAGSPPVPPGWNPNSSSGKGSGGNAGSYIPSYTSWYPSAHQEAMQQPQLM

SEQ ID NO: 1260 - DNA, 1771 bp, Homo sapiens
tattagtctcggtaattatttattgcgtagcgctataaacaatgtatgcaattaagggtaattaaacctcaactaccgcctgcaaaaatagcaaactttccctgcaaaggcaggagctgagctcctgggaacggctctatccctcctgcagcgtcccgggacaggccctcggattttgggggacccttccctggctttcagagtttcttgaacgttctctccctggtgctgcctccgccacccttcggtagccactcgctctcggctgttcgcactaaaggcggcccctcgtattaacaacgggccctacttctgctgtccctccaggggcggactcggagaagagcacggtggtggaaggcggtgaagtgcgcttcaatggcaagggaaaaaagatccgtaaacccaggacgatttattccagtttgcagttgcaggctttgaaccggaggttccagcaaactcagtacctagctctgccggagagggcggagctcgcggcctctttgggactcacacagactcaggtacctcgccgctgccgctccgttctgccacgcaggctttccgcggccggcctgcgcccgggtcttcatttgttgctcgctgggactcagggtcggggtgtcactgtgtgtatgtgtttgtgtccacccctggctctcagcgtgtctccttcctccctcattccctctgccctagctctgtcactgctctcggtatcccgagctgcctgccgtccggccctctgtccctggacaatctgattagggcgcaggaaggatttccccagacgatttgtttgggaactcagaggtcacacgtgcctaaacaactggaacaatagactccgggcttaatccctcctttgcctttaaattgtgtgactaatcactcggggcctgggtccgcgcctcagcctccctcctcctcctccttcttaccggttgggggtggggggagatcctttcctccgccctctcacctctcaagtcccagaccttagagaagaaacgggaccttccttcccggctttctgtaagactccggggagcccgtgagcgttcctgacggcggcgggcgcgggtttccgacgtccggtccgggatttggagcagagctggagaaagcaaacagacactagtgcaagaatggttttgaatccaaagagaagttcagcaaaaccttgaggcctccttagtccgtcccaactcaagggcagaaaagatggcgcatagaaaagttgggtcgcgttgcaaataaatttcctccactccttcctaggttttcgattctttttattgatgttgatattggaattgctggctcggtgttatgcaggcgctgtatcttccgcaggcggtagccacggtcggactgagcccctggcaggctaaggcctggatcccggttctcccctcatcacaactcctccctggctctctgagagctgcccccgtgggctgacggcggcgggcggttcggccttcgagcctttggctcttatgggggaagggaggaaggagggatgtctctgcttctctggcagggagctgccagctggcgcagggttgggaggtcctatctctgctgttctgcggtcccttttttcctccctgtgacctaggtaggctcagtggtcccagcctgagtcacgttgttgtccgctcttgcaggtcaagatctggttccaaaacaagcgatccaagttcaagaagctgatgaagcagggtggggcggctctggagggtagtgcgttggccaacggtcg

SEQ ID NO: 1261 - protein, 160 aa, Homo sapiens
RRPLVLTTGPTSAVPPGADSEKSTVVEGGEVRFNGKGKKIRKPRTIYSSLQLQALNRRFQQTQYLALPERAELAASLGLTQTQVPRRCRSVLPRRLSAAGLRPGLHLLLAGTQGRGVTVCMCLCPPLALSVSPSSLIPSALSLLSVSRAACRPALCPWTI

SEQ ID NO: 1262 - DNA, 3648 bp, Homo sapiens
ggaggagaagcgcgggttcctggctctccacgcgcactgctttaatcagacccgtgcagcctcgagctggagtggccagctgggcctggagcaatgcgagcgggccccagggagcgacagcggcgttggcgcagcggccgaaggagccccggccgggaagtgtggatgcgtctctcccgaggccgggccgcctcgcccgctctagtccagcggagcccgagcgcctcggaccaatccccagtgattatgcaagacagcggaccaatcagctccgccagctcatgaatatttatgaccttcgctgagtcaaagctttgaaccgagtttggggagctcagcagcatcatgcttagacttttcaaagagacaaactccattttcttatgaatggaaagtgaaaacccctgttccgcttaaattgggttccttcctgtcctgagaaacatagagacccccaaaagggaagcagaggagagaaagtcccacacccagaccccgcgagaagagatgaccatgaccaccatgccagaaagtctcaacagccccgtgtcgggcaaggcggtgtttatggagtttgggccgcccaaccagcaaatgtctccttctcccatgtcccacgggcactactccatgcactgtttacactcggcgggccattcgcagcccgacggcgcctacagctcagcctcgtccttctcccgaccgctgggctacccctacgtcaactcggtcagcagccacgcatccagcccctacatcagttcggtgcagtcctacccgggcagcgccagcctcgcccagagccgcctggaggacccaggtacactcaggtacctcgccgctgccgctccgttctgccacgcaggctttccgcggccggcctgcgcccgggtcttcatttgttgctcgctgggactcagggtcggggtgtcactgtgtgtatgtgtttgtgtccacccctggctctcagcgtgtctccttcctccctcattccctctgccctagctctgtcactgctctcggtatcccgagctgcctgccgtccggccctctgtccctggacaatctgattagggcgcaggaaggatttccccagacgatttgtttgggaactcagaggtcacacgtgcctaaacaactggaacaatagactccgggcttaatccctcctttgcctttaaattgtgtgactaatcactcggggcctgggtccgcgcctcagcctccctcctcctcctccttcttaccggttgggggtggggggagatcctttcctccgccctctcacctctcaagtcccagaccttagagaagaaacgggaccttccttcccggctttctgtaagactccggggagcccgtgagcgttcctgacggcggcgggcgcgggtttccgacgtccggtccgggatttggagcagagctggagaaagcaaacagacactagtgcaagaatggttttgaatccaaagagaagttcagcaaaaccttgaggcctccttagtccgtcccaactcaagggcagaaaagatggcgcatagaaaagttgggtcgcgttgcaaataaatttcctccactccttcctaggttttcgattctttttattgatgttgatattggaattgctggctcggtgttatgcaggcgctgtatcttccgcaggcggtagccacggtcggactgagcccctggcaggctaaggcctggatcccggttctcccctcatcacaactcctccctggctctctgagagctgcccccgtgggctgacggcggcgggcggttcggccttcgagcctttggctcttatgggggaagggaggaaggagggatgtctctgcttctctggcagggagctgccagctggcgcagggttgggaggtcctatctctgctgttctgcggtcccttttttcctccctgtgacctaggtaggctcagtggtcccagcctgagtcacgttgttgtccgctcttgcaggtcaagatctggttccaaaacaagcgatccaagttcaagaagctgatgaagcagggtggggcggctctggagggtagtgcgttggccaacggtcgggccctgtctgctggctccccacccgtgccgcccggctggaaccctaactcttcatccgggaagggctcaggaggaaacgcgggctcctatatccccagctacacatcgtggtacccttcagcgcaccaagaagctatgcagcaaccccaacttatgtgaggttgcccgcccgtctccttcttgtctccccggcccaggtccctcccgcctccaggtccatccatcccgtccggaaaagaaggacccagagggaagaaggaacagtggaggcgggacgccctccatctcctcggagccccgcgaggtccggcccagcaacttcccggcatccgcgctctagcctgaaccctggcctgggccgagcagtggcagcagagagtggcctcggagggaagccactgccacctgagacagcccaagcagcaagataaacccgctccacccgacccgccgaccttcagctttgtgggactatcaggaaaaaacaaaacaaaaacaaaatgtagaaaaagcaaaagctcttttctgtcctgtcagtctcctgtctccttttgctctgtctgtgcgctggtaaagtccaggtcctcatccgtccgctgtcctcattctgcggcctcagcaaaaagccacaaggtctgagcggcccgggtcctgccgggctgaccatctccggatcctgggacactctgcctgaccatctgtgtagctggtgtgggaatctgggggcattggagggagggggttttatttattgagaaatggacttcgcctgaggctgtttgccaattcagggttctgctgggcgcaaggaacgcactgttcaaacgcactgtttactttaagcgcacggggagaaacgaataaggaggacgtggtgatttttaatttatacagtaacttttgtacttctctggtatggagagtttggagccgaatgatttgcattttttacatgtccgacattatttaataaataatttttaaaagaaaagaacgataaatgaagccaacatgattttctcatttcgggaggaactctgttgcttcgcctggacaagaaggaaaatgctgatttcctccttgggtagaaagagggagcgagggcaaatggggagtagagagaaaacaggcgagaacaagcactctaattccagtgggctttaaaataagacaaaatcagctttacaacaatccctagaggctcgaccacagaataatgccagtcaccaccctgaacgcacaatctccagtgcaggatctaatgactgtacatattattgttattattattattgttattattgttgttctgtaaacatgttgcacaagcttagcctttttgcgttctgttgtgtgtggctgtaaaaccccatgctttgtgaaatgagaatcttgacatttttcttgtgaaatttggaaaatgtgatcaattgaaatcaactgtgttttgtgttctctatgtcaaagtttagttttatattgagaatgttaacttattgctttgtatcttgggaaaaaaactttgtaaataagttataaagtttctttgagacagtaaaattatgatttcttg

SEQ ID NO: 1263 - protein, 165 aa, Homo sapiens
MTMTTMPESLNSPVSGKAVFMEFGPPNQQMSPSPMSHGHYSMHCLHSAGHSQPDGAYSSASSFSRPLGYPYVNSVSSHASSPYISSVQSYPGSASLAQSRLEDPGTLRYLAAAAPFCHAGFPRPACARVFICCSLGLRVGVSLCVCVCVHPWLSACLLPPSFPLP

SEQ ID NO: 1264 - DNA, 2655 bp, Homo sapiens
tcagacccgtgcagcctcgagctggagtggccagctgggcctggagcaatgcgagcgggccccagggagcgacagcggcgttggcgcagcggccgagtgaaggagccccggccgggaagtgtggatgcgtctctcccgaggccgggccgcctcgcccgctctagtccagcggagcccgagcgcctcggaccaatccccagtgattatgcaagacagcggaccaatcagctccgccagctcatgaatatttatgaccttcgctgagtcaaagctttgaaccgagtttggggagctcagcagcatcatgcttagacttttcaaagagacaaactccattttcttatgaatggaaagtgaaaacccctgttccgcttaaattgggttccttcctgtcctgagaaacatagagacccccaaaagggaagcagaggagagaaagtcccacacccagaccccgcgagaagagatgaccatgaccaccatgccagaaagtctcaacagccccgtgtcgggcaaggcggtgtttatggagtttgggccgcccaaccagcaaatgtctccttctcccatgtcccacgggcactactccatgcactgtttacactcggcgggccattcgcagcccgacggcgcctacagctcagcctcgtccttctcccgaccgctgggctacccctacgtcaactcggtcagcagccacgcatccagcccctacatcagttcggtgcagtcctacccgggcagcgccagcctcgcccagagccgcctggaggacccaggggcggactcggagaagagcacggtggtggaaggcggtgaagtgcgcttcaatggcaagggaaaaaagatccgtaaacccaggacgatttattccagtttgcagttgcaggctttgaaccggaggttccagcaaactcagtacctagctctgccggagagggcggagctcgcggcctctttgggactcacacagactcaggtcaagatctggttccaaaacaagcgatccaagttcaagaagctgatgaagcagggtggggcggctctggagggtagtgcgttggccaacggtcgggccctgtctgctggctccccacccgtgccgcccggctggaaccctaactcttcatccgggaagggctcaggaggaaacgcgggctcctatatccccagctacacatcgtggtacccttcagcgcaccaagaagctatgcagcaaccccaacttatgtgaggttgcccgcccgtctccttcttgtctccccggcccaggtccctcccgcctccaggtccatccatcccgtccggaaaagaaggacccagagggaagaaggaacagtggaggcgggacgccctccatctcctcggagccccgcgaggtccggcccagcaacttcccggcatccgcgctctagcctgaaccctggcctgggccgagcagtggcagcagagagtggcctcggagggaagccactgccacctgagacagcccaagcagcaagataaacccgctccacccgacccgccgaccttcagctttgtgggactatcaggaaaaaacaaaacaaaaacaaaatgtagaaaaagcaaaagctcttttctgtcctgtcagtctcctgtctccttttgctctgtctgtgcgctggtaaagtccaggtcctcatccgtccgctgtcctcattctgcggcctcagcaaaaagccacaaggtctgagcggcccgggtcctgccgggctgaccatctccggatcctgggacactctgcctgaccatctgtgtagctggtgtgggaatctgggggcattggagggagggggttttatttattgagaaatggacttcgcctgaggctgtttgccaattcagggttctgctgggcgcaaggaacgcactgttcaaacgcactgtttactttaagcgcacggggagaaacgaataaggaggacgtggtgatttttaatttatacagtaacttttgtacttctctggtatggagagtttggagccgaatgatttgcattttttacatgtccgacattatttaataaataatttttaaaagaaaagaacgataaatgaagccaacatgattttctcatttcgggaggaactctgttgcttcgcctggacaagaaggaaaatgctgatttcctccttgggtagaaagagggagcgagggcaaatggggagtagagagaaaacaggcgagaacaagcactctaattccagtgggctttaaaataagacaaaatcagctttacaacaatccctagaggctcgaccacagaataatgccagtcaccaccctgaacgcacaatctccagtgcaggatctaatgactgtacatattattgttattattattattgttattattgttgttctgtaaacatgttgcacaagcttagcctttttgcgttctgttgtgtgtggctgtaaaaccccatgctttgtgaaatgagaatcttgacatttttcttgtgaaatttggaaaatgtgatcaattgaaatcaactgtgttttgtgttctctatgtcaaagtttagttttatattgagaatgttaacttattgctttgtatcttgggaaaaaaactttgtaaataagttataaagtttctttgagacagtaaaattatgatttcttgaaagaac

SEQ ID NO: 1265 - protein, 253 aa, Homo sapiens; identical to SEQ ID NO: 1255

SEQ ID NO: 1266 - DNA, 1761 bp, Homo sapiens
acccgtgcagcctcgagctggagtggccagctgggcctggagcaatgcgagcgggccccagggagcgacagcggcgttggcgcagcggccgagtcaagatctggttccaaaacaagcgatccaagttcaagaagctgatgaagcagggtggggcggctctggagggtagtgcgttggccaacggtcgggccctgtctgctggctccccacccgtgccgcccggctggaaccctaactcttcatccgggaagggctcaggaggaaacgcgggctcctatatccccagctacacatcgtggtacccttcagcgcaccaagaagctatgcagcaaccccaacttatgtgaggttgcccgcccgtctccttcttgtctccccggcccaggtccctcccgcctccaggtccatccatcccgtccggaaaagaaggacccagagggaagaaggaacagtggaggcgggacgccctccatctcctcggagccccgcgaggtccggcccagcaacttcccggcatccgcgctctagcctgaaccctggcctgggccgagcagtggcagcagagagtggcctcggagggaagccactgccacctgagacagcccaagcagcaagataaacccgctccacccgacccgccgaccttcagctttgtgggactatcaggaaaaaacaaaacaaaaacaaaatgtagaaaaagcaaaagctcttttctgtcctgtcagtctcctgtctccttttgctctgtctgtgcgctggtaaagtccaggtcctcatccgtccgctgtcctcattctgcggcctcagcaaaaagccacaaggtctgagcggcccgggtcctgccgggctgaccatctccggatcctgggacactctgcctgaccatctgtgtagctggtgtgggaatctgggggcattggagggagggggttttatttattgagaaatggacttcgcctgaggctgtttgccaattcagggttctgctgggcgcaaggaacgcactgttcaaacgcactgtttactttaagcgcacggggagaaacgaataaggaggacgtggtgatttttaatttatacagtaacttttgtacttctctggtatggagagtttggagccgaatgatttgcattttttacatgtccgacattatttaataaataatttttaaaagaaaagaacgataaatgaagccaacatgattttctcatttcgggaggaactctgttgcttcgcctggacaagaaggaaaatgctgatttcctccttgggtagaaagagggagcgagggcaaatggggagtagagagaaaacaggcgagaacaagcactctaattccagtgggctttaaaataagacaaaatcagctttacaacaatccctagaggctcgaccacagaataatgccagtcaccaccctgaacgcacaatctccagtgcaggatctaatgactgtacatattattgttattattattattgttattattgttgttctgtaaacatgttgcacaagcttagcctttttgcgttctgttgtgtgtggctgtaaaaccccatgctttgtgaaatgagaatcttgacatttttcttgtgaaatttggaaaatgtgatcaattgaaatcaactgtgttttgtgttctctatgtcaaagtttagttttatattgagaatgttaacttattgctttgtatcttgggaaaaaaactttgtaaataagttataaagtttctttgagacagtaaaattatgatttcttg

SEQ ID NO: 1267 - protein, 98 aa, Homo sapiens
MRAGPRERQRRWRSGRVKIWFQNKRSKFKKLMKQGGAALEGSANGRALSAGSPPVPPGWNPNSSSGKGSGGNAGSYIPSYTSWYPSAHQEAMQQPQLM

SEQ ID NO: 1268 - DNA, 95918 bp, Mus musculus
  misc_feature (1)...(95918): n = A, C, G or T/U
agcaccgactgctcttctgaaggtcccgagttcaaatcccagcaaccacatggtggctcacaaccacccataatgagatctgatgtcctcttctggtgcatctgaagacagctacagtgtacttacatataataataaataaagctttttttaaaaaagaattaatgaccaaaagcaacttggagagaaaagggtttattcagcttgtagttgtggtctatcataaatatactgggtatgttaaccacacttcaggataggccccatgcccacccagttcaacacaaactaactcaatgatgttttcatacactatttgtcttatactgctttgtttgggcatttttaaatcttattggtttttaacttgtgtatttgggtttccacttttgggtgggggtatgtttcttatttttcttgttttttaaagagaaacaaaagatgttgagtgggtgagaatgtggagagaaaactgggcaaggacctggatacagagtgacagagaaaaacacctgacaccaacctctgtcctacatacacacacagtgaaagaagaaaagcatagaatcacttctgcctcgacttgcagggacaatcagcaaggacctagggcaagggagagagagtggagggacaagaaacacaaagaatgagagcaagaaagtttcctgaaaaattttattctgggatggcaatgtaagaaagaggaggcttcaaaagagggggaagagcccgggggctctctgaaggtcaggtggcaatcttccgttcttggaaccaatggtcacagtgccctctctacccacaaatattctttctgttatgaccatgaatgttctctcagggctgtttatgtaagctagaaaatttccacaaggccatggctgaggccatggctcccagcacaacagatatacacaaaaagtactcccaaaatttgtagtgctaaattcagctatgaatgcatgtcactgacatgtgaaacttcaagtagcactatgttgcagtactgtaattcttcatgcaatgactcagacttcatagctttcaacattgtcaactcattcagtgaagatatttttctcccttcactggaatgtattcctagcccactgatgctccaagaatggtctgatctgatgacctctggggctcaaagtctgtgtcccttttcacctaccccatgagaccaagttttcattatatacttcaaaatatgtcacaactgacaccacaggagcagatgtaagaatcctcctgcctctaattaatcatggcacaataacttacaatcatgaaaatgtgccaggggctgggcagtggtggcgcacacctttagtcccagcacttgggaggcagagacaggtggatttttgagttcgaggtcagcctggtctacagagtgagttccaggacagccagggctacacagagaaaccctgtcttgaaaaacaaaaaataaaaaaaacaaaaaaaaaaaaaaaaaaaaaaaggaaagaaaagaaaatgtgccagggagaggcccatgagtagaagcaggcagaactgtgagctttgaatacatagtgaaacaaggtttttcaaaacttttatttatgttgtgtattatttggtgttcaaagacatcaaaccaaaaaaatgtagagaaccacagatttaatatcagtgagaaacatactctaatatttcactttcaactttgtagccatttcacttacactttacttagaactctatagagaggtacacaggttggctgagtctgctgttcaactcagttttgtaaattttgtaaccctatctctctaggttacattctttcgactattaatctgtttatacttcctaatctgctgcctggcagaaactgatattttttcccacctgaatctcataaataaatgttatctcctctgagatatttagtaacttagactctttttttcccctccagggagtttcaatactgaaaaaaaaaattgacctaagatcaagagagactcataaaccaaagacctttgtttgttcttcctgttagcaagagctagcattctgctgatgttggcagagactcccaagggaacctataggccttggccacagctaattttcaacagtggcataaatatgcactttccagccatagtgattccatttcttgcatttcagtcccaagaactgcatccttaagcagctacataagattggctgggtctcttggcttctggacaactcaatattattccctcaagtcttgtatttagcagagaattggcaaattttcccatctctcaagagatacctaaagtatctgctactctcaagctttctgaaattatataaaaatagcgagtttgttacattgcatgctatatctctacacttattttattgggaaaaagaatctaacttaatgggcctggtagtgtacacctttaatcccagcacttggaagaaacagacaaatatctaggtctgaggctagtctagtatagataatgagttctagaacaaccagagctatagagagagtgtgtgtcttagttggggcacctatggctgtgaagagacaccgtgaccatagcaacttgtaatggacacatttaattggggttggctcacagtttagtctattgtcatcatggcaggaaacaggatggcatgtatgtagaaatgtgctggaaaggtagttaagagttctacatctgggttaacaggcagcaagaaaagagaatgacactggtctggcttgagcatctgaaacctgaaagccgatcgcctagagatagttcttccaacaagaccacaccttctaataatgctactccctgtgagcccatggaggccattttcattcaaaccactagagacctcgtcttaaaaaaataaagcataaaatcataacctatgcagtatgctttcgtacaggagtcttatcaggtagttgctaggctgcgtgtctgccttgctgccagagtgcttggagccaccagcccaccacgtaggggagacaacacagtccataatgggggctcccagtctgtgttttcctgggtgggaagcagcagagtctggctgattgttgtgtacccaggcgctgctggttgtctatccaggaattgtagtctcagccagcagcagtgcctagaatgttctttcttgagaagccttgatgctttccaagtaaagcacctggagttgggaatggggtcctcggcccatacttccctcagagcatccacatgccaggcaggaagggaaggaagagcctgggacgggggtagaaccatgtttgatgctgagtgattgccaagtgtgcagagaggttggaagagagaaggccttatctggaatccttgaagaagagaccatccttgcttgtccaaacctttatttgatggatgtaatgcatacaccttactcagggtgaaccaaggattaaataccttttgtgggaaagaatggccaaaaaggaaagctcactggtggagcgctcgggatctacctagataccttattagcatggagaactccaggtctgtacgctacttgactgattgccatggtactcagtggggcatcatgattcagggcacgtagagttaggcagggggttggccccactcctaccattctcaactctgaggtttacggagtttgagctcactcaactctactaattcttctgacccgtggcatggtccacttggcccacagggagtttctccagggatgtagtctcaggcaggagcagtgcttagaatgttcattcttgagaagcattgatgctctacatgtaaagagctagagaatttgattgacagttgatcctacaggtcgtgtccaaggtaagaaggaccctggaatgaacagtatattagtctaagaatctaagtgggacagtagggacaaagaggcctccctaagtttctgggctaagaaatccatggctttggtattatgtaggcctcaggttaacagacagacagacttgtgggggaccattaaggacaagtaatggaattgttttctcaaacagctacacaaggttggctaggtctcttaatggttggaaaattcattattgttcctcagtatttaaatttcccagagacaaactacctaagatacattttgtcattcagggaaggaaagtatacatttttgccaagaatcagggccaagttttctatgctagaaaatagtcccatctacttttattgctaacttgagagggtggaatatggcatctatcaggtcagatggagacaagaggagacactagttgtcaaggataaaaacaaagctctgaatatccattttcttctctcacaagctaacttttatgatttgaagatgaagcatagccttttaatttcccccgcaatgtcacacaacattagctaccattcttttaagaaaccaaggatttggtttcacttggacaactctgtacttacaacgttctgaatagaagcctctatggtgaagacagatgctaagaggtaattaaaacattaacacttcagcaatgtgcaggaaacccctgggccgtcagaggatgggaaagacgacctgccacgatatggaagagactgggatatctgaggccatgctgtctttgtgccaccttagacattggcctagtgtacgtgcccccactttctccatactttttacatcacatcagccacatcccacttggcccaactggcaaagtctaagctaatccactctagtaggatgtatgttgataccatgagaatgtggaagctttttccatgagcttcaagttagttgtataagacagacacgagagctgctggagtattctgttttgcttagctaaacatacaaaaggtgttttatcagttaaataccccctcccatgtatgcgtatgtgtgtccatacaccttttagtagacttttaaatgagcaataacagactaggggattaaaatagccccatcccaaggctgaaatagcacatccatgacagctgttaagtttgaaagcattaacagctgactcttgtagcatttagtaaaagagcacttttatgatagataagagtgttccccaaacaacctattcttttttttttttaagatttatttatttatttattaattatatgtaagtacactgtagctgtcttcagacactccagaagagggcgtcagatctcgttgcagatggttgtgagccaccatatggttgctgggatttgaactttggaccttcagaagagcagtcaggtgctcttacccactgagccatctcaccagccccaaacaacctattcttgtacttaaatgatattactttgctcagtagctgtgctccctttttgtctttaaaaaaaaaaaaaaaaatcattgttaccgggtggtggcacacacctttaattccagcactcaggagttagggggagttggatctctgtgaactggaggccgacctggactacagactgagtccaggacagccacacctacacagtgaaaccccatttctaaaatccaaaactaaaagctgtgggggtgaggtggagagatactcagcagtcaagagtactagctactcattccctgcacccacacagcagctcacaacggtctggaactccagctccaggagtctgacaccctcacacagacatccatgcggacaaaacaccgatgcatataaaataaaaaagtcattgttggttaataaatgtatcttgcatatagggacaaatatacattgatattgtaaccctcatcagtaaagatgcttgtaaggcatttacacaaaaggacactaagacatttcagacagtccctatgtatcaatgcaccaaataagaaaaatgtaaaataacacatggaataaaatgaaatacaggtttccagacttagcatttcacttcaaattccttttaatatttttattttcatgtttgtgcacgcatgtgagtgcctgtgtttgtgtgtgtgtgtgtgtgtgtagggactcttaaagaccaaaaaacagtgtcagatcccttggagctgaagttaccacagtcctttttgagccacctgacaagccgcgaatctgcttttcacgatacagcagccatggctcttacccatagacccatctctctccagcctctgtatcaagttcttaaaggagactaaccctccttggagatgaggtagataatgtatgcaacaagaaaaccatgaaaataagggccctacaggaagttccctgcatttgtaaccaaagatgaattttacggcagatgggaatctgagaggggaaatggggaagcatacattttattcggctggaaacagtgagagctgctggtacataagatcagaactgaagatagtaattatccacacttagcttgtttccatttgtaggaaagctatggtaaaagggctgttatagcccagaggtaaaggagtgcctttgtgtacctctggcctgccaccaggcctaagtaaggacactgcactggatctgctctccacgtagatctcctttgtttgttttttctcactttaggcatctttagagttagctaaaaccgaaagttcaaaacaaagaaaaaaaatcacattccttgcttatataaaagaattctgaaaatattttccttagaatcacatgttcctctagtacttctaggcatcaaacctaggacagagagctaactgaggtgcctatgtaacatattacagtggacctggccaccatgctctttcagtatccctcagtccctacctgccacaggctttggctggattatataggggagggcagccctgcccctagactggagacatttagcttaggagagctgggtttgagatctaacagtaccaggtgtagataataacttgatatagatactattttgatatagataataacttgatatagataatatcttgatatagataataacttgatagcagaaaatctaatgccaaagctactgtcacttgagatgaaaataaatcaatctggagacaagaatttccatttttacccaggtgatggtggtggtcttggtggtggtatacacacacctataacccagcagaggcagagacagagacagacagatctctgttagttcaaggctcaccaggtctacagagcaagttccaggacagttaggactacatagtaaaaaacagaaacaaacaaaaagtgttttaatatacatggtgaaaaagcaatgtaaaaactcaattctaatggacaaagttcttttgaagtgctttaacatttttaggtttttttccccttgggttagatattgtcggctggaggaaagcagcatcttagagacagtcatctggacctagcaacttatgatctggcaggcctatattcttgtctgttagccttccaaccagtaatgagcagctgacaccttgctgatataattagtgttcaagtctattgacattactgcactgttactaagtttacaagatggtactttctttctaacttcagaaccgacagtgttaataatctggtttctttcaggtttctcaagtaattaagctagttttaaaggaagattgagttggctcacgtacatgtatacaggccagcaacctattagaaggtccagtgacattacaatttcactttcatgctaggcatcattattagacggcaggctcattaactctcagatactattccagacaaacttacaattttagattcacttggcgtggagaaattgggtgtattttatgtaaagacacgaattgtattcataaatctaaattagaaatacgcatttaacaaatggaaaagcatgatactaaaaaaaaaggcttgctttttaaaaatcagtgcaagatttcacaggcgccttaatcacattttgcaacttgtacatatttattggacaaccaacatccctaaaataagcaccaaaatcttcagtaggaataagtatgtttaggagtagtgcacctgaaccagttatggaattgtaaaggtctgtaaaggtctgtctctttcattgtcattacactaatcagtcgtccttcttcttgcccccaattttaaggacattactttgtgtgtatgagtgtttgactgcataaacgaatgtgcaccacatgcccacggaggctggaagaggttgtccgatccccacccccaccccgcttttatgagcagctgagcaggtatgtggtgataggaaactaaacttgggtgctctgcaacatcagcaagcactcctaaccatctgtccagttccttcccccgccccgccccctagtttttttgaaacctacttcctacattaacaggcatttctttggcactacaatttatagagcaaaggaaaatattgtgggaagaatgcctcttctctgctgggttctcattggcgtcctttagtcctccttaaaacattaaccaaaccggacgtggtggcgcatgcctttaatcccagcacttgggaggcagaggcaggcggatttctgagttcgaggccagcctggtctacagagtgagttccaggtcagccagggctacacagagaaaccctgcctcgaaaatttaaaaaaataaaaaaattaataccgatctcttaagctttaaatgaatgaagtgattctatnnnnnnnnnnnnnnnnnnnnnnnnnnnnnnnnnnnnnnnnnnnnnnnnnnnnnnnnnnnnnnnnnnnnnnnnnnnnnnnnnnnnnnnnnnnnnnnnnnnnnnnnnnnnnnnnnnnnnnnnnnnnnnnnnnnnnnnnnnnnnnnnnnnnnnnnnnnnnnnnnnnnnnnnnnnnnnnnnnnnnnnnnnnnnnnnnnnnnnnnnnnnnnnnnnnnnnnnnnnnnnnnnnnnnnnnnnnnnnnnnnnnnnnnnnnnnnnnnnnnnnnnnnnnnnnnnnnnnnnnnnnnnnnnnntagaaatccgtctgcctctgccttccgagtgctgggattaaaggcgtgagccaccacgcccggctcgcatccagtactgttaaccgctgagacatctcttcggtccctgaaatttgtatttttatatctaactaagtaaaggaaatttgataaaagaaacactcataattacaagaatttttctctaggaaaaagatcgttgctttgttttaaaatatggtgacatgggggtggaagacggtgtatttccttttgatcactgcctttgaacatactcgtatgtaatataccatatacttgacatagggtggtggggaagatcggctccagttctggcttagtaaaatccgaacaaagaactctctaagaaaaggtttctattttctacgcagggctgacttattttgcttcagtgtgcacatgggggcggaggtgatgactggcaaaccccgactctccaaaaccttaagcgtagctctctctccagctctggcttctcggtacacggagagtggtccagaagcgcttctcccttcatagtctcatatccctagcgaagtcagaaaccaatacgacagagacatccggcgccagggctgggctcctttaggctccccgacctcacctttcttctctcacaccgcccacgccctcctgctcgctcctccgccacctgcgcgcgcgccccagatccggtgcagcttctcgtgcccgcctcccgacggctgccaatcacagctttctgcagttccctggttaccgaaacaacggtccttgggcaccttggccacgcccctttggacctgcttcccgcctttcgtgcttttcgcccaatcactcgcgtccgagtgttctttggttcccgcctccccgcccccgccctcctgaagacccgccctttttccgaggcacgacggagtcacctgacccgcgggcgctccctcggtggaaagcaggaaggggcgtgtgcgtgaaggggaggggcgcaagaagaaagcggcagggatgccgggagtggggcggggagaaggtttgtcagtcggatctcgcgagagaggacggaagcctgtgggagcccgtggcctttaaagtgcgattcagccctctcctccggggctagtttgtaaacacggccggcctccgggctcgcgggtggctggcaggaccatgaattagtgacctggaaaggtgagtaatggtggaagggccacgggcttggaggttgtagggatgcagaggaagaaggtgctaacatggcgacgtcgctgcctgtagtctccaccccccgcctcccaccccttttgcgcccctgctgtggaccccaaccctacggacggcggtggccgcgttgccgcctctggtctggcggagcgaccggaccgttaggtaacgcgctgcggctccggccggcccctccctcgcgcgctttcccaagcctgagcgagaaggaataacggctcttctccgacccctccctccgacttctcctctggtgtggtcacttgagaggtccccgaggcgcccttcggatccgcccatctgtcggggagacccccgccgctagtccttgatcgcgctgcccagagggcccacgctgggctccccaccggggactcgggcgatcgagggtttgggatggtgcgttgaaggattgggaagcaagggtctctggcctcggtggaacgtgatggagccaatggtaatggagaacctgctggtggtctcggccttttctgtcctttctgccgccctcacactcccgccgccgccacccccccctttccaggtggggcggggctgaggtgtgggtgcaggttgattctgctattcccccccacaccccatttacttcgaccggtgttctgcagagcttttgtaggaaaataatctgtgccttttattaccccagggacaaggaagagaggtagggagagatgtgtgtatgtctccccgggatgctcactcattgaaccagaccttggaggagatgggaactatttttatgcacataggtattataaaattgtctcttctttaatggagactcttaaactgggaaggtcgagtaaaactaccaccagtataattgagtaaaagggatactcatgatagactctaggcccatcgactaatacctagtttaccttgtggaagtcacagtttcttggggattataaactagggacacgttcacaccagatgcaggtaatgctgtttttaacatctgaccaaacacggactgttctgagctcagtttgtcctgtttgaagaaattcttaacccttggccattgtcaagtaataaccgttccaggaatactactcatttagcgccaaatggcctgggtctctagcacccaaatggtaagactttataaaggcttattttaaaacagttaactctagatgaaataagagtcttgtatttaaatttgctaaacctatttgaagaatccctgcaataaacttttttcaaaagtatagaaatattttgtagagtatgctaaaaacatatcctatataagccaagaaaactaagtacatggatctttaaggccatcgatagttgagtgataattaaggttctaggtcttaaaatcattaataaataattggagagatgtttagagatgttttcatgggtattttaaaattttaaagctatattgttttgaaatgatactatccattaaatatttcatgactaacattaagtcaagaaatctaggtttgtttttgtttttttttatttttaagaaaacttgaaaacttgagttttaattattatctgtactctcctaatcaattatattgctagatctagtaaataactttaccttacatgctgtttccactcatttttgactttagtctcttccaaaatgatatgtgtttctgtgaactggtatcactttcttttgttactcttattgaaatgcccttagaaaagtaagtcttatatttaaagcaaaatttgtattggaagctgggcgtggtggcgcacgcctttaatcccaggcagaggcaggcggatttctgagttcaaggctagcctggtctacagagtgagttctaggacagccagggctacccagagaaaccctgtctcgaaaacaaaacaaaacaaaaaaatttgtattggaaccctccttgattagaagtcaatgaaagtaattagataattcaatgaaagtgattggatgattcaactgacctgtatgaaattaatacatatagtactccctgtattaacttgtagcctacaaaaccacctgtcatatagtcaatggttttaacattttgtgactatcttatattcacatctatttctatagactgaaatcttgtctgaaatggaacatgttctatgtttgtttttaagatttatttatttttgtgttttgcttgcatatatgtatgtgtaccatttatgggcagtgcccttagagaccatcttaaatcctgaatctctaaaactagagttacatattattatgagccaccatgtgggtgctgggaacttatcccagctgctctgcaagaacaacaggtactcttaactgctgagccatctctccagccctttgtttgcttttctaccgtgctaggaaagctctttttattttgttgtttccagacatggcttatctctgtagttggctatcctggaacttgtttgtagaccaggctggcctccacctcacagagatcctgcctacctctacctcctgaccactgggactaaaaggtgtgctcttttttattgagatatacatttctcaaaatctatttatgtaatttttttattttacagttatatgtgtctaactgcttgtctgccttcttgcctgtgtggatgatagcatatttatggagattaaaggacaacattgaagagtaaatgttctctttccaccacatgggttctgaggatagaaccctggtcataaggctcaacagcaagagctttacccactggaccatctcattagccctatatgtaactctaatgttgaagatatagtgatccctattactatttttgtctgtggggggaaatggcagaaaaacactttctttgttatgtttcttaaagttaaagagttaaagtaaggtatcatttcatagaaaatagaagaatgcatgagtctttaaggccattggtaattgtaatacgtgtttcatattacatgaaatatacaattataaacttgtatgtgatatatataccttctcattttttattgacaaacctcaaacatatttttattttaagatagtctatgatgcttactttgttcttttttataatcataaagggatttaaatgtatgttttatttgctattgtatatgtgtataatgtgcttgtattggcatgtacatgctacaacttgggtttagtggacagaacaactttatggaggtagctttttctttctaccttacatgcattatgggtattgaactcaggttgtcaggtttgcatggcaaatgttttgctggatgagccatatcactacctctaaaataattatttcttctcttcatcctgctcctttggggtcaggggacaacatggggtatgactgtatcttgagagtgtaggtatatttacttgggtccatattttaactgctaattgtcagcctttccccacattaatatccaagaaatcaaaaacaaaaacaaaaacacttgaaatatagtagtgagtgacttgtgatcctttagaaggttcttagaaaaacagtaattatgcttggcaaatagtaaatggacttgagttaattttcgtagtatatgtttacattcatctgtaccattagcttttctttctaaccttttgttttgttactctgttgtttttgttcatttgagacaggtttctctgtgtagccctggttgtttgggaactcactctgtagactagatggcctcagactcagagatctgcctgcctctgcctccttagttctgggatttaaggcatgcgccacttttgattttttcagtatgttctctaacatgttttcattttgtctaatggaactttgcataccagttttctatctttactcatttagttttaccttttctagctttatagttttctattatattcgttttgtgatgtttgattgattatgtagttaaccgagccacttaagccacttaataaatttctcagtattaaatgcctaaatggaagaaaattgatttaaatttttgttatttatttgaaataggatgtcactctgtaatccaggctgctggaactcatggcctcagacctatggcaatcttgcagcagcctccaagtcctgagattacagccattagccaccctgtctagctaatttttaataattttaattttgaagacagaatctcatgtagcttgctctgcttttttttcccctttctgattttaacgttgaattaatgaacggttttgggtttttttgagacaatgtttcactgtgtgtgtattcctgtatttttcttttgtataaactttgtagtatttgctaccgtttttttcctttgagttgattctataatataataagctcagtggaaatacttatcagagaatataagtatttgtggagttgccaggacttttgctttctcccagaaggaggcttacttacactggtgttttagtgtgagtgtgctacctttgccatcattttgttaacttgtggttatgattttcaatatgatatgattacttgactgcgagttattactggaaaaaagttatattgttcagtagtttcaaaatcataatatagttgaccatataattttatagttatgaacaatgacctatgtatttggacaaatacctattttattatattttctgtcatttatcagtttgttttgtttacaaaagcctaataatatcactacttaaattttgtatactttgctcattgaatttattagttttaatttatggaccactttctgaattacagatttcaaggaattactactaaattttctttcatatattctggcacaatgaatgttgttttagggtagttgttagtacccaaattgtgagctgtgttatgcttagtcaaattggttttttgtgcctcagtttccccctgcctgccaacagggtttttctgagttgcctaagttgtcttggaactcactctgtagaccaggctggcctcagacttggagaaccacctgcctctgcttcctgagggctggaatcaaaagtgtcatctaccactggtgtctcagttttctttaaggagaataacacttaaccttttgctcatttgattaatgtatatcagtgctcacagctacatcagggagttgttgatgtgtttataaaaagataaagagatataagatatgttctatgagagtgtagtgaggtatgggggaaggggatatctcagccggcccatgccaaggcatcccttcccctggagggaccagccacatgacagtatagtatagattagagtttattcagggcatggggaggggaattaagagggtagtagaggcagagaaaggcaaaaaggagagaatagagaagtagaggccagccatgaccatgtggagagaggtgggaagggtatggggagagggagaggagcaaaagggagcaagggtaagagggagcaggagataagcagccccttttatagtgggtcaggcctacctggctgctgccaggtaactgtggggaggagcatacctgactattgacaagtaactgtggagtggggtgtagacagaatgctaacagttgttgtttattcaatgcaatgttatggtgtttactatgaaagttcattcagaaattctcgtctcctatggtcccttcaggcatacttatgatgtgacttgaagacagtacaactgtcatttatttcgtagttttgataacaaaattccctaggaatttataatttgtggtagaacttactatgttaggatttctataaatccatttcagagaatattatattgttccctatgcaccctttctctatgtcagacttcctttttcatgttgtagtgtagcatataaaaatttcgagatgataaaaattgatgccattgtttttaataatctcattaacattctagtgagacttttcatatcttttgatgaaattaaaataagacagttctaatatttgcttttttgaagtctttatcaagaatttagttaacatggttataccatcaagtctcagtcacaatgttaaaagttgcttgtgcttgtttatcatttgtcaggtatggattataaaagatttatttatttatattatgtatatgagtgctctgtctacatgtatgtatacttgtatgccagaagagggcatcagatcccaggagagatggttgtgagccaccatgtggttgctgggaattgaactcagaacgtctggaagaacagacagtgttctttttttttttttttttttttttttttggtttttcgagacagtgttcttaactgctgaaccatctctccagcttcctatgttttaatggtgaaatatggatattgtttggattgggctttcactttcctgaacttgaatatactttgaggagagaaagatgtgtttgtggtgtacctacatatctttgagggtatgtgcatgtgtgtatggttgtacattcacatgtgtttgcctagattagtttctaccttaatttttttagtttttatttattattattattattattattgtgagtatattttttgtgcatgatgtgtgtccgtgggcatgcttaccttaacacgtgtgtggatatcagaaaataattctgtggaatcagttctctctgtctacctttgcatgggttacaaggttcaaactcaggttgtcaagcttgtacaacaagcacctttacccacttagtctatccttcatattagtttttgaaatggagtctcttactaaacctggagcttattcattcagtgaggctagctggcaaatgagctctagagatccaccttattcctctccctgaggtactgtggttacaaacttacatttctgttcttggcctggcttttatgtgggtacctgggatcaaactcaggtcatcatttctgtatatcaggtagccatgctgacagccatttctctagctcttgaataattccaattttcttttcttttttaaagtgtttgtatgtgtgtgatgtgtgtatgtataaaccagacattgtagtacaggtatgtaatctcagtagtgggaaagtagaaataggaagagctgaagtttgttattctcagtgacatagcaagttctaggccaccctaggtcatcaagattttacctcccaaaacaaaaggcaaccttggctggcttagaactggcttagattctcttttcttttacctcccaagtgtggaggttaaaggggtatgccaccatactgacccagaaaaaaattgtattaaaaaatctaaaatattagttaggggaagagaataagtatattatactcacatgtttatattataaacccagtattatataattattccagtaccaaatctaaaaccaagttattagtaaaccttaatctactgcttttcatatttgtcactgttagtctgtgagttttgtgaaacctgaacttgcctacttagcccaggatcagtggtctggtaataatttaaaataaagtttaactttaaactttaacctaatttgttgttgttttgagatagggtctctctatgtagatctggttagcctagaacttactatgtaagtcaggctgactttcccctcctagagatctgcctttctgtaccttctgactgctgaaattaaagacattgtatccagcattacttaaaaaaaaaagtattgtgatactcgcctgatttcactatttacatactaatttcttgagttgcttctcatcaacgcttcagtataggttgatgacaatatgcctggaaaccatctgttatatgttgtaagttgagaaaaaattaaaactactgcttccctcattgagattgggaatacatttctcacttttgaggagtttaatttctttctattgatgaactaagcattccatatccattatactcaaggataatatcaaatccataaactaaagatcagtttaactcttatagtagattttggcattttatgtgtactgctcaagtttttagccataaaagtaatgtatgatttagtattaagcattaggaaaatgtttatttaaagtcaaagtaaaatgcagtgtaacttacaaacttacataaatttaatactgcttgagttcatgctctagtctgtattttatacattattattactattattaatatttttgggagggtggggttttgtttttatttttatttttaaggcaggttttttctgtgaagctcgggctatcctggaacttgttctgtagagcaggatgacctcaaatttagaaatccgcctgcctctgcctcctgagtgctgggattaaaggagtgtgtcaccatcactcagccacattactttaattcttcttgatattcattgttcattgacatatcattgtaaaataatagtatttaaattttcctaataaggtaacttaaagatacttttaacattgaatgggtaataaattgtttttaggttatagctataggtttttagactcatagatttagatttgttaggaacattttgttgtttccagggtagttctaagatcatcttgtactttgtggtacctgtgaagtcacaaagaaattgtgacaaagaaaactctgcctatttgtgtagttctgcttcccttgaatgacattgtaagagagcctaagtccatctttctggtaacttaacgtttttgttcactataaagattttctataaccaatttatatggtatatggtagatatacttataaatatatggtaagtatatggtaaatatacttgacatcttaagatagtacaaaggtttttttgtaggtcaggaagtttagattgcctcatctgggtcctctgagaaccctccactttaactaaatcataaaaataaaaacatatttaataataaagttctgtatgatatttcattgtgtatacagattatgtagtattttaaagtaatctctagttcaatcatgttgtcacagatgaccagattttattgtatgtttggaatcctaaagccaaaatcaatgtgttgacaatgttacatgcaatttgaagactcgggaaagaatccatttgcaagatcactcaccttgttggctttgccctcccccttctgttgcttcccacctgcccagggctgctcttcatatggggaagctgaagtgctttcctcgtggccatctctggcaatggcagatccaggtcttctctttctaatcctgctgacttctctttctggatgaatgtcttacgctgaatgtctcagtgtactctagattagctcacgtggatggatgcctgaggacattctacttgggaatctgtaatctctatatacatgcacggttcccttttcttttaatagaacctatttacaggttctaggaattggaacatggacatttttagggaccatttcatctactacaaattgactccttaaactttattgaagactttaatttctggttttattagtttgtttgttcacaatacatcttgatctgaaggcagcagaagtgaactgagctactggacctacattgaacttctaatacctcaaagcccaccacctagtaacacttcctgcaacaaggccacaccttccaatagtgccactccctatgaattaaacattcaaacacaggagtctgtgggaaccagttctatataaaccaccatacctaatttatcaattctaaaatttcttttcttcattctcatggaactctctctcaggaccatgagttttcagatagtattccaaaagtggaagaagtagtcattaactaaaaactattgtttctgttatcaactacagagctacctgaattccaaacattattgaatacaacaagacgatatatgtgtgtatgtgttttatatgtatgtaaaaggcaatacaaagccttttaaggttgtgactttgtaaagttgccccaaacctgcttacatagtatcttcatacctaagtaccactcaggacttcttttggatatataagacttgagtttgtgactaagaaaagattgtttctctttaacaatgataccaatcccttaggctatgttttctggtaatgtttgactctacatagagtgattactgttggcagtcctggtagctttgtgtggagatactgcctcttcccataggttacttaagttcaagtgtataaatatacaagaagtgggtaatattggtgaaggagagattccctacatctgtgctttccaagctttataagaggtattatttttaatgcttatcaatgtcaagatgattatggataagtcaagctctgaaggacaagtatggctatttaacttaattacccttgttgctttaagtgatacttgccttgctatgtttcaagatgctagttctagattttttttttgaccaactgctgaaataagaatataaacatcttgtgcagataggcagatctaaaaccatgcttgtaaaaatgaacatttctttgaaaaacaaaatagtttgcaaggatctgtctctgcctgaaatacatgagcatgttttcaataccatcacacagagccaatttataaggccaatctgcaggtgatagaagaagaagggacaattatgagtaccagaatggcaatgtaagcgcaaagaaaaatgaattgtacttttgaagagtaggctcatatagaccatctacaaaactgtccattggattattattccttttatagccatagtttgcatttgtgtcactaaatataccctttgagtcctttctccataaagaatagtttttcatttaaaactttttcttccaactttgaattaagatactttctagtttctggtcttttactcttaagttattaaacattaagaaaccttcactgggggctggtgagatgcctcagtgggtaagagcacccgactgctctgccaaaggtcggaagttcaaatcccagcaaccacaaggtggctcacaaccacccgtaatgagatctgatgccctcttctggtgcgtctgaagacagctaccgtgtacttacatataataaataaataaataaataaataaataaataaataaaatctaaaaaaaaatatgaagccttgactgatcctaaaggaaagtgttattcttctttccagtagtctgtaataatgggagttaactcacaaggtacaggaacatttatttccttttgaacatcattctttggaaatcgctaacttttcctaacatacttgctatctatctgaaccttctgtcaagttcttccctgtccaccttatctagtacttatttaacagattggtgtgatcatttataagtttgtggattgcctgtaagagtttactttcatctgggcagcctccctgccatttttggccaatagtgactaagttctgttccatagaatgtgagtagaattttcctttggagttctgaaaagtccctaaagagaagccattattcatttatctttcccttgctgcctgattcacagctgtgccggctagaactttagcatttgttacactcctttaaaaggaagggaattaagataacagcagagcagcagaggatcccgggtcccttatgattgtattcacatgaaatgactagatctctgaacaatacaagattgagttttcttagtgaatcctattctaagatgcatgtgagaaataacaagctatttccatgtaagagacacatttaaactagggcccataaattttattgtgtagcaacaacataaaatttattaattttcactccaacgtttgatgctttgattcaactctgacatttcacctattacctgtccttcaggtatatgctgttaaaaatcttgttttcttactttcaccatagttctattgcctttcctccatccttaaaattgttttatacctacaggtggtaatacgttggcaatttgggggctatatggtgaacatctttttgaaacatttgatattttggaagaaattttaattttctataataggaataggcaagatttaattataaaatgtatattaaacaggataagtttattctcttctgcttttctccttttctctagagatactagatggcaacttgggaagtattgcttgcttagcaagagcttagggataattcctgttaacagtaaaactcatggcccaccagctacaaaggtaagggaatttgagcttctcccccctcctacctgtgtgtgtgtgtgtgtgtgtgtgtgtgtgtgtgtgtgtgtgtgtgtgtgtaaatgcatattcatatgggtacacatacatgttgaggcctgagggcctgaggtcaatgtcaagtgtttgtctgcctgtttctctctctctctctttctctctctctctctctttctttgtatatggggggtggggggaggtattctctatgtatcctgtgtagccctgtctgttctggaactcagtatccagctcagagcactgggattaaaggcatgcaccaccactgcctttttgaggcaagatctttcgctatacctggtactcacggagactgactgactagcaagtcccaagctctctcctgcctgtctctacttcttcagtattagtcttttttttttctttttcataagttctgaggatctcttcaggtttgtgcagaaagcacttcaccaactgttccatctctcaaagtaaagctttgaatataaaattgttcttttcatatcataataattggtctctaatgaaaataatagcagtttctatgcagcagttcacaaactccaacaatctatattgatagtgttcagtggggatggggtcagatctggagggttagtaaatttagaaatggccttttggagataggatgcgagaacaaactgagggcttaaattctttaatttttcttaatccaaaagttcttaaacttacttagctttcagcaaagagtccaaaaataaaagtcctaatccacctaaaaaatttaattgtagtaacaagttaatctaggaagtgtttcgtgggttgcagaatcactttgacaaaaagttgatttttctatggccgtgtaaacctatttgctttgaattattaaagcttatatttatgattgttgccagccaatccagaaacatcaagttgaagttgcatagtttgtcactcatacctttttgaacatgtacatgccaactagaaaggtattagagaaatgaagtatggcaattttgtgtgcaatcaatttactgtttatgtagttcctaaaaatggaagaaaaataacaatgtaatgaaggcaatctgctttgcagaatctctctagacacggtgaattaatgatagacattgtctgatatatgaagattcataaattgatctatatgttttcttcttgaatcttgaggttcaaatcaaagagagaatctgcctgcttctgcctcccaagtgctgggattaaagctgtgtgccaccacttcctggcccaggcagttgtaatctgctatgtgggtgctgggaatgaacccaggtccgtttatttgtttgtttgtttaatgtatgtgaggacactgtagctgtacagatggttgtgagccttcatgtggttgttcggaattaaatttttaggaccttgctacagtcaactccacttgctcagtccctgcttgctcaggcccaaagatttatttattactatacatactgtagctgacttaagacgcaccagaagagggaatcagttctcattatgggtggttgtgagtcaccatgtggttgctgggatttgaactcatgaccttcaaaagagcagtcagtgcttttaaccaccgagccatctcaccagcccagacccaggtcctcttaagccatctctccatcacctctttttgtgattttaaagacccccaggatttgattattctgacttatgttatttcacttaatctgaaatcccatatatcagccatcagaagatcttagatctcagtgtattattgttgttatcattgctgtgtgtgatatatgatgtatacatgggcacacatgtttataagatgaatgtgcatatgccaccacctcatgtgaatatcagaggacaatttcagttgttggtccttgccttttattttgtttgaaataaagcttcacgctcccctccaacacccctcaacccccaaaacacacacacacaaactgggaatgcaaggctagttggcccatgagcttctaaaggttcattctttctgcctcctgtctcactctataggatcattagggttacagatggatactactatcttgcctggctttacatgtattctgtggattcaaactcaaatcttcttacacagccagcgctttgcccactcagacatctgttttattttggctcagtatgttacctcttctgtgtgaaataccataaccaactagcttgtattttcctttgaaaaggctcagtcatgcatcacttcctttggtagtcttcctagaccatctccagaactggctaggtactttggggatagaaacaacgtcagataaactgtttaaaaataaatttagaaagacaactaaatttgggtcacatggtccaaaatccatataataagtaaagtctatggctacgagtgtaactcagttgtagagcacttgcttagcatgtacacatccctgggtttggtcctgattaactcacaggcacgtgcacatacacaccataatcatctatattgaagagaattttgggctcacatcttaaataaatatatcatacctatattattcaataaaatatgctgttgagaatgatatctaagataggcattgtggctcctgcctataattctaggatgtggaaggcatagtgagagaattgttcaaagtttcgaggccgtggtctacagagcaagtttcaggctagccagaagtagatagtgagatactatctcaaaaataaagaaaagaaagtgccatttaatgtttagtaccattactattgagtactatggtaaaatttacataattatattttatagctataaaactatatgattttaaaagttatatattttcatatattgacaagattgaaatatatgctgctgtggactcatgatagcagttgtctctgaatgttgaaatgttgatattctaggtgattcttgtgtgccccttccacacatatttgctctagtaggaataaatttaaattctctaagttcaacaggggcaatttagtatgtattttcagaaggaacatgtgattttcagaaaacacaattaagatgttaactttaagtgtttgttttgttctttttgaatgatgtatataggataatttcaagaagttttttattctcaaagaagtttgttatttaggttttcatggtctggtaaggagctttaattttagcttacatttgtgggtatttagctttaatcatcatcttattttatgttcatgaatgaatatatttcagcagtttagtgatagcattggttaatataccttagatttcgatctattatatactgaaccattgaacaagtaagagtaagatgatgagaccttgccgggcagtggtggcacacgcttttaatcccagcacttgggaggcagaggcaggtggatttctgtgttcaaggccagcctggtctacagagtgagttccaggacagccagggctatacagagaaaccctgtcttgaaaaagcaaaaaaaaaaatatgagaccttactcaacctataccacaggttttggctggttttgtttggatgttgttttgaaacaagtcttacactgttgtccaagtttacctagaactcacggtgtagcccaagccaactttaaactcaggatgttcttcctccataaactacaatagctaactttataccaatttctacatcagtcggatgggaataaagtgatgcttcatgtttttacatatagaataacttagaaatatatcagtggaaaaatattaatgagttcttaatatggagttattatccagtgtttataaaaatcttttcacttgaaattatattgctttatatattctagtagctataaatttgtatattctttaagttattgctggtctggagaactagagtctctgtaacaaaagtgaggaattggaagcctgaagtaataccacattatcattgaaaccatctctactatacatcttgcttttgttttaaagaaaaaaatcagtgacttccatttgagtgcttatggtaaacaaatcattggacttattttttactttactcttgaaagtatattgtagctatccccttttatcaagccacactatgattaagttaaagcttagactcagaaaatagtctgttcatacttagatgtatgatctgtaggactactgtctttctcacataacaacacttagttaatattaaaaaactttaaatgtagttctttgctacttggtgtggttaatcactgacctacacaagtaccaggtatttgtgtcttcaccagtactgaaacatcagaatgcagctatttacaatttccttaggaatgagaatactatattttggattcttcatattttgaacttcaagccatgcacttcacaagccacttataagctcccttggcagcttctggttataaagatatttttaaccttgctatgacaacatgatgaacccagatttagaggtttgagattcacttagattaccaacttagaatctcttagcagaaatgttagcatttctgtctgtagatgcttgaactgtagtatttatagcaatctctactaggttttacataattgtaataaaagaaaatgggtattcatgtcagttggctaggaaagtagctgtgtaggtaaggaactgatttggaggaaaaccgtggtaccggaggtaccaagggtcagttccttaagaagcagctttagaactatcaatttgtctgtatatagttaatatttacatgttttttgtattttattgagtgaagcattgccttaggtagctaacccacagataactgccttgccctggcctgagcttacattcttttggtaatgacagaaacgtgatgagatgttctttggattattctagtgttcttcctctcttcccttatcagttttacctcgggtaaaggaagacagtttcttcttcccatctcctaaacgaggatagcctttgctccaggactcaacattaggtagccaactgtacatttctgcatggaattatctcttttgagcaagacattgaacacacataaattatgaaaaatacaggttttcctttacataatttatttgatgtgagaatactgtttactgtctttaacagaagacagagagggagacaaagagggagagttgagataggggagatggctcagtcagtaaagtacctctagtaaaagcaggatcacccttctaaccctagtactggggatgggatgagcacagagaagggttgatccctaaagttcatggttagccagcctagcccagtgaatgagttctgagctcagttccaagttcagtgacagaactatttttaaaaaagatatgacatgcaaagtgtacatacatctacattcatgtatatctgcatgcacatgtttcatacatgtaaagagttggtagatttttaaactttaaaaattctcttatatattgtaccttttttttttgtttgttttgttttgttttgttttgtttttttgagacagggtttctctgtatagccctggctgtcctggaactcactctgtagaccaggctggcctctgcctcccaagtgctgggattaaaggcgtgcaccaccaccacccggcctacatttttgtttaaagatttatttatttattatatgtaagtatactgtagttgtcttcaggcaccccagaagaagacatcagatctcattacagagatctcatttgtagaccagctgttctagaactcagatatccacctacctctacttccccaagtgctggtattagaggtgtgtgccaccttctctggctcaagagttggtagattttattaaatggcccattaacattactagtttcaatatgatttgtttatatttaaactaacattaaataagtggtaacattagagaacagaaaaatttatagagaatttatatttatttcaagaataaataaattttgatgaattctgctgagaacctgattacaggtcaattttctttatttttttttttaattaaaagatttctaagtagaacttttgaagtacagagaaaaagaatgagaatttctttttttgttttgttttgtaacaaggtatttctgtgtaatccagggatggttacaatcctcctgcctcagcctccctaagtggtgattttagatacataccactaagcctggtttttcttttcagacttcaaaggtaggaaaaaaattgctgttttaatgactgctgactaactgtgccctaggggctaaattaaatacttcttccttcttaactctttgatggaactggatggattactacatctaattaattcatctatgtgagtttttatatttcaaaagtaccttatcattataaagattcttgtttttttattaagacatgttgatttcatttggttgagtgctttcatttgcaaaaagcagtgcatttcaagaagtgtttcaaggctgtttctaacagtataaaaccgtttttgtttttcagtgtctttgccatgaaacagaggacatgataaactgtttaccttaatgaaattcaagttgcatgtgaattctgccaggtaagtacatgatataataatattttgcaccatgtttcatattataggttatgaaacttatttttcataaattgtatttactagattactatttggattcttcttaaatctgaagcctcttactagttttcagtcgatacttgtttctaaattatcaagttaagagcattaaaataactggtgtaatagcacaggtctgtaatcccattacatagataggatcaaggtctgtgctagataccaataccctgtctcaaaaaaataaaaaataaaaaagagccagtcatctaaatacatgttttatggttttaatgttttctaaaacgagttcttgataaaagaagtgaggaagtgttcaaatggcaactcttaaaaaatgccatatacttggtctggagagagggctcagcagttaagagcactgactgttcttttagaggtcctgagtttaattcccagaaaccaaatggtggctcacaaccatctgtaatgggggtacaatgccctcttctgatgtgtctgaagacagctacagtctgaagaagagctacaatgtactcataaacataaaacaaatcttttttttaaaaatgctatatactcaagtcctcttgactcagcttcccaggtactaggatcaggaggtcataccagtgctctgctttaaaacatgttacaagttgttaaaaggattcacttggatctttaagtggaaattctgaagcaggaaggtaatctccatccagatatgttacttcatagttgtatttgaatttggatcaaaattgtttgttagtaagtcatttaagcttaaaaggtccctctctcaatatatacaggcaggcctttctgccttagaagtgctaattcctgaaattggaggaaaaaaaactttttccaattacaaagttataaatatcagtttgtctatccaaaccattggctcaagtattgcagaagggcctgcgagaggtgagagaggtgggagaggaggatgagtgctccttggagcatgcatgcgtgcatgtctgtgtgtatgtagggctttgttttccccacctttactgcttgtggcaggttcagttatcaacagcacaattttcactaggtcaattcaagggttgaatgacttcacaagccctggtctcaggaaattaactttcatattgaagacacaatttttaggttaactgatgtccaaaatactgtcttgaatcataagatccatcactttttaatattgttcagacctgcatctagaattatatcgtaaaatctttttaagcatatattagatgtttaaatgtaaacttcataccatactatcaatttttgtctaaataagaatacaattttaaaaaagtccctccctctgctattcctctttacctatgaatttacttgttgaaaagagtgggtagtgtcttaatagatgtttccaggtattgacttgggctgactgcttgctgttgatgggttagatatgtttcatatgttttgtgtattcttgttcttgggatagagacattttacaagattcagctctgatacctctcttcatcctctgcaagaatgttttatttcaactttgttgttcatccaatgtgtttttgtcagtttgatctaaacactgtaaatgtcccatcatctttctcccaatcttgtactgttttgagacagggtctcactatctagttctagctcgtgttctttgaattctctccatctacttagtgatttttaaataaatggttctttgatggtatgtaaccttctcagatttaaaagttttttaagaaacttgtggtgctagagagatgattcagcagttgagtatttgctgttcttctagaggattcaggttttgtttccagcatctagatggccacccataactgtaactccaggggggttggtgctctcttctggtctctgcaggcatcatacacaaacagtacgcatacgtgcagggtttttttcttgattcaacatggctttaaaaattctcaaagaacatagaaaactgaggcccatatacaacatgtcctatatttatttgtctataatctattttctgtaactactaatattcctgtaaagtatttggaaggatttgtctagattagccaactactagtgaagtcagatacttttgatataaaattgtaaaaccaaatttggaaaagatcatttcttctccttctgaaatgtacttaagggtgaaacctttgtacaagtcaagtgatgtgttgatctatttctagactctatttctttactattgctttatatgtttgctatttgactgataactaacctatcttaattattgctttttatagtgggtcttaatataataatatccaattttttataaactctaaagcttgattattgtcattcagtattagcttgtttgttcttgggtctttgccctttataaattttaaaatcaaatctcctcctcctcctcccccccccttcccccttcaaaacctgctgaaattttggttgtgactgaccttgatctgaaaaatactacttggagcagagctactatctatagtgtgtgaatatggtataggttacatttacctagaccttcttttgttacttgtggaaatatatttttggtctggggtttgaggtttttgttttcagacgtatagtttatgattttcattagatttatttttaattatttgacttagtataacaatggcattgggtagttagacaatagggatacaatggagtaaatgggaaagccaaaattttaaagtaaggatgtgaaaactgattaaagacaaagaaaaaagtaagactattactaatttaaagaggaaatctctgtggatctaatggacatgaaaaaaagtgagaaaatgttattaatagttaggccaatatatttgaaagcataaatggaaaaattcctggaaaataaaactaatataaatgttttaatttgtatctatttaaagatactggatttatgacttaaaaccttcccacagagaaaatcccaggctcatatagcttcactggtgagttctttcgaatatttaaggaagaattaatacatttcttttcacataaagatttatttatttatgtattgcctgtataattgtgtctgtgtgtgtgtggctaatgtgtctgcagaagccagaagagggcaccagactcgcttggactggaattatagatgtgagtttgtgggtgctaggaattgaacttgggtcctctgagagaacatcaaatactcttaaccactgagccaactctctagccctaataccagcctctatacagattcttttagaaaataaaaaagaattaacatgtcccaactttaattataaaactgccacaaaataacacatagtatttctgatgaacatgaatgtaaaacaaattccaaacaaaatattagcaagtaaaatcaggctatttatatttccaagatgagattgttccaaacattctactttgtttatcagtgagaataattcagtgtgattgaccacattaaaaaaataactttggccgggcatggtggcgcacgcctttaatcccagcacttgggaggcagaggcaggtggatttctgagttcgaggccagcctggtctacagagttagttccaggacagccagggctacacagagaaaccctgtctcgcaaaagcaaaaacaaaaaaacaaaaaaataaatttgggggctggtgagatggctcagtgggtaagagcacccgactgctcttccgaaggtccggagttcaaatcccagcaaccacatggtggctcacaaccatctgtaacaagatctgacgccctcttctggagtgtctgaagacagctacagtgtacttacatataataaataaataaatctttaaaataaataaataaataaataaataaataaataaataaataaataaatttgaagtgggggtgaaaacagaaagagttagaggagagttaggggaagggtgaaatacagtatttgtgttccagttctcaaaagaatcaaattaaaaataagcataaggaccagacgtggtggcaggcagtttacatgagttccagaccagcatggtctacattggtttcaaaaaagaaagaaaaaaatatatacacttaaaaaaataagtaaatggccggacgtggtggtgcatgcctttaatcccagcactcaggaggcaaaggcaggtagatttctgagttcaaggccagcctggtctacaaagtaagttccaggacagccagggatatacacagaaaccctgtctagaaaaacaaaaaaaaagaaaagaaagaagataagtaaataaaagaagctgtcagcatcaggcactcaaagctggctggcctggtctacatgagaccttgattcaaaaaaaatacaacagaacgatacttataacagtagattttgaggtacagacattatttttctttccataatatttttattaattatttaagtcttatatacattaggaacccagatcacacttaattcctagtcctccaaggtccactccccatctttctggaccccttccccccaaaaaaaaggaaaagagagaaaaccccccccccaatttgtgttacgcttatactcatgggagcgtgatcagactcctgataatcagctccttaaaactgagtccttcctcagctgtggagagctactcttcagcatccttaccacatttgttaagaattctctcccttggttttctgtgtaggctgttactttggggggcagagtaatagtgtaaggtatagatcttctatgtctttctcaactatgagtctacagtcatcagtaccacagcaaaattagcttccttgccctttacagtcagcaggaacatggatcatggactttttattgattctttgtgagtttcacatcatgtaccctaatcccactcatttctgtcctttcatatctgtcctctgcccttacaacatcccccaaaagaaaaacaaacaaaacgtaaaaaaaaaaaattttgttctagaacctacagtgtgtcacagtgtgtcatacactatacctgtttatccacaatgagtcattgatctgattcgaggcctctggcttctgctatactgtcaatactggatcttcacaggaactcctctcagatattctgttgttgccctctgttgtggagatcctctaggtttggatctgcagctctggccctttcacattctctagcagctcataaatggggtagatgcctggagtaagctaaccctgaatctgggcctgagtggtagctgagttggtcagtccaccacctctcctgctaccccacccccaaccaatgcacgcataacaccagggggagctcttcagcactgtcccagctagctcatttagtgcaaccagccaagtggcaagactagctcttataccctcctggccagcttactcaccccacaaacattgacatagacccctgatgctgcctggccacagacccaaatatggccctcagcagcagcatgggctgggacttcaccatggcctcaggtggtaggacaggctactcacatcagactgttcctctccaccctctagttctacctctctcataattcttttttttttaacaaacccttgtgtcgagggctgactttcagtagatcgcagcgagggagctgctctgctacgtacgaaaccccgacccagaagcaggtcgtctacgaatgggttagcgccaggttccacacgaacgtgcgttcaacgtgacaggcgagagggcggcctcttcataattttcaatctgttccacttgtctttcccatctgtctaccatgtacttgtacatgtagtcatggcttaggtgtggcttgtgacaggtgggcctctgggtttcccatgctcaaggcaagggaaactgtcttacttaacagtgtgtgtctaaaaaaatctggcttttttgagagtgcagtatttaaaaaacaaaactgtactatcaatttctataaagttgttcgagaatttatatgggtcccaaatgtcctttctgactgaagtctgcagtaaaagccactgtcataataagtactaatttgttatttgccctattttgctttcattctttaagaacatacaagtgggtgctgaagaaatggctcagtggttaagagcactgactgctcttccggaggtcctgagttcaattcccagcaaccacatgatggctcacaaccatctgtaatgagatctgatgccctcttctggtgtgtctgaagacagctacagtgcacttacatataataaataactcttaaaaaaaaagaacaagtaagagtttctccataagctgtctgaatatgtcacagcaggttgagtatcagaagcaaatatgaaaattcaaccatcttattctgttgagccagatattaggtttgcaaacaaatcacttttttcacctcactgtatctctatccctggtttgtaaaaattttaagcttgaaaggatatattattactaagataagtcatacctatacagagatgttccaaacctagttgtgacaaaacaatacagattatatagatcaagaagttgacatagtatagcaaggcaatttgtctgtttcttggtgaatcaaccttcatgtgggaggtttgaatgccctatttcatcatgatgataagactctaacctagaatgaatgacctgagtagtagtgtttgaagaccaagcaagttctgcatgaccaagcagagggtataagacttgggacctaaccttgtgccatttccacagcactgttaattgaaataattatgaacccacctcgagtcaagggaaggaacataaactcattgtgaaaagcactgcaaagaatttgcagctgtattttaacaactttcaaaagaagtttgatgaactaaaatattgtttacattgagttatttactatgtaaagcaataattattaaaacaatacttgttcattctgtcaacattttgtgccataaccttgttgttactaaagtgagtcttttcagtccatggccattgctttatgaccctcatttcatgctccctgcctggctaagaaataattcttagatcatcaatatttacctctttttttttcagttcttgatcttccttcaagatacttttctttttctttctccatctccccccacccccaaacagagtttctctgtatagccttggctgtcctttaacttgcttagagatccacctgcctctgcctcccaagtgctggaataaacgtgtacactgacatacctgacaagatacagtttcttaattttcttatagtttaaatatggtatgccgaggtcttaatttttgtcactcattttgctgctactgctgctttgagctcccagactctctggtgttgtatcttgctaatttaaaaaataaaataaaattcagcttttattaaataagacattcttctgttattttcttattttttcatttgtttaatgaaagcaggttttcactcatagtgttcgctatctgggatcttttgtgttcccatataattgaacatatcttttgttcagttattttgaagaattatgttgacatttctatagtgattgcattgaaattatagattgcctttttgttgttgttgtttttttcaagataggatttctctgtatagccttggctgtcctggaactcattctgtagaccaggctggcctcaaactctgaaacccgcctgcctctgtctcccaagtactgggattaaaggtgtgcgccaccactgcccggctttataggttgcttttgataggatagccattaccacagttattacaatattctaccaatccatgcatgacatgggagatctttccattatctaatatcttcagtttcttttaagtttttattatataggtctttggcttgcttggttagagttatcccaagatattttattttagtttttgaggctgtttttcaaggtactgtttccctgattttttttctcagtctgtcatttgtatataagaaagctactgatttttgcgttttaattttatgtcctgcaacttttgctgaattttttggtcagctgtaaattttcctggtgggagtttttagggtgttctgcaaatatatatgttctgcatatttatttgtttataatgttctgcatatatatatgtgtgtgtatataaatatatacacacatatacatatatatattcatattctgcaaataaagataatttgacttcattcaattatttgctctagctaaaacttaatggatgtattaaataggtacatccttgtcttgttcctggttttagtagatatgctttatgttttaatccatttagattgatatggctgtgggcctgtttgaaatggtctttttattatgttgaggcatatcctttgtattcctagtctctttaggacttttattgtgagaggatattgtaattttcataggccttttctgcatctaatgagatgatgtgtaatctttgtctttcagtctgtttatgtggtagattatgtttatcagtttacatatgttgaactttccctgcatttctgggattgagctaacttgatcatgtggatacttttgatgtgttcttgtatttggtttgcaagtattttgttgagaatttttgcatctatattcataagggataagggtgtatagttttctttttttgtgagatctttgtgtggttttgatacctgggtaataatagtggcctcatagaaaatgttctttagtttctatattgtggaataatttgaggagtgttggtgttaagtctttgatgatctggtagaattctgtgctgaatccatctagccttggacggagacttgttcttgttcttgttcttgttagacttctaattactgtttctatttcactagggtaatgggtctgtttaaatgattatttaatctttaacttggacaggtcatatacatcaagaaatccatccatttcttttagttttttttttctttcagattgctaggctgagattttttaaagcatgtccttataattctctgagtttccttgctgcctgttgtgatgtccccctttcgtctctaattttattaatttatgtcttctctctctgtcttctagttaattggctaaaggtgggctcagactttatgcaaatgttaaactattttatgtgaagtacttgaacatctgcaggttatctgtctgcaagagatactggaaaagaccctcacaccttagcttctctgctgggagaagaggtacctagaggccagaatatagttttatatcatattttccttttgagagttttctatagtactttgctcacatgaaaaagtaatgagtttgtttataattaattggtgttttagaaagatattcagacaagacatatttagtagccaaaagactaaagaaatctttggcaagaatttcagaatagggctggaaagaaggctcagcagttaaaagcactaactgctcttctgaaggtcttgagttcaaatcccagcaaccacatggtggctcacaactgtccataatgagatctgatgccctcttctggtgctgtctgaaggtacagtgtacttagatataataataaataaatcttttttaaaaaaaagtattttagaataggtcttgctttgtgacttctacaactctgtaatctgacccttggaaggctatctactatgtggaagttgttctttttgaatgacttttacactgttgcacaaaaaagatccagacagaatgtcctaacccttttctagagtggagtttttgcatattacaagtatctactctcaaagtggaagattgttgacccaccctgtagcccatgaagctaaaagtctctgcagatcaaaggctattccaaaaacctgtatggggagccaggaggaccccaggcatttgagctcaagagtggtgtaaacaaagcatctctagtttttattattaaatcaagaaaagcatggggtaatttttagcttaatcaaaagcaactacagtgagggaatagacctggtgttaggttttaccatctttggtcatatgaaggagccaagaatattctttccagggctttgtcttttccagagataatatgggtgttgcctctagggcattccctccatgttcatgctttcatgtacattgaatcatcatagtttctgcaattctttcttgtgggaaaaatattctgcactctaccccatccatagttcacagtaagttcacagctttcttacatgggctcccacagaaaacagaagtgtttggtggaaattggatcttaggatttatatttgaaattgttctacattcagaaacataccacagaacacctcattcttgatttgtgctttgttacagataaaacacggacctgtggaatatgagtgatgacaaaccctttctatgcactgcccctgggtgtggccaggtaacatatccattacttagaataattttgtacgtttcttttcattaaatcattgctagaatatattgtcattaaggttttactacagtgattttctttatgattagagttaagataaaaacaaaacaaaaacatttagaaattctttaataatctcttctagttctagaaaagacagtgtggtattatggaagtagtttataataaaggtcaaaactatagacagaaaccgaagatttaaagttatattatttgatttatgttcattgaaaattaatgttaaactacctagttggaaatcaaaaatgtactactactgtatttagaaattattttagttatttgaactcttataaactaataactacatcagacatcactaatctattaatgttctgaagtctaacacctttaaagcatgtgtggaagcattttcaggagatattttaatttttaattgttatgaaattattaatctaatactatcaccactaccctaatcttttaactacaagcactaacaaagaatctatttttagaaaaaaaaattttttttaatataaatatgctgtcagtgacatgcccaaagagggcatcagatcccagacctctggaatcactgctagtgagtcctcgtagccacctagccatctctccagcctgaaaatttgatttttagtggatagtaaacttacagatacttaatagagtataagtcagagacattaaagtactttgttggtttttatttatttttagttggtattttaaattaaaatataatcagcatgtagtaaactgcacaataagtcacagtttggtacatttggatttttattgttttacagttattgattttgttcacatgtgtgtgagttatatgtgtgcttgtgtatgtttatttgtgcatgtgccacttcagctatgtagaggtcaaaggacaacttacaggagttggttccctcatttcatacctgataggttttgtggggatcaagctcaggtcattagaagtgatatacctgctggggtacatcaccttacccagtgttataatttatcatatacatatacttatagaactgttacaacagtcatgagggtgaatattactcatcactccaaaagtttccttgtacccatttgtaagttctctggcctttgtccactactgatctgccttccattactgtaaaaatgataactcagatgataactcagtggctactaactacttgtttgtactcttcagactgtatataagtggattcatagcatatacaaatttttctggattctttgataacacaatataagatttctcaattgtttttatctactttctaagattattaactaatattttagattaggtactgggaaatttataaagaaaatgctgattatataacaggaatgctgtgatttgattggatccccccccccgaaatttatgtattgaaaacttaacctctaaagtaatatgttaatatacttgaggaggtggagccattgtgaagtgtttaggatctcacaactttagaccttacaacctccagagtagtgaggcaagaacagggtgtcaaatcccccaggaacaagagtgacagatggttagtcaccatgagggtgctggtagcagaacctggattctctggaagagcatcaagtgttattaatcactgagagtttttttttagccccttgtttacttcttatttatcattattgtaggaggtacatgtgtcatgtacatgtgtggaagttaggacataggacttggtatctttttctaactacctgcatgtgctttctgagaatggaattcatttcatagcaagttcctttatttcccctgcccagatgccatttaaagtagcttggtgaggaaatgtttctggtcgtgtgacagttggatcaaatttgacaattggacaaataaaaaaaagaaactacatatttctattgtggctgaagtataaaatgattaatgaggagctcagagagatagggaaaaaaatcttttttttttaaagattattttatgtatatgggtacactgtagctgaacagatggttgtgagccttcatgtggttgttgggaaatgaatttttaggacctctgcttgctctggtcgactgtgcttgctcagtccctgcttgctccgggccaaagaattttttattatgatacataagtatattgtagctgtcttcaggtgcacgggtgttagatctcattaccagtggttgtgagccaccatgtggttgtttgaactaaggaccttcagaagaacagtcagtgctcttaaccactgggccatcttgccagcccctggaaaaaatcttaactgtagaatgtatgttggtttattcacagagcaatatgaagcaagaaaactagaagataataatggtcaaaatgaaagatggacgcacaagaaatagacttttatatctgatttggagctgtagtttacacacattttttaaaagttaagagtaaaaagtaaaaccttaaattctttgaaactaaaatttagagtatgattttcattcccactgactagatttactctctggtaaaccaaatttactttttaggatttggtacaaagttaaagaagagatatgggtagtaattgacttcgtgtgcttatctgtgggtgggcacctgcatgtcatggtgcacatttggaggtcagaggacagtttataggagtcaggctcttctagcatatgctgtcagacttggcagcaaagacttttccctggtgactcataatgttagaagcttttactccatgctcagttaaccctgtttcttagagcctgtatatcaagggaagtataaaacaagacagtattgaaagggaaggcggaagctagagcaaaacttaactactcacatcaaagaatgcagacacacccagtccccttcaaggtcataccccaaatggctgagggacctctccaggcccacgtatgactcaggctccaccatttccaatgctaacaccctgagaagaatcctttggatttttttagggatattggaactctaaaccataactacagataacgcattgcttctagaagcagtctttggaaagtaaccagctttgccatattgttcaataagtcattcttggaaacggcctcaaaaaaagccctaactttttttctgcttaaaatagaatggctgctcttattttgtgtgtgatcccttcttaatatacactttttaaaaattagaagtattacttttagttacatgtatatgtgtcgggggtggggagattgggttgggttgttagtacattgtccttggaagcaaaaaaaaaacctgcattgggttccctggagctggagtgagagacagtttaacccatccaacctgctaggaaccaaactcagtcttccccaagagcattaagcacttttaattttttttttaattttatgtatattagtggattgtctgtgaaccacttgtatgccttcttcaatgaggtcagaagaagcaactgtggttatagatggttgtaatctgccacatgaatgatgagaatcaaacttgggttttttgcaagtatatcaagtgttctttacaactgagccatctcttcagccccagcattaaatacttttaaactataagctatctctaccccacacccagttttagacatgatcttaattccatacatatataaccaaccttgcctgggctcactctatagactactagactggcttcaaagtcaacagagatccacttacctctgcctcctaagtgttgggattaaaggtgtgtgccatcatacctgcagtactaacacatgagatttttaaaaagtctttttaaaaaagaattaatttatatatttttatgtgtattatgtatgtgcttgcttgagattatgtgcaacatgtacatgctgcagtcttagaaaccaaaagatatcctggaactgagtgagtttgttttgttttgtttttttgtcttcttttgttttaaataaaaagcaatgtatttaagtttgtttaagtagaagaaaaagagtcagtagctaaaaattagaatatatgtttgtatgtgtaccataagaaattatttaagagaatttcctaacattaaatttatagtatttgttagtaagttatgcatttgagcctctatgcatggctaagcatggttttaagttgttgtgttctactagagcttgtcctatcatttgctcctttttctattatgatctctgaaattaattttagtattataataaacagcatcgtgatgagtatcattttacacaaatatttgtgtgtatctctaattagtttcttaaactattaccagctcaatatatatctttaagtggttgtggtggctaaacatgtagatgacaaattcaagactactataagaagttgtctttaagaaacaagggctaaaatgaagcaagagtcactggattgaattctcgttccaaattaagtaattaatagacaaataaataaaatgtatatatagttattctcattccagatgagtgggtgaatgaatgaatgaatgaatgaattggcaaataaaatgtatagttatatattggcccacaaagatggcattctggataaaaaggaacttgctgtaaggctaaggacctgagttcagtccctagaacccacatagtagaaggaaagaactgatctctgcaggttgttttttaacttccacagatatacacacttaaaagaaaaaaaaagaaatgaaatagaagctcgctctgtttttgctttaattaatagtttagtcctcattaataataaactatttttgttataaacacttcagtcttgggtattacatttttcaggcaatgattttgtgaggtacttaatatttatattgtatactatcactgcccaacacagcccagtgaatgtcagcttcatgagttatatcttgctgaaattagcagtgacctattctccctttatattaaatagtatttcttaggatgttgaaggtacttattattattagttgttgttgttgttgttgtttgagataggtctcactatgtagctctggttgtcctggaactcactatgtagatctggcctcagactcacagagatctgcctttgccctcttgagtgctgggattaaagatatgcatcacaatactctgcaataattgatcattgattttagaaacaccaattcggtgatgtaatgcaaattatatttttcatctctatggaatgctctaaattttgctctacttaatttaaattttccagtagattatcacattttcaaatgtcctttgttgatagtgtcacgtaagaatggcctataaaaattagcacagagtttacttgaagattcttactatggtgctcatgtaaatgcctaggtaacttttagacattgtagagattcctattaacttcattgtttttagaggaatacagtggtattgaattgaataaaagatacaaaattagatacatagtaaaagattcatttacatactctttcttgttggctatatctttgtgtgtcactttaactgactctactttgtggtaaattatcatatatcataagctgattcagaggggagagggaatacaatatctacttagcccaagtcttagtggagtgtatgtgagttaatagtttctgctattgaatagagttcttcttcagctaagcaaaaagtagcaaaaggagctgtttacatgaaaacagctctgattacatgaaaacttatttcaacccattcaaattaaatagtagtagtaataatatatgttggaaataactgtaaaatcatagatggctgattcgtaggaagctctgtaagaactgacttagcatttaaagcaagcatgtcagacaggcctggtaacctgagttcagtccccagagcccctttgtacatacaggaaccaacaccacagagtagtcctctactcctcccacgtaggtactctgtcgtgcgttaacactccaccccaccccagtattaacaaaatctgaaaaatatggccaaaccttggaaacagatttcttacctactataatttatattaatttactgtggactctgcatgtttactgtctgcccattacccttttctaccttataagatcctgtccaaaaaacttttcttcattttcttccaacattgttgattgagataaatgctcaggctcttgtttttgttgacagaaatgcttgaattttgtgcatacctgttgcattgtgcattcaaattgggctttgtctcgaagaaattgtgttaattaaatatgttaatactgccagtagtatgattataattagtctgcagagtttatttttttaaacaaatcctttttagtttatctaggaaacaattcatatatatatgtatacatatatacgtacatcataacatttttctcattttaactagtcagtagaaacttagaggattagagtagaaaaggcaaagtttcttgttaattcaaattttctcagataatttctcaaggtcagattgacctgtgtccttcacatttaaaaaaaaatgttgctatctttgtaactaatggttaatttgatctttggatattgcatgagagtttataaatatataacccttatatttttagctagtcactccttttctctgaagacagtttactttcattttcacattatacagcagataggggttttttgtttttgtttattgttgctgctgccaaacatcaaacctgaggccttctacatagcattttaccactagactatgcttccagctcttattgctccttagcatttgtggccaaactaatccaaaaagagagcactaattgaataaacattttggtgaaatttcccgagtttttgccttttaattttgacaactcagagtcttttaagagtaccacttatagcaagatcgtttataatcaaatgctttaatgattgcattctatacaaaagttactttgggaggttttctagaacctaaaatgaatcttacatgaagatccatttaatatggaatgtaattttactataaggataaagagcaacagtgtgaataagctttgcaatgtgttcattgacttgagagctttgtttctaagggtgcttgtcaaaacaccactgctaatttcaccagatttggggagacttttgaaaggagaaagtaataggaagatagcccgagtggggaaaagttagattgtcctcagtgtccacaggtgagtagataatgatggagtaaaccaaggggcagaagcactgacagttcctcattatgaagatacaaacaggctctgaagaagtacttgttattctcataaaatagtggtttactttctattggtgtctgtaaataaagtaaagcatgattttcttttgccttttacagattttaagaatcaattgttaatttaaggagttcattttttcccccattagtctttatgtaatgcttacagcagatttgaaggtcatgggtgttcagcttacttgggagggtagacatgaagataatagtcaataggctcaataaggagccttcagagtaccatggacactgatgggaggtcttttaacttgaagctggagggccagagagagggctcaagtagttaagagggattgtgctctaccagaagactggagtttggttcccagcacacacgtcgagtgactcacaactttgtggactccagtattcttgattttctaagcatccatagacacacacatgagcataaataaaaataaaatcttttttaaaatatgaagttgggccgggcagtgatggcgcatgcctttaatcccagcacttgtgaggcaaaggcaggcgaatttctgagttcgaggccagcctggtctacagagtgagttccaggacagccatcactacacagagaaaccctgtctcgaaaaaccaaaataaataaataacaataataaataaaaaaataaaataaaatatgaagctgggattcttgtgctggacatgggatgctagtaggtactaggtataagactttaacagttacactaaaatgttaacaccccgattgtaaagtagtggaaatgagtaagggttaacttaacttctaaactaggaaacaggcaaaataaatgagtggtttcctatttggggaatagtgtggttcttgagaaggagctcttcctaaggctgatttccagtaagactttaaacacgagtgtgtttgtcacagtcataagtatcaccggtcgcatgtggtacttacagtgtaaggtgagcagaggcttgataaatagctttacacatatattcattttaacatgagttatgattttaaaaatcaatttttaggttaaaacagtttaaaataaattagaattgccaccacagggcgatgatacatatcgcagtgtnnnnnnnnnnnnnnnnnnnnctcccctcccctctcctctcctctcctctcctctcctctcctctcctctcctctcctctcctctcctctcttttcttctctctctctctgagacaggatcttactttatagccctggttgacctggaatctctatgtagatcaggctagcctcaaatttacaggtatctgtctccctagtattgggattaaaagtgtgcaccaccacgcctagcctcagattaatttcttaatttgtacaggagtcatttttagaatattctcagttaaaaagtggtaagtaaccttacatctaagtaaatacagtattttcttaaagtctttgaactgtagagtacatatttctctgacataataaaagaatagtagtccattttattattttacttgcctcaggttttattttcaggtcgctcagatgagttatatactatcatttcttatcctttaatagtgggtttctctgattatttgaaaactactgtgtctttgtgtgctaacagtagattgattgtcttatagtataagctggtgtttcactgctaatggtggttttacatgttgtggaaattgatatcctttatcagttttctttgatcaaattgaaaatcttaactatattttaaaactttttgccacagcgttttaccaacgaggatcatttggctgtccataaacataaacatgagatgacactgaaatttggtccagcacgtaatgacagtgtcattgtggctggttagtatatgcttttattaatggcttatataatatttcacccagaatgtgcacaattttgtgtattctctgtaaatactatagtctggtgatagtccaattgcttcatttacagtaaatgttagcaacatgtatttacccattacatttctatatgttcttttgatcattcatttcacttttttgtgtgcttttcgaatacccatttgaagtcggttttatggaaattaattagactccttggagcattcatgacttctacagagtatgtttaactgataactgaactcattggtatttagtgtttctttcagttatcatacacctagttttcaaaacgttgtgaagatagaaaatgatcaagcactccctaaacttggtcattataattttgtttaaaaatgtctcaaatgaaatgttttattaacaaaatactctaaagctgggatgtagatcaatagtacaatgcttgcctgacattcacaagactaaggttttaatccccagcactgcaaaataaaacaaaatgttcttcataaagaaaacctaagttcagttagtatgtgtgtatttgtgtgtgcttgtgtgtgtgtgcataccctataaccatatggaatcaccctgagcagattattatttttcatatgtaaacagaggaacccagttcatatgttagcttactctcaccctatcccatattagctgttttcttttatttttttataacacataagctatgtacttgaataatatatacgatgtataatttaagtatatttgtttcttttctaaataaacattgtgataagttctgtgtcagaattttagctctctgtcagaactacaaatatgcatgtcataaatatagagtctagagtcctttattaagtgaaacttgttatcctatctataattctagaatttaactagaatactggtagtacttttaaattataacttagtctaaacaccatgtgcagtgctttggagaggtgttaaggcagtatcagatggttccttctgtgcttttagtactgtaatttttgtaatgaataaatgagagggagcaaaaagttggtgatttattgaaaacaacttatggaggggaactttcaacagtcttcagtactgtaagaaaaagggacatggaacagagtgaagtatgcacttcttggaatgtgtaaataacaaggagaaccacaataaaaaaagtaaagaacagtaattaaggaaaactataaactacctagaaagtgttttcctgggtatgaagatctttgtttccttgatacttactgtctaagacagtctctataaactttgatctcaagaatgtttttagtttggttcctagatgttacttttagtacagtatatataaaaatagagcacattcaaccacagcatttttactaacattgaaatagtttaatataactgtaaatagaatgcatgatgatcagcagccttaagcaatctgcatgttaaccagttgtgcctgtgatgacttttctcgaatctgatggtaccagtagtaatcatcaataaaactgatgtgggcttgtacatctctggatgttttcctctctaatgtcagttgtgttcatccatgatcagcttagaaaaatcctttgggtgtgaacagtattcacatttatatttgactaatttgaattaaaatagacttaagctgatatgtatacttaaaacccatattaaaatattattttgaaagtctttgggtctaaaaatgagggtataagttaaagattaaataatgggtaagattatgacgtaagtggaccctgcagtaattctgacactgttttcactgtctgagacaagcctaccttctgtctagcgtgaatgataagtgaattatttttgctaaaaatatttgtaagtagtacatgtgagggcaaagataaaattaaaatacccactgtagaaactcagtaattaacagatatctgactatcagctaaacagattttatcttaaaccagtgctgtactaagtagactagattctgtgtataacttctaaaattgctgccctaaaatgcataaaatgtgaataaatatttaatgtactaccaactctaatataaacaaatatccctcaaaataataaaactaaattggaaagacttgtaaggtttgtgtcattcattcatttgttctgcatacaatacatgaatattcagtataatgctaatatacatgtcattgagtatatatatatatattgagatatcgttgaaatagttaggttgtaagaaagttgagttcacatcattattaaattaggctaaaccacttcttttagggggtgggaaaattttgctttcacttttttccccctttcattattttgatgtaaaaatgtatattaagcttgacttcataatacttttatgaacagatagtgaatgtacaaagttaaaatatgtatttgctctcattagttttccctaaaattgtatgcatctaacaatcagaatttttaatgatgtaactttgaaaaattcttaacactttgttatagaatagtaattatttctccaaagtatgcttattttactcagagtagtacactaagtataaaagaactttggtgaagttgacaaaatatcttgatataaaatagagcttaatcaaattttgtttgttttaaagaaaagcatctctttaaagagagaaataacattgactgagcagtgccactgacctgttcattcctagcagcgttttagaatcttcacatgatcatttgcatttgtatgcttagtacttcttggcatttatttcagatcagactccaacgccaacaagattcctaaaaaactgtgaagaagtgggtttgttcaatgagttggcaagtccatttgaaaatgaattcaagaaggcttccgaagatgacattaaaaaagtatgttgttaaccatgaaattataaaaagaatacttctattaggaatacaatgatgcttttcacttcctggtttcttaaacattttgcttggctgttttttataaactttttacaaagtttttttttttttatcatttgtattagatgcctctagatttgtcccctcttgcaacacccatcataagaagcaaaattgaggagccttctgttgtagaaacaactcaccaggacagccctttacctcaccccgagtcgactaccagtgatgaaaaggttagaactatgaaaaagatacttcaggaaatttaatttttttaatttaatgccttattgtttaatttgtgggtatgcatggcatgtgatggtcagaggacaacttgtaggtgccagttttcttctcacgctatataggcctgaggtatcgagctcagattttcaggcttggtgtaagcaccttatctgctgtgctgtttcactgtcccaaacttggttagttttaatctgaaggaaacattaaggtatgacattttacataatccaatagaagattataggttttatatacaaaaacccgtgtaaatactttaggaaaattccatcttcataattatttttattaaactggatattaaaagagagaacaacttatttagaaaaggtgttatttgaagatatggaaatgtatacagctgaaacaggatgtctaagaatgagtaattattactccagtatatatttgatatcaacggtgaatgatatttccttaagtacattaacttaggttttctgggctattgttaagtgttaagttacatcatgatgtgtacttcatcacatattcacttgaaaaacacataaaatgagcaaatttatataggagcactatgtctatacataaagagacagtgatagtgttcctttttaatgttattataaaatcataagatgaatagatttctacaatgagaatatagtcatttattgttgacaggaatatatcttttttttaaaaaaaagtctcagtaagcaatctcatcattctttccaaagcagagtgtatctacacaaatgtagacaatgtagcctactatatacttagtatgttacaagctattattcctagattaaacctgtactacttgatactactatattgaccatgtaggtaattatagcacacaggtatttaaacatagaaaaggcacaattaaaaatgcaggctgggaggatggttcattgagtaaaacttgcttcataagcctgacaacttgagttttgattccccaaaacccacataagaaccagatgccgtagcactagtgcctgtaatcccttcatgctcttaaggggagatgaaaggaggaggaggaggaaaatctccagaaatcctaggtctggtacctagtttacacagtggcaagaaaactttgtgtcaaacaagatagaaaggtaaagactcatacccaaagattgtcctctggcttctatatgtgcatgcctgcatccccacacacaaacatgtacacatacaggtatactcaaatcacagagaaagagagacagacagaccgcctgactgaccaccagtataaacatttatacagggtatactttaaaggacaccaaccatgagtaaagcttacagagtggagttttatacttcaggactaagtgaatgagtgtcaagtgagtgtgaaggcctgggacatgactttatactgctcttggctatacactatatgtagacaatactaaatgtttcttttcagttcttccagtaacaaattaatctggcttattgtaacttttataaagttcattttttaacttcatctctaataacatttattttaaatcacaaatagatggtataagaatataataatactttattttatccttattctatactactctttctcccaatattgagaattgaaattctgggcaggtagaattcttggaagcaaaggcacatactccctttcattagatttcccaaaatcacaatttttaatggttatacttgattattgccttagatatatttaattatccccttatttcttaacatacggtcatttccacatttattatagttattaaggatcctgagaacagccttatttccctgcagagcatccctttccctttatattttccagttttcattcttgtggctagtttatcaccttctaggggtgctgcttctgcattccttagtcattaatttcttttaggtagtacatagatccactaagttgtggaaaatcagttcgggacctcctctgttctaattttctttttagggatttccatcaagaattgtaatagaaactataaattagtaattcccaaatttacatcagccaaggtatctctcctgattgctgaatacagtttctctgttgtcatctcctttactttgtctagggaacatctcagtatgtctgaaactaagcccttaattctgtcctcatttttctcctctgagaaaattttctctacccatgcatggtggtagtatgtccttgtaattcctgcactaggaaggtagtgtcaggagtattgcacattcaaggctagcctgtactgctaaaactttctgggctatgtagcaagacctgcctctcatttccaatacccttcctgcaccttccaacaaaaaaaagaaagggaaatgtgcatctatctacttatttaagcaaagcatttaggtgtcacctttagttctatattttctaccttgactttgaaaccaatagcaaatcttcatttaccaagcatgttttgaataaggttcataccacttttgtgttcagtgtaattgtcttagctgtcatctatcagttgtaccactactacccggcttctctctctctccctactccagtgctgagaatggcatgagagccccaagcacgcacttaagactactgagggttccccttccctctatttttcttgcaaaacacaaagtttctttatgtttcccaagctagtttcatattaataatcctctgtgtgagtttccccaggttgctgggactgtatgcatgccaaccataccaggctaaatttcctttcaaacctgcttctatttttgatctgcttctcttagttctaagtgtgggaacttaaaaatttattgagtcattcttctctgctgaaaatcttctagcaatttgctcttgaagataatttatatttattccttaggaaaagcctcattgatttgactgtctactcatccatcctcgtttcctgctctctctatccatcaaatattgtaaggttttcctgcctagcattcccccttctctatagcctgcctcttcttgattctttcaatatcagatcagatttctttttgcaaggttttcttcctcactattacagtgcccagctctaccttaccctctgctaaatcattatttattgtagaatgtttaatgtcctttctggtaggaagtttctgtgatggttttactcattgtcattctgctcactagttcttgagttggaagtttttagatgtgctgaaaactgtagttacaatgctactaatttctccttcctagtatcttactaagactccaactgaaagtagctatataaaggccagttcaaaaggatacaatagttagggagttctgggtaaggccctcatctcttttgtaatctgaaaaaataggaaatattttaacaatcatcctggctgattcataaattctatttctctttagtttggaaagctctcagctctacctgctaattttgtatgactcacttggtcttttgatactagaaaattaatgttaccaaatgaaaaactacctgagattagcagacttttttttttcttaatttaaaatgtcttaaaacatttctgtttgtttgtttgttttgttttgtttttttgagacagaacttctctgtgtagctttggctgtcctggaacttgctctatagtccaggctggcctcaaactcagagatccacctgcctctgtctccttgggatcaaagacgtgcatcaccaccacatctgaacaccaaattgtttaagtcatagcactatcttgctggatcagtttcttgattttgtaatacaataagcaaataggataggacaatcccttgcaggttttgatttttgattactgacagtaaattgtatttgtatttcttactgaaattctcacagaaacattgccaagtagcccagcctaatttattttagagtaataaacacattgaaccaaaaacacagatttggggtttttttttttaaattttaagaattacatttgaactttacaactgcttagatattttcaattaactttagatattaatttacttgtagaggcattaagtattatctagtggttgctttcataaatgtgttacattctgttcactgggatacatgaattaacttgcgtttttaaatactaccctttatttatcttaaaattaaataggaagtaccattggcacaaactgcacagcccacatcagctatcgttcgtccagcatcattacaggttcccaatgtgctgctcacaagttctgactcaagtgtaattattcaacaagcagtaccttcaccaacctcaagtactgtaatcacccaggcaccatcctctaacaggccaattgtgtaagtgattccagtcactcactgactgtacatgagttgttagggttttttgttttgttttgtttttttatggttttccctaggatatttaattacttgaattaaaacgtgtgtgtgtgtgtgtgtgtgtgtgtgtgtgtgtgtgtgtgtgtgcgcgcgcgcgctacacgagagaaaaaaggagaaagagatctgtctgtcttgggttttggaaacttttaatattttaaaaataatattatctaacacattggacaataaatatctaaatcttagctaaaataatgaaaatagactataagtttaagatggtcttacttttatggtttttgacacaaaacaaagctattccatttcaagatgacatttgtctcagttcttaaaagtaactcccaagacctttctgatgagaaattttctcatttcacaaattggaaatccatgatttttccccaggctttttaaaaaaaacactcttacatagattatgcatttaagatgcaattaaaaatatctaagttttgtaatttgcccttttaaggttagaaaacttatttttaagcaataggagggaaaagactgttactttgcagaggtggttggtatggatctttacatttttcccttgttttgtttttcttagtcctgtaccaggcccatttcctcttctcttacatcttcctaatggacaaaccatgcccgttgctattcctgcatcaattacaagttctaatgtgcatgttccagctgcagtcccagtaagttggaaagttagaccatttaaatttaagtctttgtatctaaactggtctgggtaaaataaccagaaaatatatttgaactgcttgattggcttacaaaatggaatttatcaagtgtttattaattgggagtagtatttattcatcattacctgtaatcgactataatattctaggcaaacataattggattgaaacctttctttacccccagcccactcttgttttctgtattcttattgcattatttcttgattcacctcactccagtttgactaggtttatgaaattcaaatatttcttaagatacttgttttggaatgctggcaaatagctatggtgtttatagttataaaaattcttcaaaaaacacacttgtcctttatggttacatgaagtttagtggcccaggcatgttaaagtccaaacattcatatcttggcctgatgacacatgccaggaatcccaatagtcaacagataaagatagggtcagaagaaggtcatagctagcctcagctaaataatacattttaggccagcctgggttactgttgtgagaaaatccaaaaaaaaaagttttatgagaaacacactaaatactcaaattttgggaaataaagaaaaagtaattaactatattgagttgtctagtgaacatttaaaaacataatgttgggccaggcggtggtggcgcacgcctttaatcccagtgcttgggaggcagaggcaggtggacttctgagttcaaggccagcctggtctacagagtgagttccaggatagccagggctatacagagaaaccctgtcttgaaaaaaccaaaaaaaaaaaaaatgctggagctgtgtggttaagagcttgcactgttgttgcagaggacatgagttcagttcccagcacccattgcagatggctcacaactgactattgctcctgccatagaagatgtgagaacttggcacacatgcccacccatagataaatacatgtacacacaattggaaagattaaattgttatgtaaaagcactgtatttgaaatgatgaaaattttctttttcatatcatatttcacaaaaatagttttattcatactttcaaattagtcttccaacattttacattttcatcctgaaaagaacttttagatatctagcaaagttgtctaaaacatactattttcattttccctaaattatttatgatacatatataatttgaaactttcttaaagaatactttaagccttagtcattcatgtaatgaatatagttggagggttttgttgttgtttttttccccccccccgggactagtgagatgtgtcagtggataaagatacttgtcaccaagtttgacaacctttgttccagtctccatgtcccacatggcaaaagaagagaaccaatgccagcaattgtcctctgacctccatatgtgtgccatgacatgtatgtggaaacatatatgcaaagtaaagaaatgtaaaaattttattattacatggataaatagtgttgattcatgtggtataatcctttagtaaatagcctttttttttttttttttttttttttttttttttaaatttatttattggttatatgtaagtacactgtagctgtcttcagacactccagaagagggtgtcagatctcattacggatggttgtgagccgccatgtggttgctgggatttgaactccggaccttcggaagagcagtcgggtgctcttacccactgagccatctcaccagcccagtatatagctttttgagattattttttaaagcttacttgtagcaacattctaaaatttgtggtttggatatgctcctcaacaaaattagtaacatattaagtattaagtttatttaaaaaaccttccaacctaccttcctaccttccttccttcctttcttccagttttgaagcaggatcccactatatagcactggctggtctggaactatgtagaccaggctggccttgaactcacagagatccacctgcctctccacatgagtgctggaatttttaagtaatctaaatgtccaaattatcattgattgaggtatttccaaaatatttttcttctttaaacagaaccgtgttattcaaattgcattacttaaaagtcttagtgaagactcggggaaaggtttgctttctcttttttgaagatatttttaaagcaggaaacattcttgctttgtatttgagataaaatgattatccttttgaatgtgcctgtattaacggcaacttgtaatgaaaaaaagagattaattaaccttactcttctaaagtgaaaagcgaaagtggcaaaccctgttaaagtatcacctgaggcattatcagggggcaccggcttctatgttagtacacagtacattaatacatcagtgcacatacattttagaaaattcatgtacttattttaataaattacagtttgtgttgaaattattttaatttttattgtcacagatttggtagtccttttaattgcaaaattggaatgtaaaagataatctacacatttttgtatcagtcactttgaatattatgggtttataaaaaggaagttaaagccaggccaactgacacaggcctcttaccccagttacttaacaggctaagacgacaagctaacctggactacagagtgggtgcaaagccatccaaaataactttatgaaatcccatctcaaaaaaacaaaagtgggtagtgatagagctttataatagagcacttgactcatatgcccaagaccttggttttgatccttgcaggtagattgggaaggagaatacaatcctttgagaaaggttaaaacatggagattattatttcagagaaattgacaacttttgaaagataaattttctaaatccaaagttacaaattaagagtcatatgtaataaaaaaggtacatcttgttttataaatactgaatcaaagttattttaaatatgtttttcacagcttgttcggccagtcaccatggtgcctagtgttccaggaatcccaggcccttcctctcctcaaccagtccagtcagaagcaaaaatggtaagcagattttttattgaacatttattgagtctctctcttttttttctttttttttaaattaaggccaccattttataaagttgtgggctatatttcactatagaagaaccagaaatttggaaaagaaaagcttccattagagtagtgactggcttatgatactttaagtataaagggtgagctggaaataaaattctagtgtctgttgcttgtggtttggtctatgcgttaaactcctggtggaggttctaaataaatactacagctgaagttaagcaggcgctctgatagcagtgctgagcacttacacaaagttctctaactagtatgccagttagaaaacatacatgcaattaaaaggaaaaccttatttttcttttgtgctttcaacattatggtatttgtattctttaaaaagttaggccaaaccgggcggtggtggcacgcacctttaatccagcacttgggaggcagaggcaggcggatttctgagttctaggccagcctattctacagagtaagttccagatcagccagggctatacagagaattctatctcgaaaaacaaaaacaaaaaacaaacaaaaaaaggagttggaaagatggttaactggttaaggcactggctctgaataacattaaaagtcccacagtctttacttagtcttaaaatttcaatctctttaaaatatccatctcttttaaaatccaaagtctttttacaattaaaagtctcttaactgtggggttcacaaaaatagtttcttccttcaagagtgaaaatatcagggcacagtcacaatcaaaagcaaaaatcaatctccaaccatccaatgtctgggatccaactcacaatcttctgggcacctccaagggcttgggtcacttctccagccatgccctttgtagcacacgcgtcctcctctaggctccagatgcctgtattccactgctgctgttcttggtggtcatctcatggtactggcatctctaaaacactgcatgaccccttcagtcctgggccctcaattgcaactgaggctgcaccttcaccaatggccttccatggcctctcacagtgccgagcctcagctgctctgcatgacccgaccccttcatgcctttaaagccagtaccccctgggttacccttacatattaccaagccccgctgcagcaggagtacaaccttggctatctctggaacacattctggtatcttgttaatcacagctgattcttcagccccagctaaccagaaccacagaatcttcacaatccaaaatagcaatggccctgaaaagagtttctaattttccctctgaaatttcacaaaccaggcctccatttttctgcactgttgtcaacattatcttccaagctcctacacaacatctcacagagctcttaacagcaaatggatcttctgggccaaagttccaaagtccttccacagtcctccccaaaatatggtcaggttgtcagaggaataccccactctgctggtaccagtttgtcttagtcagggtctctattcctgcacaaacatcaagaaacaagttggggaggaaagggtttattcggcttacacttccatactgctgttcatcaccaaagaagtcaggactggaactcaagcagggcaagggaaaggagctaatgcagaggtcatggagggagaacccaagttaagttcccagttcccacaaggtacctcacaactgtctgtaattccagctccagaagatctaacaccttaacacagacatgcatttagacaaaacatcagaatgcataaaataattaaatcataaaatatttttttaaaaaagagctatagattagaaatcagataagtttttattttaatcctaattctgtatttgccatcctttggttcttttccctcatacaggctaggcaagtactctgctacttagctacatcttaacccccgactttttgttttgttttgagacagggtctcactaagtttccctggctggctttgacctcactctgttgcctatataggctttgaacttgggatcctcttgcctcaacttaggtctgtattactaggcccagcatggcttggacttttctgaaattcagttttcttatctgtaaagtaaaacgattaataagctttcattcctagaattttttcttaattcagatcccataaactgtcttaacattcttgaggggggcataaaaaaatgtctcatatttatctaaatcagtgtgatagacgatctgtagtctattaatgattcagtgataatttttcttaatatcaattaatacatcttagtaaataatagataaccattgctagattctttttttggttttggtttttcaagacagggtttctctgtgtggccttggcagtcctggaactcactttgtagaccaggctggcctcaaactcagaaatccgtctgcctctgcctcccgagtgctgggattaaaggtgtgcaccaccactgcccagcccattgctagattcttatttacttcaattctttgttaagtactatggtaataacaatttgcacacataagaatatttcttgttatacagcttagtttttttatatgctatttgttcattcaaatcatctgaaatttgcacatgataacttttctgtaaaacttgtatattacaaggataaaggatgattgaggttcataaatgatctagatactgattgtgctgagagaagaaatcaaaagctgaagagacaaaagttttcacatttttagaacatttaggtcaatcctgttaaattactgagttaaatcttttgtatttaatgacagaagaccttcactggggatgtattctgtttgtgttctgttatgtgttttctacttaaatatggagtgttaatgatgagaaagtgtgtttaatttgccatgcatgcagaaaataaaagttgtgtagaataggaataaagggtctgttgaggtgcatgtatcaggacatgctcacatgcacacaatcagtgcagcttttatcccacaaactgatccaagaggaacccgacactaaaagaaattcttttggctattagactataattctgtcgtctgttaaagttaacagtaaatcattagttaaaaattgggggaggcagaatgacccactgaaatttaacaatccaattaaatttcttactagaattttcgttggaaaagtaaatatgcttttatttacgtatacccttaattttgattaaatttttttaaaaattatttttaagttttatgtatgctcacatataagtagatgtgtgtgcccatgcacacatgcatgtgtggaggccagagagcatgtcctgtgtctctccaccacacttgtttttagacaagacctctcactagatctggagttgggtgtttgagctagactagtagccaacaagccctggagtccacctattcccacagccccagcctggatttataggcgctggcaagtactttatccaccgaaccatctcgttagtgcattcccccactactcctgctttaattttttttttttagtatttatttagtttttaattgtgtgtatgtgtctgtctgtgtatgtgtttgtgcagatgccttggaggtcagaggcaccagatcccctagagctagagttacagatgctagtgagccacctgatttgggtgctgaaaattatcttatgggaaaacatacattgcatgctcttaattgctgagccatatctctagcctggtttttacatttttattgatggaaatttttgtatatgcaagatatataaaagtgagcaagaaatataatagactagcatgtacctttcacccagcttcatttgttatatactgtcatttaggttttacctgtacctaacctccacttaattgtttcataattttaatgcaaattttgtatatattcaaataagtgacttgtaactacaaagttctgataaatatgtccatttgtataatatatgcttttgttatcatatagaccatgaacatatacccagaaagttttctttgttttttttttttttaaagatttttatttatttatttattatatgtaagtacactgtagctgtcctcagacacttcagaagagagagtcagatctcattacggatggttatgagccaccatgtggttgctgggatttgaactcctgaccttcggaagagcagtcgggtgctcttacccactgagccatctccccagcccccagaaagttttctaattatctctgttttgtggtttggcaccaaaaattctaatttagtataaatagactcaattatttactgtttcgtttgtagctcagcatatatatatatatatatatatatatatatatatatatatatatctgagatttatccatgttgataaacatatcataacttcatcttattgcagagtaatatttcattgtgtgatcgtattacaatttttttgtccattttttcagtgatgtacatttagtttccagtgttgagctattatgagtaaacttttgttgttttcttgtcttgaaatataatctgtagtggtagaaaatgaatccactgcctcacaaatgcttagtgaacaaaatacctgaagaacacaattgctgagtctgatacacatttactctttcctggttttatgtggtgaggatgaccttgaatttctaatcctcatacctctaccacctaagtgttcaatgtgaccataagggcttttctatgcctgcccatgctctgaataatgacacaaaaactggtttttatttatgaatacctaggccttaagctagtctggctcccaactagctcatgacttaattatccatttatattaatctaggttctgccacatgaagagttacctctcctcagtttcacatgtccgtcttcctcctcatctcgatggtgaatcctgccacacctgactttcccagagttcctcgctttgtccaaaagtcccacattactattttgcctgttgctataggctataggctataggccatagactttatattttgaccaatcggaaggtgccttaggcaggcaaggaaaacatatcttcacacagtacatataaacattattccagcactagaaaagcaatcatgttctttatatggtgccaagaatcattcctagaacgtcatgcatgtaaggcaaacactctacaaactgagctccatcccatccatttaaaaaatgtttttctattaatctacagcttgaattttttgagataagttctcaccaggctggcctaaaatgcaagttgacctcaaacttgaagcagtctctacctttgacaccagacactagtgtgagctgctcactttatttttcataaagctatatttatattcttttaagtttttcttctgttctcgcttcttacagtagaagcctatgtcatttattgaaaatgttttactttttactataggcacttatagctatacattttcttgtattcaccaagtttgatttactacattttcatcatgatgaatcttctaattttcactttgatttctttgacaagtggaaatatattatgtaattttcaaatatttggggacctccaacttaattcttactgattcctattctgatcatggtgtgagaacttcccattttgttgtgagaacttcagacatttgatttacagcaatttctgtcctttactatttatgtaacaaacattttataggtactaagacattcatctaggaagatcataaattatgaaaatttttttcttggatatatttctggtaataatgagacagtcaagaggtctgtcttctagaatggaattttgatttgttttcaaaacccagagcattagacttatattctatgaatcagatatttggattttgttgttttgttatattcaggtaagtatttggttggttggttggttggtggttggttgagactgggtttttctgagtacctttagctgtcctggaacttgctctgtacatcaggctgtccttgaactcacagacatctgccttttgcctcctgaacactgggattaaaggtgtgtgttgctactacttagtgatgacttttatgcacaaaaattattgagggactaaaaacaatttatactaagatacagtaaaacagtttgcattattttgaaaacagttctaaaagttctcaaagtaacttccaagcacaattatgtcatgactgcattttaaaatgtaattaatttaaaacttagtgtacttctataaactcagtatgttttactttagttatctgagaaactttcctaagttctctaatttctgctcaacatagcaaggcttgatttttcttaaaaatcctagtatcattttaaagcttaattaaaattgtcttaatgctgacaataaaataatacaactaaatcggtcttaggtctaaacattttaacctgaaatcccacagtagccaaatgtgaagcaaagaaaggaaaaaaattcaaggatagcctggttctcagtgataccaaaaaagtataatttgcctatttgaaatttccggggtgtgtgtgtgtgtgtgtgtgtgtgtgtgtgtgtgtgtgtgtatgtgtgtgtgttttaagatatgggttctctgtgtagccttggctgtcctggaattcagccttggcttgtctaagctggctttcaattcagagatcctcctgcctctgcctcaagagtgctgggattaaaggtgtgtgccaccaagcccttctgaaattaacttttcaaggaccacagaggccagtcaggtgactcaagtgtttgccatcaaaactgataacctgagtttgatccctgagacttacctaggagaaggacagagccagctctgacctccacacatccatatgtacacacaaagacaataagtaaataaatgtaataatttttcttaaagcataaatttcagtctccagtttagtaagcttcttgtcttctagcaaactaaaaatgtgatatagaaataagtagagactcacaaatatctatgtttatctagtacttttaaacactgtagaagaatcctcagaatctatgaatttctacaaaattaaactaggtctcatgaaatttaggcttaagggatttatcactaactccataaaccataaataattatttttatattactcttttaataaatgtaactttcctgaatgtttataatttaaaaagaaaaaaaaaacactccttagagtaagatgttaatcaccttcgagttctgttcaggttttataaagtgagttcttccactgtgttttctttaagacttgtgtgacaaaccaagaaatatctttgcacacagtggtttttctgcagggggtttctactaaaagctgacagagggcatcttggcaaatgttcagaaacctacataaacttagctgggccctgcatggaacctcatgttcagcagaattcttctgacctgtctctgcatgcagagctaatcagcaaacacctaatgagcccacactgaagaaacagaccctctccctaccgacttcattttcatgtgttctctaggggtaggaagacaagacttcatgaggactgatgatactgcaaagactacaataatgataattaacttgctgaatttagaagattatgctgttaattagttgcaaaataaagataagtaatacagcagcagatggtaggataacaccctagaggaggagggttatcactctgatgagcttctatggcacttgtgaaatatggatctgacttgttcatacattgttccgagagcacattatcttttttctttgaactatgatggagtttgttccttttgaattctgacagatgtgataacatttattttcaggtgctacataaacatagaacataaataactttttttttaaagcagacacctctgaatgagtgtgtaaaataggtgggtctgtgcagcaagctatttgtcctttaattggtctaatctgtctcttaaggaaaaaaacttttaagtatagcaatcgaaatttatatcatgaaaagttaactgtaaacacacatttgtttgcttcttaaaaatgttttattctttgaaacagtgaatacctttaccttaaaattaaaactataccctggttttattgcacatattggagattataagaattttaaatcttatttaagtgatcaacctttatttctttagatactcactttttatttacttatattaagcttctcttttgagagaaatagtgatcttagtatgtacttagcagtatgtgaaacttaattgattgcagatatactttgaatacttaatactaggctaaaattctttttgcaaagctcttgtttaaaatactgaattgccagtcaatggaatttctccttttatctctatcctaactcagtcagtgattttttgagaagaaacttcagtcttcaggaagttttttcacttttattatgatgattaatttctgtatctctgcccatcccaaaggtctgtttgtaaatcaaatgtccattatatttagatttgcattaatttttttagcaaaggtatttggcctttaaaatatcaaaacaattgaatatgggtaaattttagatatctctgtcagttggtgtgaaagtttactgactactttcatcaccttgcttaatctatttttttaagcttacatgcacttttgtgtaattttaaaaatcgacagttgagagcaatgttaattaacccttaaatctcttttttgtattctatacccaatggcacactttataagtcagtcccattgtaatcaatgtaacagcatggagcaaacattagtgcttcctcactggatgagtactgtataccctagggcagtcagagaggataatgaatgaatactgatgctgctgtaaatgctcagatggcagtaacttgccctactaaagattattcaagagagtggtgtttatgtacttcacactcccctatgtgtagttactgtatttcattaattctgagttaagctcttcactataaaactttaaatgctcttaaattctatgatgttttctacctaaggactttaaaaatgttttgccattacaaaatctagtagtaagctcaacctctgaatacattatacattttatatccagaaatgaagctccagcataaattagactatttactcatatttatgttttaatgtctaatattctgttgcaaggcataaatctgaagattgaccatctccccagagtcttctctgctctgtttatgtgatgtaacctacactgctgttttccagcttttatctttctgccttgtgttcttgaacattttcctaagtgttactaatttgtaacacttctgtccgttactaatttggttagttatctgctttgttttaatccatccacttagcattatcctgcctgttattagttttatttttgtgtatttgttattaatgttatttcagtttgcttagaagagggaggggaccagtgatcacagctagattcatggtttggacattatttatgtgcagactgttaggccagaccagtgcttccgatgatctccaagtacattggaaaacaaacatttgtataaactcaactctcccaattctttgcccctatgctgagaacctgcagacttctgtagctttatttatttattatttatttatttataagaaataaggaaacctgctaatgaggtagctcagtggataaaggcacctaatactgagcctgaccacttgagtttgatgccaaggatccacttactagaaagagagagccaattcccacaagtggtcttctgaccttcatctgtgctccgatggtatggatgtgcatacacacaaaataaataaacataattttaataataaaagaaataaggaaataataatttaagaaatccagttgtaggtcagctaattttgcatattataattaatttttgcttcaattcctacaagtaaattatcactaattttctaattgaagatatttaagacttaaaagattgatgatttgcataaggttgtagtttgagggagttaaatataaatttgtggttttgttgtataatacattattatatgtgctgaccaatgaagatgctggaaccttgcaacattgtgcttttgacattcattaaatcagccaggaaagagaaagaaacacacttgatctgggtgatgtggttcagcagttggcagtgttaatgcttgtcattctcagtccccaatgtttttatttgaataattaaactatgtagtctcaggtgatcttttctgttctctgtgttttctagtgatactgaggacggtataacatggtgtactaggtctgttgagacctagtaattgaacttagtggctatatgaccttgagtcaaatgatggttagttatctaatctgtaaaagtgggactggtatccaactaaagaggaaatgcctactaaaatacatatataatgatctcaggtgaagtctggtgacattttatatatctgttattatggattatggtccatatataacgaagaaattgctaagttttggatctttgtagaattttataagttgtgttagttggaaaaaatgaaaacaattcttgaattatttaggaacctctttgaaaagctctccttgagcatctatgcctggatcctcagagagagcactgagtaatagttgccaatgatctgtttaacatttaacatcctatacagttatatttacatctagcaagtttgtaaagcactagatcaactacatgactcttacacacagatccacatgtatataaagaactctttttcttcaaatacatgcattaagtttcttaagaaaaatgtagaaactgaggtggggctcagtggtagaatggacatgtagcattcataaagccctggatttattttttggggggaggaagggagtgagggatagtaaaaatatctctgattcagatatttgaggcttatctagattgcagttactgagaacaatgtcagcaaaaatggctccaagtctctgaggtcaccatatatatataatcatgtttctattaatcattgaactagtttgttttaaaggatacagataacccttgctttaaagagcttattatctgattagtagataaaatgatggcatgcaactatagaataaacttcattcaaatttcattcattcattcattcattggtggtgtgtatgctcgcgtgcgtgtgtgtgtgtgtgtgtgtgtgtgtgtgtgtgtgtgtgtgtgtgaagcgagggaggccttgaaatttaactgtctctgactctccctagtgatcaaaggcatgtactacctagcctagttcacgttgtatctttataaagaatgtatcaataatactggatttgtcatactatcaatgttcatgaggtctaattcagttactggcaaaataaagtagaaggaaagattttccagagttagggagatgacttagtggttaagaacacttgcttctcttttagaggacctagattggtttccatcaaccacatggcagcttacaactagcctgtaactccattacaggggatccaatgccctcttctgtccttcatgagtactaggcacacaacatcatgtacatacatacaggcatgtgtgcacacacacacacataaataaatcctaaaggatagagggagtggtcttcctagtagaaaagaggaagaccatagatttaaatttttaagttcttcagtatgacagattctaatggtagcctaaaaaatgcggcatcaaattgctatgatagctcatctggttaaagtgttttcaactttggaatctatggtgaaaggaggaaacctgttccttctgagttatatgacaagtacacacacacaaaataaataaaataagttttaaagtggaacatgaagttatcatacaagtagacattaaaaacatgaaagtagaggtcagataaagccaagtcgaatctgggcaaagcctgataagaggtatgggcttagggtacgcatcaaaacatacatagtagttaacattacatcttttagtttaacaaggctagctatgttcagatactgtattttcattttttaggtcttcttagaaataagtacacaaagtataaagtcctacagttgtaccagatagcgcatcggagaagctttccaaacctcaggttgtcatgttgatgtttactgtaatccagtgaaataaagtaaatgaaagcaatggaaaggccaatgtacttagtgttccttggcaagcactgtctttgggttaaacaaagagtactttgagaattaaattgtatataacatagggaccttttttttttttaatggcgtttgcatttcagagattaaaagctgctttgacccagcaacaccctccagttaccaatggtgatactgtaaaaggccatggcagtggattggttaggactcagtcagaagagtctcgcccacagtccttgcagcagccagccacctccactacagaaactccggtatgtgtgttgctttcattattcatcactctggtcatccttaagaagaaaatacagtgtagcttatgtgacttctttatataattataacctataggcttatagagtataaatatagccatcttaatttgatatttgttttgtgttgataaggaataatttttcaagtttatcctttggaacccatgctagtagtcagaagttgttgttcctcagcatcacttccaagagctttgtttggttttgttttgtctcccacactgccatattttatggcacggtttgggatttgtaagactaagagggtacctaacattgggcagtctgattaatgaataagatttgtcctgggcttaataaagataaccaaactgatccattaatgaaaaccaaggcccctacggggctctccttacctgaaaaataaatattatagaagtaactattttagtgcaactggcatatttaataaatttttcttcaaaacaaaattgaaaaaagttataaactttttttttttttggttttttgagacagggtagccctggctgtcctggaactcactttatagaccaggctggcctcgaactcataaatctacctgcctctgccttccaagtgctgggattaaaggcgtgcaccaccacaccgggctaaaaagttataaacttatagagattagttttcaaagaattaatgatataaaatcagttaaaaataacatttgtaaaaatagtttatcaaaatacacatactcttttttccttttattgtttagctattatttctctattttttccccatctgctgcagaaggaagcttgtctgataatgactgaaaaaggcatctatgaatatagtagaatttctttaacaagacactaaaaatacacatattttatggaagacattcactgtttattgcattgatcatttcactatcacacagttatttaaaagggattcagccatagggtgaattttgttccagagtgctgatgtcattaaggcatatatcatgaagttagcaaccctcccttttaatactgtgtcttgcacctgtcaatttactcattccacactcacaggcaagctctctccatattgtcataggcttctccagctcacacaactcctcagacccaaaatacaagtggccgtcgaagaagagcagctaatgaagatcctgatgagaaaaggaggaagtttctagaacgaaatagagcagcagcttcaagatgccgacaaaaaaggaaagtgtgggttcagtccttagagaagaaagcagaagacttgagttcactaaatggccagctgcaggtatgggcacaagcagtttgcttctatttattagttagcaacataggtgttgcttggtttgttggtttggtttggtttggtttggtttggttttttgtgtgtagctttgcaagacagggtttctctgtgtagccctggttgtcctggaactcactctgtagactaggctggcctcgaactcagagattctcctgcctctgcctcctgaatgctgggattaaaggtgtgcaccactgctgtctgactaggaacatagttttttctagatgatcctgcaagtattttaggacatgatatatacgacacatatgtagactctgtagtaagccatggtttcctaaaccttgtgaattctgacctgaagtgataccaaactttcaaccctgacacaatgaagaaattttatgtgtaactgtttagttgtgtggtacagaaatactgtaataaccttgcttgaactttataaagttcaaaactttttttaaaaatcgctattttttgtttatttgttctgtttatttgtcattttacctttatattaaccataaagttgttccaatggcagttttttactttctttctttgaattacaattctgttgttctttcttaagtaactagcacatgtgaaaggagccagattgacagctttggaaactgaaggattctaattatccacaaaataggtaatattcggccagtggcataacaaattatttcatactgccctgccgatgtgcctcaaatacatttcttaggatctcatgtgttataaagattttaaggctccattcaagtcttgggtaagatttttaataaaagtattaaggtagcatcaaatgtgtttctttccttccttctctccttctttctttcctccttcctttatctctttcattctgttttcatcattttgcttttgacattgtgaatattctccagtagtagcttttgaactaacaagtaactagaaattaataaattgtagttgtttattaatataggtcaagtttttgtgtgtttaacaacaggactagaagttgaaattggggcttcagtggtctaccactagtgcctcctttagtaattttgagttttagcatagggagctaaattgcccaaacttgcttcaaactcaagatcttccggtctcagctttccaagtagctggtattgtgaacatatgagtagatcaatcttttgaattacccatttccagtgaaaacaaaactcagttattatgaatatatgctgtgcgcctagattaggcagatctaccactaccctccatcttccacgtctatgagactccttagaacttgagatttctccaggccatgtgcttctgctctacttttcttcttcctcctcctctgcgtcctctccctcttccattttcttcttctttttctcctcaccttcccttttatctgcccaaccatcaactctcctttattttacaaattaaggcgggaagcaggtttacaggaaatcacctgagtgctgacctgtttcttgttcttagcccctctacaggagaatgggattaacatcaaatataattacccccagggctatccacaacagggcacttgtttcttaaatctatcttaaaagtgtcacaaataaaattgttaaaatacttagaaagctctttttaacatcctgtatcgcacttacccaaactaaattttatagcaagttttcatatgtgagacagacattcttagaagcctttgttgcattttgcatattgttttggttattttaagacgaactgattgcctcttacaaaacttatttttagccatctaacttataatatgaaaaaatgattattcatgacttactaaacaacataaacttcaaatatatactagaatttagttacaaattttatcgttatcatcctaacaaatgaatttactaaaaaacttagaataaaattcatttctcatttaagtgaaatgaaacattgtacatatactgatttatgtgtagaccatgaaaactattctttgcaaacctgatagaatatcaattactattacttacatatcaacaaagtgatttaaatgtttctttttattgttcttaactaataaaacttttttaaaaattttttgaaattataatttatttatactttgctctcccttttctccctccaaatccagaataatgccctttccaactctccttcaaattcatgaccttttttttgtttcaacaaattactacttcatgcatatatgtatatgcatagatgttcctaaatataacctattgagtctgtctaatactacctgtatgtatgtttcgagactgactttttttttttttttttggtttttcgagacaagagtttctctgtatagccctggctgtcctggaactcactttgtagatcaggctggcctcgaactcagaaatacgcctgcctctgcctctgcctctgcctcccgagtgctgggattaaaggcgtgcgctaccacacccagctgagactgactctttgacactagacaaccagttggcatattcttccctgaggaacaccatctctcccattcccagtttacctcagttacctgtagttcttggtgtatatagggttgtggccttggggtcaagccatctagtttggcatgttcattggtgtcattcctgttcagctcacatttggacaaaatcatgttggtgagactttatggataagagaaggaattagtagagtacaggtgaactatctgatcagggaaatgaaaaagagaagggggctccttaaggagaggcagagaggttgatacagaagaacgggtggagaggaggaggggaaaggaaaaagcagtgtacaagctgtctgatggggaagtgggaaagggatgctctttagtaaaggggaggcaggtctatacaaaagaagaaaggtgggtaaaataacaaagatgtctgaaaaagccacaactggtcatactattatctatttccaaaatttaacttaaaaaactataatattccatgcatgaatatacatacacttttaatgaacctttctcatctgggcagacgaagcttcttccaagagccaaagaccacctaacaaaacctccaatgccagacatgagatactctctttttagttgttgtccaagagactcacaaaacatacaatctattgctgttgcccttgataagcccccagaggtagaaggtaagtttgtattgctaagacaccgtgcactttagaagtagggctggagagatggctgagtggttaagagcactgactgctgctgttccagaagtcctcagttcacttcccagcaaccacatagtggctcacaaccatctgtaatgagatctaatgccctcttctggtgtgtctgaagacagctacagtgtgtgtgtgtgtgtgtgtgtgtgtgtgtgtttgtgtgtgtgtgtgtgtatacatttacacacacacacaatacataattcataaaaacaaacaaacaaaaaaaagaagtaaggcccagagatccctcagcttggactgacctgtgccccttccctgaagactagctttcatatcagaaatcgccatgcatgctgccaaaggaaggaggcaaccaacaatttacccagctgtgatacctgtgtaccacagcatgacacaataaccctgatcatgcagtagtgacatgcatactttggtagtaaccaactactctctaatttgacttaagacttaagagggagatcaagaggtactggcaacctagctcggtgctagtgaattcatggttattggagagaattctacaaccacctatacttttttttttatgtgcattggtgttttgcctgcatatattgtctatgagagagtgttagatcaccctggacttggagttacatgcagttgtgagctgctatgtggatgctgagaattgaaccctcgtcctctgaaagagcaaccagtgctcttaactactaagccatctctccagctcttaccatcaattttgaagtacagtagtctaaggattctttaacctcttactgattagggatatgctagcataaattgtgttctgtgctttaatacagtgttgctagttttgttgggctgtagaaaactatttgtacttgattttttagattgcttgacttttttttttttcgtggttttgtctttaggaaggcctaaacactaatttgctaaaagcacattcagctttctagtttaagaggtagggtagaggttgggtttggtgatgcacactgaattataatcccagcacttgggtctagggcaggaggattgctacagtttagaggcaaacctgggatgcactgataccctgtctcaaaaagtgagatgtcagtagactgtgtgcctacaattttatgtatgccagcttcttaaatatttgcatttgttaatactttgggtttcatgggtgaaacctagatggttatagttaatgtaaatctaaatgagaagaaatattcatagtgacttttttaatgttactaatttattaggtccatagtatttcttaactcatgaatgttggtaaaatagtcattctattgtaaggaataagacagagcagcactgatattaaaatttagatgcctatatcacaggcaacaaacccatttaacagcactgtcactggttctggtgcctagcacagtgctcagcaataagtataaagacccgtgagtcttgaataagtgtaatttctttttttaaagtatgaacttgcatgattacatttccaggatacatttttaatttttaaaaggtgaatggaatcaatgaaaattcattgattattgatatttttaagttttcaaataatcagaagagcatatgacatatgtacaaaagagctcttcagtgagtaacctataatgcatacgattcccgtggcaagtagtgagcaaggctacccagttatggtattcatatgattttagtttttaaactaaaagacttacatagatgcttaagcaaaccagtgtatactgattaaatttatttaaacagcatatgtcccttattgttctgccaaagagatccagttttcatcctgtaagccttgctttctttaaatagtaaaatatgtgtctatctaatgctgctaaagcatgtgagttgtttcttctccagagcgaagtcaccctgctgagaaatgaagtggcccagctgaaacagcttcttctggctcataaagattgccctgtaactgccatgcagaagaagtctggctatcatagtgagtaatgttccattacctacagctgtaggctacatcagtgacagactgccagagtgagctgagctaccagtaaaaagaaaaatgtgcaagctgcagttctagtacataagattaaatatcagaatttatgcaagattattatagtctgggataggaagaaaagttttcctatttctagctttttttttttttctaggcattagtatggctcacaggttggtagctaaacgtattttaagtgcactgtttactgtcagtggtcattcatctcacagggtaccatgttgtcttgcattaccagagccagctcttcccttcctggccccatttagtactgaggagaactttttaatcaatatcttcatccaaccatatactttccatttctagtatcatatcctttttagataatgtcagcattggactgtatttgtgtggttttgagcttttatgtggtattgtcacagccataaaaatgctaaagcagaactgtattgaaatgatttgcttataaattcctttgtaaatgtgttcctctcctaaaatgaggttcttctgtgagcttggtagaggttagttgtgctttttcattctctgatgtccttcttgacaagatgcacagtttgggaaccagctgttactcctgagtaaatggccaagtttgtcggtcacacacaaattcataacaaataaaagagctggggatgcattaggctacattcataatacataacccacggccttgttttcttttttatgatttagtgatatttcaggatatttgtaaatgtgaagattgtttcaaccatatgtaaccacttcattttaatttgccaatgtcagtaattcaaaagaaggaaacattttgtgttagatgcaaacagctcctcaggtacttacaataaaacttaatggccaccatctttacttgtagtctattgtaagcagtttcatcaaaatgagcaatattttttaatttaaaaaattctgtagacatagctattctcaattgccatatctatttagaatacttatttttgtctgttttgagtatataagtctctgttatttgatatctagtcattttgacaggacagtgaaacacactgtggaataaattggaaccatacagaaatatgcttgggatttatatatcagtgattgctgtagggattagtccactatggttcccatctgacttagcttaatttcctgtagatgctactgagttcaacattatgcaagaaagctgcactggattgtgatggcttaaaaggaaatatgtgatgattttgttaaaattagaaaaaaattaactcttacattgtatctaattgacaataatctacaattttaaaatcttattactaattggataatcctaacttttaattattatgtagatattatatgcaaaccagtgattaatgattgttttatataattttaagcatacagaagtgttaatgtatctgttgttgaataggttgaaaacctacattcataacttcttagtaaacttctcttatgaaaatgcaagaaagagatttttgtttggaaagtagttagttacatttggttttctccttccaccttctgaaaacagggtatcttgtcttgtaatgtgtactcacgcatcagagagggagagggttgaattctcaaacattggaagtgctttaagctaaaagtgcttcttttgagtgcagcatgtgttttctagtgttttaattattctggtcattttctcccctcagctacaagaactagacatatgttcaaatataactcattgtaaagttattttatgtacgtgaattataattacctaatttataactgataatttgtactgccttctgtgagtctaagcactccttctgtgtttcattgtgaatcatgctctcctatgtatttgtatcttgtcttatactaccagccagccttcctgtctgatgtttttagagaacctaacaattcagacaaaggttagctgcttgttttgctgaggaatagtagcaaaataacagctctttagtatcctctccatttgaattgtcattggcattgttttcttcaaatatgattgttacattggcaaaagagtagtattataaggatgttacaatattcattgttgctcaaaatattttttctgattcttatattctttttagatttctgattgagattttatttaagttgtagtttgaggtcagatttgattcagggaagcattttttgctcttagagcacattatggaaaagatagaatttcatctcactaatctattttaaagtctggttttcaaaaatacatggatttgaggctaatgtataaattctgtaagaactactgtatttcagaaattctcaaaataaggaattttatttatactcattatagttgccaagtattttcccctccacaagatacccactgcccagcctctacataacagatcatggcgtctgcccatcagtaaatagactggtcggtatcctcacattactagaaagcctgcatactttctaaacattattaattttaattactttttatttttaaataaaacttatttttaatgccaagtgaaacaagtcacatggaaaagaaagcattcaagttggacatgtcattacatacctgtaatcccagcacccaggaggctgaggcagatgattggccatgagtttaaggtcctcctgtgctacacattaagaccctgtttcaaaacctaaaagaagaaagaaaaataagaatgtctagtataatggtattttatgttgtgtaacagcagacaagactaagctgtatcatttagagattacataccattttgatctaaatctaaagaaatatccaaagagtaactgcatgtgaaaaaggaaaaaaaacagtatcattgacagtgttctcaatgaatatgaatgctgggaccacattgtgtgtgttgtcatggtgcctagaacttgcagatttaacaaatatttatctctgtggagtattaaatttttttaccaaataaaattctattctactgaaataaagatataagagattttgttgttcaggtctaaatattgtaaatttgtttccataaatatttagaatccccttttctgaaggtctcttcagtttcaatatcttaagttttgtatggatatatatttgaatagctctagcagctggtgacatttagtctttgaatattacttctcatgtgtatgcatcattagactctggtgtcataatcatccatgactgccgtagatggaaattcaggcagaaaaaaatacagttctggcaaatgcagagggaatcattgaaaatataatttgtatatatgattcattttgtttatgcatgtggttataaattattttttatattttaataagggtgacaggtaggcaaatagagtagcttttgtaaatgtgttgctcagtatattcttgagcaactatctgtgaacagctatattccaaaggcctacctcactttgttgttgtattaaggcctgatcttgctctgtagctcacactagcctaaaactctaaatagcccagattgtcctcaaatttgcagtctctctgtctctgcctctggagagtcctgagattgtggatgtgtactgccacctcatcctgcctctttttttttgttggtttttgtgtgtgcttttcttttttggcagggtctcattatatagcccagattggccttgaacttagagatctacctgcttctacccgttgagtgctgggattaaaggcttacaccaacacatctggctctgcctcattttctttgaccctatttagcaagtatgcacaccctcatgaccccatggtacacacctgtgacttcatttagcctatctcagacacagttggctacttcctgactggagccactattcagtttatttcatttgtacagcttgtcctgagtaatcagtgctttaaaacacctttcagctttgtgtatggattcacctcaataaggctttttggtcaatacttgtgtttttctttttaccactcagctgctgataaagatgacagttcagaagacctttctgtgccaagcagtccacatacagaagcgatccagcacagctctgtcagcacatccaatggagtcagttcaacatcaaaagcagaagctgtagccacttcagtcctcacccagatggcggaccagagcacggagcctgcactttcacagattgtcatggctcctccctcccaggcacagccctcaggaagttgattaaaacctgcagtgcaacagttttagatactgattagtgacttcaaagggaaatcaaggaaagaccagtttgcatttatgcgaaatctgtggttgtaaatttttttttttttacttgaagttaaatttgtctctggagttggtatagcagcagttgatgatcagactgaatatgtttttagtctctggaagactgattttccttttttatacatattgttaagatttattaattttcctgtgctcaatgtgtaaattgtatcataactcattgtggttgatttcactttgatttagtggcatcttaataaatgggggtgttactgaatcactcttcccacttccatttctttgcccaccccttcaccctgagatgtgatggtagtcttgttatcatttataccaaagttctgcagagtccctattgtctgtgtaagatggacaaagttgtaagacactagggaagagaaagaaagacggaaagttccttttaatctttttgccttttattttgcacattatgcaaaaggaagaatattagaaacacttttttttaagtgagtgaaagtatggtaagacggttagtgctttgtgcacttcttagactaatcaaggtcatccatcgccctgcaatgtttttaagattaagtaaacaaaaattttggaatcttgagcatttcaaaaaatgacttgattttttaagtcttaaattcagtattttaaacctgtgttcttgaggctgaaaactatgaaattatataatgtatgatacagggttatcagatagtaatttttaaaatttgctcttgtcatttgggatttgttttgtttgggattttgttgtgtgtgatttgttttgttttgttttgcagatttcaggtaacaaagtgagacgcttatgcataaagaagtgtgatgtggttgccagaaaagcctaaaattatgacttagaaacgttaagactgtttcccccattgtcgtacttgtacttgcgagctaacttgtacttattcttgtgaaagcactgtcatcttttagtagccaattttgataatgtttctcgtggaaaaaaatcagtatctatctttagaacaatgtaattataacgtgggaatgtgagtgagagaatgagtatgtgtatgtgtgtgtgtgtgtgtgtgtgtgtgtgtgtgtgtgtgtgtgtgtgcgcgcgcgcgcgtgtgtgtgcatcttccactagtttatgccagcgatattgcttgaatgtttaacgatgccttcagtgtgatgctggcaatagatgactgcagtttcagatgccattactgtgcaggcttggataactaacattccatgatgtagcttgttctgatgaaatgattgtagttacactttgctcattctccagtcatctgtggaatactgagttttctaatgtgccattatctatttttattctgcagttacgttaaaaatacagtacaatattttaaatagactaaattgttaaacataaaaattaaaaaaaaagtagtagatgtgtgtaagaaaactttgtaaaatagttatgagtcctacccagtagcaacttctggcgttcaagcaggattccattctgtaaatacctgtaatgtgtttataataagttgtgtagtctgttctgcatccatactacattattgctatggtctcagtgtcatctcttaaagagattgacgtttccaaagccgtatggaatgcccttgagagttcaggggaacacccaccccacctgcctcctaagttccaatctgggaaacatgcaaattatataaatgacatttcacgacttttgagtatgaagataataggaattttattacatggcttattaaaaatgagagcattttggttgctgattctactttgtatctattactttcacctgatctcatatttaatcagtttaaatcacaattttgtcatagttatgctaaggagttgatctcaaaggcacaaaacatgaattccccatgcaagctttttgttgtagatggataaggttggtcagagcctccatgtgtcaccctctgcaccctctcaacatttttctttcatcttctgatttgtgcaagcttcagttctttggtaacagatccttgcaattgtaaagtagaagtgcatagatgtgagaagtcatgtgacggggaatgaccttccacggtggacagcgctcgttttaaatcagtctgtactcagcaaataaaaatcaatattagttgtataaacacacaaaaattacattttgaattccaggatgtcacactacttctgtacctagcattttgagtccttatatttgcaatgttacacaaactgtactattttcttttatgtacagtttgcatgactaaaccatcagagaataaattctatctttaaattatgtttataatttgcttgtttttaatctgtcttttacaaaataatacctgataattttcttcctcacttcagagcatttaatttcctgagaagagcatgagattctttccatttctgtacactccactccttagaaagcccttaaccaccaacaggcattgcttctgttttctgtttactttaggttccattgacatacagtgagtgaccttttcattttatgtgtcctatctgggacaccactcagacgttaaccatgattaccctagaaaatatcttataactcatgtccaccactgaattaaccttccctcgcctgccggtcttccacagtctttcatcagttggtgacagctgcttaagccaaacaactatgccactcttcattctctcagcctgtgtacacccagcctatcaagaaatgtgatttgctctccctaaataatccaaagtgcagccacttcaagatatttacagtttgagccctgacccatgctctcacatctcttgccttctatccctgcttaccatagcatctctagtagagcagccagcatggtcctctcaaaatttgtcacagacatcatatatcctagattggattcccttttcactcagagcttaagcccccaaaaactgctagactgttccccagttatgtcctgttacctcagctgacctctttttttttcccccacaaggttctcaatgagtaaatatctagtgctcctaggtgtcgatgttgtaagcattcttaaaattgtccaatatcccaatccagatttctgcctctctagaatttgcattttaaagagggtgcaggaaattattggggaacagtaaattatgaggtaagtacagagtgaaagcttgggccaattttctaggctgcattttgagtggcattttaataatagcagtacaactgaattcagtgcaggaaatgcagtgaattgttgagctagttcaaatgtacccactctctcagtatgattacgacatgcctcacagtgacgtgcagatgtactccatacctgattttattgcaatttaaaggtactgcattttccagttgaaggctgtaactcttttaggcaaatacagtcaccagttttctttttaaatttttactgaaaacatttttttcataaaatatattctaattgcctcccttagcccctccaagaccctcctccctaccttctcacccactcaaatccacactctttctatcattagaaaatattaatgataaaaacaaagcaaaatatgacaaaacaaacagaaaaaaaggagccaaaagaaaaagcacaagaatcataaagtgaacccatacattaacacagagaaatcccataagcaaatggagatcataatcatataagcaaaagactagtaaggtttaaaaaaaaaaaaagtggactggagagatggctcagtggttaagagcactgactgctcttccagaggtcctgagctcaattccctgcagccacatggtggctcacagccatctttaatgtgatctgaagacagtgacagtggcacaaggtgttcatataaattaaataagcctttttttaaaaaaagaaaaagaaaaggcccagacagggcattctgagacaaaaatcttcccaaaacaccattgagttgatttttttgttagccatccactgctgagcatgggctgtgccattaagctatactgttttttttttattagtatttttactaatatgctagaggttgttagaattttaaagaatgaaacactttaatgtgtgcatgttttattagacacaatgcctctgcatgttaacaggcttgtctagcagacccaacttttccatgtgaaggacagacatagaacgtggtgttgctgtactgcagtgatccggaatctccaagatgtgtttggttttctctaataagattttctccaattgtcagcaaataagggatgttttgaaatttcaaattcatattttcttgacttattcccaaagaaagataattgctagtcctatatctgtaaagcttaatttgatgcctgatgctttgtgaaaatagaggaaaatcccttgtactcctagggtttctcaactttggaaaatgtgcatgcaaacaacacacacagtacctagagaacatagttacctaaaacagtacttcaaagatactttgaagaaataatttttaagtctgacatttctaactgacacagagataaaccgttttttggctgatggttgtgaaaaggcatgtctttaaatacaaatgaactttccctgtaactactccatatgcttgtgtgtgtgcttttaatgtgcagcaggacttcccagtagccagtgctgtaagctgagatgtgggtgtccagagagaattagtgtcctgtgtagggaaggaaatggagaatagactcctttctaaagaaatgtttcaacttggggtaaatgtagtatgcaaattatatctactgccccaaaatgtgcatccagtggaaatgtcatcagtggttggggcctggttcacgcgttttcaggttcttggccttttatccaaataaaaaataagggttcatactgatttgcaaaagaagcaaggggatacactgtcaagattgatagcaggccacaggggttcagatattctctttgagatcttagggaaggagaggctgttttctaatagaagagctatgatttgaatgattttctattttgattggtgggtgagtttatataatttactgcacttggctcttcccataatgcatccaattttatttatatgtacaactgattattcataggcataatatgctgaaatgttactagagaacatagttttaccttactgtgcacatccccataaccagctcaagtcagaagggctctccttcatatttagatacattggtaatacacttgaaacagtcaatttgttaccaaaagtaaggaaatctacaccattatttgaggtggtaagacatgtagcccaatgcaggtgtacagtagagggtgtgatggtttgcataggatgtccccatattctgtgacatttaaatctttctcttcagtaagtggccctgtttggggaggcttatgaggtgtggccttgctgaaggaagtatgtcactaggagcaaattttttgttttttgaaacaggatctcactatgtacactatgctggcttcaaattcacagagagctgcctgcctctatttcctaagtgctgggggttgaaggcatgtgccaccacattaactttagtgattttaaaaacttaaagacttgtgcttcttcaaggtcactctgctttctatttgtggtctgaagtgtgagttctcagctgtttctgctgctatgtttcccggctgtgatgatactggacttaccctatggaaccataagcccccaaaagcccttccttctataaattagaagtgttttagccgggcgtggtggcgcatgcctttaatcccagcactcaggaggcagaggcaggcggatttctgagttcgaggccagcctggtctacaaagtgagttccaggacagccagggctacacagagaaatcctgtctcaaacaacaacaacaacaaaagtgttttatcacagcaatagaaaggttctaatacagaaggattcctaagttgtcaggtgaattgtttggagaaattgtgtgcataaaacagaaagaaaggacggaggctggaaagtgcatttaccagaggaggtggtgtgcctaaccccaaaacaattcgaggtcccaaaccaaactgcctgcctgcttcagaaatgtttccaaaactagctacttgaatataacaaacaccatgtggcactggaacctacaattaacgaaaaaatacacattgccctatcccataatagcagtctagagcactatctcaaaggtcaatttatttttagtgaagcataccaacaaacaagctgcaaagactttgtcgtgtaataggccaaacacttgcatcgtttttgcctatagctgacagaagtggctttctgagtgtattgctctcatctccatcacaccatccttggtaggccctcaagaccacgccttacctctgttttgcattagattttacatttaaggcaccaatcctgagatagaactttgaaggtttgtctttgtggttttaatatgcatttaaggatcattcctcaatgattttttcctggaagtacttctgactctaaatgtcataacgatgtcaagaattggcttattttcttcacttaacaattgttttttgtgaattttgcttcctgtgaaattactcaaatgaggatgtttccccaaatgagctcctgttaaagctacttttgcttactgtttttttaaaggcatgttaattacaaaggtgctcttttccaaagtctgaaacaaaaattaagcaattcctctgtctttggccttctattgctatgatgaaacactaaccaaattcaacttgggaaagaaggatttattttatctaacagcttgtaatccatcatacagggctgctggggcaagaactgatgcagaaaccataaaggagtgatgctcactgctttgtcacccatgacttgctcagcctttttttttttttttttttttttgggtttggtttttcgagacagggtttctctgtatagccctggctgacttggaactcactttgtagaccaggctggcctcgaactcagaaatccacttgcctctacctcccgagtgctgggattaaaggcgtgtgtgccaccatgcccgcctcagccgcctttcttatggcttgatgaccagcccatgggtgaaaccacccacagtgatccctcccccatcattgtcaatcaagacaatacaccacagtcttgcccacaggccaatctggtgagggttttttctcagttgacgttccctcttcttaaatgactctagcttgtttcaatttgatgtaaaactagccagtgtgtccttattcggtatggatgacttagcagagtttaagaggatagcactgtccattaggagttttcataatgaataacatgcattctgtgatgtttatgaagaaataaactgttactgtcttcagaaataaattctgattattacccatcaatatagtgtgatctttagtttggtttccattctttctcattttttttaatctgtaatttaaatatgtaagtaggtagttcattttggggagctgcatttgttaaaatttattaccatagggtctaattaccatcaattgcaataaagagttatgtatcacagcatagttaagattattcgacatatacttactatcctatcccagtgtctacattttgttacacatcaatttattcagccagtacttttgaagctgacttctagcatcatggatggggcagtctgctaagcagacaaccatgtaaaatagaccaacataagcaaagaacctcagaccatttcatggcactgaagttcaactcaaataaaactggctgcagttctttacggggtaaaatgtatttgtgacaacattttgaaaatcagatgtgttccattgtttttattgctcaatgtcttctttacctgttgaggctttctatgtgccttaagagcactgtgcagtctttgaaaatggtattgatcataattcaacaatttgaataaaatagatttgtatgtctgctttggctatctagaagtacattggcatgtaaaattcaaatcataatttaaacttttcagcatcgtgcttgaaattctcctccctctcacacacactggaattcttaacacattaaaaaaagactgatgtgttttacagacaaaagcccttctgagttcactacaggaatggaaaaggtgactttggttagtaagggcctatgaagtgtgtgctttgtacttaagtgttgaatgttgacaggactgccaaataaataaagacttacaagcaggtaggatccatttgaaagacaacatgcttgttatatatctatcaagagaatatttacatcctaacaactaacagaaacaatttggtttttgaaatgatctcttatgacccaaactggtcttgaactcactacatcgctgaggatgacctggaatgcctgatccttctgcctcacagtgaaagtgctagtgtagatgggtatgcaccaccagactgctgtatctgcagcgttgggaatcaaatgcagccctgtgcgtgctaagcgagcactctgccaacatgagctacagccccagacagaaaatgggttttctgaaattcaaaaagtaagggagaagccacattcaatgtgagcctcacttgaaactatggatgggatcaggacaaaggaagtaaacaaaggtaaaagtttcaacaaacaaatgtgccacgttcatgctacagtggggagattggaagaagccaattggaagtgagaaattgtagcaaggcaactccttcagagaacacagggactcttaaagccaatagaaaatcttttttcacaggcccagagggctacacaagaaacttgcccaaactatgtagccgcgagttgtaacagattgtcttagggttttactattgtgaatagacaccatgatcacgggcaactcttataaaggacaatatttaactgaggctggcttacagactcagaggttctgttcattatcatcaggttgggagcatgacagcatccaggcaggcatggtgcaggcagagctgagagttctactccttcatctgaaggctgctagtggaagactgacctccaggcagctaggatgagtgtcttataacccacaccctcagtgacacacctactccaacagggccacaccttctagtcgtgccactctcttagctgagcatatataaaccatcacactgatcttggcttttttctttttcttatttatttatttatgtatttatttacttatacagttaaaaatatggcattgttttatttttgccagcaggagtgggttcatatcgtggtaggtgtgctgggctcagggcaaatatggatggggtcagtggaggtgatgatttggtggctggaaggcaatgaagatgattagataggcttctgggacgtttggaggaaggaatcacagcaagctatagctaagctgccaatgaggttgagaaagtcttggaaatctagctgcccatcacagttgaggtccagcttcttcatcatgtggtcaaggacactggggtccttctggttctttgtaaaggcagccagctctgtgttcatgaaggaaaggaattcagctttggagagttgagagctgtttctttgcaaagatgcctacagagactgagagatgcatcgaatccctgattgctgttttccaaaagtacagcgggaagggtggaaacagctcttctgttgctcttcttattgttaactgttcttgctaattgaagtatgtcaactgggatatgtttttgtgtgtgtgtgtgtataaaaagccaagatcagactcctcttctcccagccaccatcagccacagtcacagccagacctcgctcctcacacctttaatcccagcactcaggaggcagaggcaggcggatttctgagttcgaggccagcctggcctacagagtgagttccaggacagccagggctacacaaagaaaccctgtctcgaaaaacaaaacaaaacaaaaaaattatagtctaaaatagtttaaacatttctcttttttttttcatttttatcagcctttcttggtaataataaattcaagaaattataaagacaaccaagaaacatcataagtagaagaaaagataatgaaaagtaacagtgaagatttttttaaagatttatttatttttatgtatatgagtacactgtagctgtacagatggttgtgagccttcatgtggttgttgggaattgtgttcaggacctttgctcactcccgttggcctctctcgctcagtcccgttggcctctctcactcagtccctgtttgctctggcccaaagatttatctattattatacataagtacactgtagctgtcttcagacacaccagaagacggcatcagatcttgttatggatggttgtgagctaccatgtggttgctgggatttgaactgaggacttttggaagagcagtcagtgctcttacccactgagccatctcgccagtccgaagattggttatttttaaaataaagatggctggatatgctgaatcgcatggacacataaaggacactggctgattttgtgatacggttgattctggttttgttccccctgcccccaagcatcacaaaatgaaatagtttaatctcatggaattccagaagggacgcaggttggactgtcacaggggctccgctcagagatggtgggcactggggagctagggaattgaacaacataagagggcagaatgggaacctcgtttggtagagaagtaaaccaggagtcaataaagatggctgtagtctgggtgttatgatgcagggacccagctctgtgccacccatgttccagttatgcctcaacctcacaaactgctgagtgtgctcagaagtcacggggcaaaggagaaggtatggagactccctttgcggcggcctgtgggctagccaagaagatccaggcccaggagcagcagatggcagcagagtcaagtggtggaaggagtgggaagatttttaaaaaaaaaccaaaaaaacgtttttttgggagccgaagtgatgactcagcagctaagagcccttgctcgcgcagaggacccaggttcaattcccagcacccacatgacagcttactgttacactgtgtctgttggcatgaggaaggggagagaaaacagcagtgggcttgtgaaacagcaaaatcttttattatcgccaccgcataaacaaagttgctgatcatcagggctaccagaggagggctagggagcctctttctcctggcagcccaagcaggggctgaaacagggtctataagcataaaaccagcaagtatctgaaccaagttacagttgtaatgtttaccaatcgattagggactttcccaagtgtcccatcactatcaactgacatgaatgtaagtgtttttttttttttttcaaccaatcaaattcatttgttctgtggttaggaataggcattatgttttggggaactattgttacttaaagagggagttggccatcttaggtaaatggagtctgaagtcaaaatagcagtacctgatgagaaagttccttttatctgttcccagcacttacaaccatctgtaactccagtcccaggaaatccaatgtcctcttctggcctctgagagtcctgcttgcatgtgacacccagacattcatgcaagcaaaacacccatacacacaaacatttaaaaattaaaaaattaaaattacattttgtagccagacttttgctatttttgtgggttcttctttcttccaccctcctctacccttttcctcccctttcaaccctctagacaggaaagaaaaaaggatagaggggaaagagagtgacattattgttggactacttcctgctgattaggcctctagttccttgggagtaagttaaattttccccatcaggatatctaatgtcttatttcttctttgcacacaactacttagcaaaccaagaccaatagcaaccaaccaccaaccaataatccaacaacaacatccttccctgcctctagcatttatataccacctgaagagtctctggaatcccaaatgtcacacactctcaggaactatctgtagctggcatagaaatcacgcctccgctagagcacgaggcaaatcatagtcagttgctgtgaagcagccccatcaatacctggtattaaaacaaaaacattcttataatgtttttgtggtttttaaggaaatcagaactttcactataacatttatttatgtatttatttatttattgtgtggacaacttttg

SEQ ID NO: 1269 - DNA, 4034 bp, Mus musculus
gtgggagcccgtggcctttaaagtgcgattcagccctctcctccggggctagtttgtaaacacggccggcctccgggctcgcgggtggctggcaggaccatgaattagtgacctggaaagagatactagatggcaacttgggaagtattgcttgcttagcaagagcttagggataattcctgttaacagtaaaactcatggcccaccagctacaaagcgttttaccaacgaggatcatttggctgtccataaacataaacatgagatgacactgaaatttggtccagcacgtaatgacagtgtcattgtggctgatcagactccaacgccaacaagattcctaaaaaactgtgaagaagtgggtttgttcaatgagttggcaagtccatttgaaaatgaattcaagaaggcttccgaagatgacattaaaaaaatgcctctagatttgtcccctcttgcaacacccatcataagaagcaaaattgaggagccttctgttgtagaaacaactcaccaggacagccctttacctcaccccgagtcgactaccagtgatgaaaaggaagtaccattggcacaaactgcacagcccacatcagctatcgttcgtccagcatcattacaggttcccaatgtgctgctcacaagttctgactcaagtgtaattattcaacaagcagtaccttcaccaacctcaagtactgtaatcacccaggcaccatcctctaacaggccaattgttcctgtaccaggcccatttcctcttctcttacatcttcctaatggacaaaccatgcccgttgctattcctgcatcaattacaagttctaatgtgcatgttccagctgcagtcccacttgttcggccagtcaccatggtgcctagtgttccaggaatcccaggcccttcctctcctcaaccagtccagtcagaagcaaaaatgagattaaaagctgctttgacccagcaacaccctccagttaccaatggtgatactgtaaaaggccatggcagtggattggttaggactcagtcagaagagtctcgcccacagtccttgcagcagccagccacctccactacagaaactccggcttctccagctcacacaactcctcagacccaaaatacaagtggccgtcgaagaagagcagctaatgaagatcctgatgagaaaaggaggaagtttctagaacgaaatagagcagcagcttcaagatgccgacaaaaaaggaaagtgtgggttcagtccttagagaagaaagcagaagacttgagttcactaaatggccagctgcagagcgaagtcaccctgctgagaaatgaagtggcccagctgaaacagcttcttctggctcataaagattgccctgtaactgccatgcagaagaagtctggctatcatactgctgataaagatgacagttcagaagacctttctgtgccaagcagtccacatacagaagcgatccagcacagctctgtcagcacatccaatggagtcagttcaacatcaaaagcagaagctgtagccacttcagtcctcacccagatggcggaccagagcacggagcctgcactttcacagattgtcatggctcctccctcccaggcacagccctcaggaagttgattaaaacctgcagtgcaacagttttagatactgattagtgacttcaaagggaaatcaaggaaagaccagtttgcatttatgcgaaatctgtggttgtaaatttttttttttttacttgaagttaaatttgtctctggagttggtatagcagcagttgatgatcagactgaatatgtttttagtctctggaagactgattttccttttttatacatattgttaagatttattaattttcctgtgctcaatgtgtaaattgtatcataactcattgtggttgatttcactttgatttagtggcatcttaataaatgggggtgttactgaatcactcttcccacttccatttctttgcccaccccttcaccctgagatgtgatggtagtcttgttatcatttataccaaagttctgcagagtccctattgtctgtgtaagatggacaaagttgtaagacactagggaagagaaagaaagacggaaagttccttttaatctttttgccttttattttgcacattatgcaaaaggaagaatattagaaacacttttttttaagtgagtgaaagtatggtaagacggttagtgctttgtgcacttcttagactaatcaaggtcatccatcgccctgcaatgtttttaagattaagtaaacaaaaattttggaatcttgagcatttcaaaaaatgacttgattttttaagtcttaaattcagtattttaaacctgtgttcttgaggctgaaaactatgaaattatataatgtatgatacagggttatcagatagtaatttttaaaatttgctcttgtcatttgggatttgttttgtttgggattttgttgtgtgtgatttgttttgttttgttttgcagatttcaggtaacaaagtgagacgcttatgcataaagaagtgtgatgtggttgccagaaaagcctaaaattatgacttagaaacgttaagactgtttcccccattgtcgtacttgtacttgcgagctaacttgtacttattcttgtgaaagcactgtcatcttttagtagccaattttgataatgtttctcgtggaaaaaaatcagtatctatctttagaacaatgtaattataacgtgggaatgtgagtgagagaatgagtatgtgtatgtgtgtgtgtgtgtgtgtgtgtgtgtgtgtgtgtgtgtgtgtgtgcgcgcgcgcgcgtgtgtgtgcatcttccactagtttatgccagcgatattgcttgaatgtttaacgatgccttcagtgtgatgctggcaatagatgactgcagtttcagatgccattactgtgcaggcttggataactaacattccatgatgtagcttgttctgatgaaatgattgtagttacactttgctcattctccagtcatctgtggaatactgagttttctaatgtgccattatctatttttattctgcagttacgttaaaaatacagtacaatattttaaatagactaaattgttaaacataaaaattaaaaaaaaagtagtagatgtgtgtaagaaaactttgtaaaatagttatgagtcctacccagtagcaacttctggcgttcaagcaggattccattctgtaaatacctgtaatgtgtttataataagttgtgtagtctgttctgcatccatactacattattgctatggtctcagtgtcatctcttaaagagattgacgtttccaaagccgtatggaatgcccttgagagttcaggggaacacccaccccacctgcctcctaagttccaatctgggaaacatgcaaattatataaatgacatttcacgacttttgagtatgaagataataggaattttattacatggcttattaaaaatgagagcattttggttgctgattctactttgtatctattactttcacctgatctcatatttaatcagtttaaatcacaattttgtcatagttatgctaaggagttgatctcaaaggcacaaaacatgaattccccatgcaagctttttgttgtagatggataaggttggtcagagcctccatgtgtcaccctctgcaccctctcaacatttttctttcatcttctgatttgtgcaagcttcagttctttggtaacagatccttgcaattgtaaagtagaagtgcatagatgtgagaagtcatgtgacggggaatgaccttccacggtggacagcgctcgttttaaatcagtctgtactcagcaaataaaaatcaatattagttgtataaacacacaaaaattacattttgaattccaggatgtcacactacttctgtacctagcattttgagtccttatatttgcaatgttacacaaactgtactattttcttttatgtacagtttgcatgactaaaccatcagagaataaattctatctttaaa

SEQ ID NO: 1270 - protein, 505 aa, Mus musculus
ISDLERDTRWQLGKYCLLSKSLGIIPVNSKTHGPPATKRFTNEDHLAVHKHKHEMTLKFGPARNDSVIVADQTPTPTRFLKNCEEVGLFNELDFENEFKKASEDDIKKMPLDLSPLATPIIRSKIEEPSVVETTHQDSPLPHPESTTSDEKEVPLAQTAQPTSAIVRPASLQVPNVLLTSSDSSVIIQQAVPSPTSSTVITQAPSSNRPIVPVPGPFPLLLHLPNGQTMPVAIPASITSSNVHVPAAVPLVRPVTMVPSVPGIPGPSSPQPVQSEAKMRLKAALTQQHPPVTNGDTVKGHGSGLVRTQSEESRPQSLQQPATSTTETPDAHTTPQTQNTSGRRRRAANEDPDEKRRKFLERNRAAASRCRQKRKVWVQSLEKKAEDLSSLNGQLQSEVTLLRNEVAQLKQLLLAHKDCPVTAMQKKSGYHTADKDDSSEDLSVPSSPHTEAIQHSSVSTSNGVSSTSKAEAVATSVLTQMADQSTEPALSQIVMAPPSQAQPSGS

SEQ ID NO: 1271 - DNA, 116104 bp, Homo sapiens
atcctgggatttgccttgtctgaagctatgggtctcttttgtttgatggttgctttcttgattttgtttgccatgtaacaaattactgcttgacatgttggcattcatattaattacggatgtaattctgtgtatcttactgtgactccgaaaactgtagtattggtgtcatgggaatgtacgttatttccaaagtcatttcattaaagatgaaaactttaatttcttctgtgatttgtacttacactaagtttagattatcacaaagaagaacgtgcattcaggcagatgctgtcccattcagaggaagctacagcagttgctccactgatgaaaaatattccaatgtaatttttatgggaattcttttatatagtgttctgcatattgtaattcatagggcttttgtttattcatataaaggataaatatttgggtgttttgagcttctataaaatatgattaattaaaggtagttaatactcaagatggtcttgagtttttaaggtctaacatcagttagaatacttcaaatcagaatcaccttccaagactgacttgacaggtggttctaaaaataaatcacgtcagctttttaggaaatgaagccttaagctagggggtaatgtgacttttgtttttcagtaagtctcacattaagcaattgtgtgcctctaatgaatcttccatgtcttttcagaacagaaactagcagctagtttcttacttgaacaagactattaaaaaccaaatatcaaaaaactgaattggctagatttttacagccaaaaattgctgtaaggcagtgtgtatcactgttgctaacatgtttatagtgggagtcttggggatgatagctggttcaacagtattttgctgctaatactttatgttgcttcttggtcaaacttttcccattcaaaggaagaagatggtgctactatagacagtttttcccctagcaaatatattgtaccataatatctatcatccaagtttcagggttttttgaaagttgataattaggaaagtgacattttacttttcttagtgccctttgcctgtttgatttccattgagaaagagcagtcaccaaagttcctcaagtgtcggaagaccaccaccatcagaatcagtgcttgtttaaaaaataaaaatccctaggttccagacctactgaattggactctttggacatgagactcagcaatctacatctttaaaaaggcttcccaggtggtttttgtgcatactgtttgagagtcactaagttatatatatatcctaccttctgtaaagtgaaatgaggccccaaaaagctaaagaggtagagctgctacctcgtttttagttgattcatcatctagtctatatcacccaaaagaattggaaataggtattcaaacaaaaacctgtatacaagtattcatagaagcactacttacaatagccgaaaggtagaaacaaccaaatgtctatcagctgatgaatggataagtaaaatacatccatataatggaatattcagccatgaaaaggaatgaggcactgatacataatgaatagatgtgagtgaaccctaagaaagcatgctaagtggaagaagccagccacatgattccatttatatgaaatatccaaaataggcaaatccatggtgacaaagccaattagtagttatcaggaactagggagggggtgaaaagggagtgactgcgtaatgcgtatggggattccttttaggatgatgaaaattggatgaattacagctggtctgatggtagtgggttatcagaacttattaacattagtgtcattaaagttggtatatagcccctcactgctaaatctggctcaaaaattaaaagattattaaaatttgatgaattagtggtgatggttgcacaacattgtaaatataataaatgtcactgaattgtacactttaaggtggttaaaatggcaaattttacatgtcttactgaaactactgtactatttaatacaaagtacatagtataaaattttaaaagtgataggaaaatgcttagattaatattcacctattccaagtatattttaaataaaaacagtcttggtaaagacctgttcttggtgctggttttggtggttgaaaaggcttgaaacgttgatttgggaacaggtttcttgtaagagatgtcccagctgagggaatctcccagaatgaaaatggactaactgaactgtggctgcatagtcttcaggctactgagaaaacaatacaacaaaaaaccacacacaatgactcaaactttatagaggggaaaggtaatagtgcatcacaagtttaacatccttgagtatacatccttttacttaacttttgtttctagtaacaaagttatgacattgcaagtacatcactggaatgcatctactagcagaaatgtttattgtgcaccatttttataggaagtactgcctcagcttacgagctttgcaaacaaatattaatgctaaatgctttttactgacatcttcgtttctgaacagaagctgataaagatactatttttctgtcaaacatgaaatggattttccatgttgataagatggtgttggtaaaatggtgacttaaatgagtggcagtaagtgttcaggtgttcagagggagtagaaataattttatagttgaagaattacatgaaaaagtactatttgtaacttaagacaaaccttaaagaaccgtgtcacaaggacagaccagaagagggcattttggctagtgaacggcatgaggaaaagtaaatgagcacagcattggtacatgagaaacaaggagttccctgagtatgaaacagaaatggtgtgagataaggctgtaaaggaagactggggccattttatgtaaacaggcaggtataagattgtgacttttattcatgtgatactgtcagtcattcaaagtttagagctgtattttagaaaggttgataggagaccagtatgtgagatggactggagccagcaatgaacagcagttcatactatagtagctttgctgaaatgtaatgaaggtctagtctaggatggtggcagtgaagacagttgaccccctgaacaacatgggtttgaactgtgcaggtccacttatacacagatttttttcaatatgttggaaagttttttgaggtttgtaacaaattgaaaaaactctcagacaaaccatgtagcctaaaaataattgagaaaattaagaaaatggtatgaatgcataaaatatgtagatactggtctactttatttactgccataaaatatacataaatctattacaaaaacaaatttatcaaaacatgcacatagactacatggtaccatttacagttgagaaatataaacgtagagatggagtaaatcatagctgcataaaattaactgaagaacatactgtactactgtaataatttagtggccacctcctgttgctattgtagtgagcttaagtgttatgagtatccacttaaaatgctgtgatgctcatcatcttcatggggcagttcatctccagtaaattgtgtatcacaaaaaaagtgatctttcgcagttcttgcctttttttttttttttttttgagatgaagtctctctcgtctcccaggctggaatgcaatggcggctcactgccaacttccacctcccgggttcaagcaattctcctgcctcagcctcctgagtagttgggattacaggcacctgccaccacacccagctaatttttgtatttttagtagagatggggtttcaccatgttggccaggctgatctcgaactccttacctcaggtgaccctgccgcagcctcccaaagtgctaggactacaggcgtgagccaccgtgcccggccatttcttgcatatttttcactgagttagtgcaatattataaaccttgaataacaccatggaacctatacaaagtactagtagtgatgctagaagcggtcccacgatgcgaagtcatgacattgcaagaagttgaatggcttgatatgcaccataggtagaagacgtccgcagctgcagttgtcaccatttcagacagacagttcatcttgtaaacagatggtgtaaacttgtaaacttaatgatattgatatagtactagaaatgtattttctcttaggattttcttaacattttcttttctccacctttattgtaagaatacagtatgtaatgtatatagagtacaaaatttgtttatcaactatgtaatcagtaaggcttctggtcaacagtaggctgttagtagttaagtttggaggaagtcaaaagctatatgcaaatttttttattgcatgggaggctggtggggggaatcaatgccctgaacccctaaccttattcaaggatccactatattttaaaaagagtgcaaaggtagtatcagtaggatttaatgcctagatctcaggaaccagttaggagaagagagggtgtgtgcatctagtaagtgctagctatactgttatttaaccctcataacaactctgtaaacttgggaataatttccaagatgcaaaggaaaataggctcagaggttaaacagttcccaaaattacatagctattaagtggcaaagtcaggatccaaattcagatcttccttaaagcccatgctctgattttttttttttaatatgactgttagcaatgacaaggaaaaacctgatttggggaaatgatgaactttgttttttatataattttaaatacaagaggtataattttacagatctgggcttgaaaagagaagaaaggtatgtacagcacagactagatgtgcataagagaagtgcagagcagcagtagggacccagctccacacaggtaacaaattggtagtgaacatcattcacctagttttgtgactctccagcaatgttgggaagcttgctaatacaaactgatgtaaagagcagtgagggttatcagggttgtgcactgggaagaagagatgatggaaggtcaaagtggctctaggcagacagcaaacaagcgcactgttcaacaaaatgacctatgcatttcaaactgggtaaggaacaagggaagacacaataaaggtgataaattgaaataacagaggggtcaagagctcagaggtttcactaatgttgaaaagccatttcaataagaaccaaaaaatacacaagaaatttaaagaatttcagagttcaagatcttggaaataaggtaggctcgaggaatgatcaaaatttgaggtcaagttgctgagtgattgaagttgggtagaaataaatgtaaatgctgttaattttaaggcaggattgtagataaatgggaaataacatttgagaaccaaataaactacttgtgcttctgctgtaaattttaagttctgttagacaaatttagtgaatatggtttggtttgggtgttgggtacttggaagaggaaaaaattgtattgttatggtcctacgtgcaaagccttttaaaatattttgtgatttctacataggaaattataaatgagttgttgattcctctacatgctgagcatatcaacgtagttatttcatattataattctactgacagtgttatggacttaacacccaaatacatggtccatcagttacttgcccaattctttacattattaagggcaaaaaaatattatttccctaaaaactggttcaggttcctggcaagaatttgcacttctttctcctgaattgacaaaagtaatgtgtctcctctgagacatttagtgacttcgatcttctttctcaagggagcttaaatattggagagaggaagtaaagagagtacctaagaccaatagagactcataaatccaagagcttttggttgttcctcccattagcatgagctagcatcctacaacttattatggcagagactcctgaggacccatgattgttgtcagtggcgcttcaacaacagcttttagtcagcacttcccagccatggagactccaggatctcctcttataattgcatcccaggctttgcttcctcaaatagctacacaggttggctgagtctctcagctgccagacatcgcagtatttttccctcaagagttgtatcttaaggacaactcacagaattctccgaccactctagtgctatctaaagtgtctgttactttcaagttctctaaagttgtatttaaaaagcaagttctaatattgtatgttattacaccccggctttattttctccatagtacttaccacaatttaaattatcttgtttatatatgtagcatgtctccccctgcccctgcacccaaccacaagagtctcctgaaaaaactttgtcttatttatagttgtcacctcagagccagaaacagtgcctggaatgttcatgctcaattaatatagatgctttatgagtaaggagagcattaggttgatgcttgacctcattggccatagttgacctatgaggctgtatccaaggtaagaaggtaactgaaacgagcaggatgttagtctaaggacccaggaggatccatatgctgacagacctcccttgatttctaggatacagatcacatggctttggtgttacgtgggcctcaggttgacaaatagactagttatgggaagctatgaaaggtaggagtgatcctatttttattaataatattgtataaaaagaatataatgatggcaatccctctttctggtgagtcagatgagagagagaggtggcattagcatcaagaatgaaaacaaggcccttaaattccattctccctctctctgggctggttttgttgaaggtagtataagctaactggtatgatgtgaagataaacatagccctttttccccataatgccacaccccattaattataaattcttttgggaaacccaagatttgggttggagggtagacatccctgcacttaaaatgtccatgatgaggacaagtgctgagaggtaactttaacataggccatttcagcaatgtgcaggaagaccctgagctggcagagagaggaaaagatctgccatgagatagaagctaccaaaatgtctgtacaacgtctagggccacattatcctatttcatttctcagatatcagtggggtaatcatgtcctgcgtctcccacccctttcacatctcacacacacacacacacaccacacacacccctaccttgatcccactgataaaatcccagctaatccactgtactgggctgcatcctgagaatatcatgaaaatgtagaggctctttccctaagcctaggattagttgtaccaagtagacataaggggtgccctgtagtcttctatgttttggttagctgcagacaaacagaaactatgttctgaaaatcaattattagtgagagagagaaggagaggaagttgaaagggaagatggagagagatatggtttggctgtgtccccaccccaaatctcatcttgaagtgtagttcccataatccccacatgtcatgggagggaccaggtggagataattgaatcattggggtggtttccccatcctgttctcatgatagtgagttagttctcagagatctgatggttttataatgggcttctccttttgctgggcactcattcatgtgaagaaggacatgtttgcttccccttccgccatgattgtgagtttcctgaagcctccccagccatgctgaactgtgaatcaattaaacctctttcctttataaattacccagtctcgggtatatctttattagcagcgtgagaacagatatatatatacacacacacacacacacacacatatatacacatatatatacatacatacatacacacacacacacacacgttttagaatttttgtgagcagttttaacagattatggattagcagccctatcatactaaggtggaaataccacattgtgtggcatttgtaagattttgagggcacttagagaccatcattgtttcttgtgatatttacttattaacattttcatgacagaaatgcattttcttcaaatagcctcattttgtatctaaggaatattagttttatttagcagttatgctgggttcttaaaggagattcactagaccctcactaattctcttagaactaagttgggtagatgcatcatggaacaagacaggcaaagaagaggtctacaagaagtttcctgcgtttgtaaagagaagactgtaaagaattttaggactcttggggatattgaggaatgcaaaagtgagaacaaagatggaaaagggtggcattttatgaggatatgaataagtagtgagacaagttcatggaatcagacctgaatatggtaactacattcattttgacaatgctgaatgttttccccacttgtagaaaaactatagtaaacaaactgctgtggaactagaaatatgtggataaagtgagaccctttgttaaatgccgggctgccaaaatgcatatataacagatcggcatagtttccacctgtttcctgcgcctatcttatttttttttctcactttaggtataccctctctttagaaaattagctaaaactgaattatcaaaacagatcagagtactgttcatatcactaaacagttcttctcttgtctaaaaagaactgaaagactttctttaaaataatgtgtttctcgaatgcatcatgtagataactaactgcttgacaacagactggagaagtagcaatgagaaatttaaaaccaaagctactgcccaattgaatcaacactggaaaaaatttcaaatggaaaaacaatttttttaaaaaaatctattctaattgacccaaacttcttttgaaatgtcgtaacatttgcagttctttttctcacattagttgttttgggagatggagagagaagcatctatttaatcaatgcgttctagacctaacaattgtgatgtcaatcaaacattttgtccaccatttccatcatgagtaatctgaactgtgaggttttgctgacataattagtgttacactacaatggcactactacattactgttactatatggggacagtactttcattttaagtaggaaagtgttaataatttggcttaatgtttcttaactaaaattagttttaaaagaggactgagttggcttatacacatgtatgcggtccagagacctacctgttaaaatgtcaatgccattacaatttcacttttatgccagatatcattcttgaacttcaggctcattaactctcatactatcccccaaaacctttcaacaattttgagagtgtattttatgttaatatataaactagttcataattttgttccagactagaaatcagtatttaataaatggaaaaaataagacactgaaaatcttttattgaataatgtaaattctcacagaggcctctgatcatacttttcaacttgtgcctatttattgaataaccaacatccttacagttaatattaaaatctttaagttgtgtggggttttttggaggggagggatgggcaattaccagcaaactccgcctcccccaaacctcacctaacccgaagctccccgcctcaggctcccggggagccaaggggtgggctgaggaacgcagcctacttttacccacctccctacctagtgctgggaagtgacggaaacggagacacccggctcctggggctgggctcggaggacccatcctgctttccctctagcagcctttccggagctcaccacctttcctcccctcacaccgccaaagccctgcctagcccttcaccgccgcctgcacccgcgccctcctccagccgacagccaatcacagtcttccacagctccgagtttacagaagtaacgctccttgggccctctggtcccgccccctccagaactgcttcccgcccttcgggctccttgtccaatcatgagcgcccgagtgctctttgatgcccgtcccctctacccgccctgccgaagacccgccttcttctccttaagcctgacggaatcacctgactcggaggcgctccctcagaaggaaggcaagaaggggcgtgtgggtgaaggggaggggcgccagaaggaaggtggggatgccgggagcggggcgagcgggcgggggttgtcagtccgatctcgcgagagaggacggaagcctgtgggagcccgtggcctttaaagtgccgttcagccttttcctccaggggtgctttgtaaacacggctgtgctcagggctcgcgggtgaccgaaaggatcatgaactagtgacctggaaaggtgagtaacgatgggcagaggtcagcagggctggagactgtagggatacggagaaagaaggcgctaacatggcgacgtcgctcagcacagtccccaccccccgtttcccatcacctcgggtgctcctgacgtgctccttagcccttggggcgattgtggctgtgctgccacctcggcggcccgcgcggtgtgggctttgggaacctgactggctgggccggaccgttaggtaaccagcgttcgttgttccggcccctccctctcgcgcgctttcctaaggcagaggaaaaaggaataacggctccctcttagacccctccctccgaattatcttcaccctacttgggtcagttcagaggtcctcggggcgcgcgtcgagtcagccgtgtgcgcagggagacctctcccacccacagtccttgggttgggcggggagagggcccactctggtctccccacccagtattcaagcgattgaggaccgtgtattggtgatggtggcggggaggaggatcgggaggcgcggctgaaaatagaatcagggtccctggctgcggtgcagcttgaaggaaagaatggtgtggagaacctaggagctggaagtctcggccttttccgtcctttccgccaccctcacaatcccgctacccccagctttttcccggtggggcggggcttaggtgtgggtgcagactgattctggtattttcccttatttttttttttttaaatctctgggtggacagcagagcgtatgtaaagaaataatttgcttttcatcaatgccctagggaccagggccgaaagggagtgtgtgtacgtgttttctatgttcgctcgtttaaccgaacctaggaggaaaaagagaggaggagctgggaactatttttgtgcccctaggtagtataaaattggctttctttaatggagagtcttaaaactggtgaggccaagagcaaaactactgtgaatatcatggagtaaaagagattactcctgatggaccttaggcatcagaaattttagtgaaagaaatgtttctcttaaaattcaacacctattttaaatagtgatgtaaagcatttctttacatgtaccttcaggttttctaatgctttcctggctattatttaactggtactaagggattgactaatccctaaattataatgtgaaagtttaaatttcttagaggttttaaattatggagacggtcacaatgcatgcatttaagatatacatttaaaatcagaacaaaaactgactttctttgagcacactttttgtcctatttgaagaaacatgaccactggcgttatcattgtgagtaacagccgttctgatctttaaatagccatatagctttggtctcttgaatcaaaattatgaaggtaaagctttatttataaaagcttgttaaaaagtcaaacctacaggtttaagtgtcttaaagtacaaacacagaagcagttttatcatgtattaatttttttttccttacttgaggaatccaccgtaaaaactttgtttcaaaaatgttaggaacatccttgtaaaatacgttttaaatatacagattcccctctgcagattaagaaagttcatggatctttaaggccatcagtagttgcgtaatagttaagaatcctcgtctttgtaaaataatttctaggaatcttccaaatttaccgtgatgtgtaaaagagtttctgagaatcttccaaatttaccatgatgtgtatgttgccttcctaagacgtttaatcttgctttgagagaatgctactgccattaagttttaagaactgatttaaaatgtaatatcgtggaaatttagaacttagttgttatgtattttaattgtcaggaaggagctttcagggacttttttttgtatgtgtagtgtacataataccttctatagctccgggtgcatttcctgaaaatcctttttaaaatatcttatccgaatgtttatttcgtatttggggcactgtatttttattagttaaatatgtaacccaggaattcctgcacttttttctttggcgttttttgtttttaagctaagataatagtagaggctgggcgtgcgcggtggctcatgcctgtaatgccagcacttcgtgaggccgagtggggcggatcatgaggtgaggagatcgagaccatcctagctaacacggtgaaaccccgtctctactaaaaataccaaaaattagctgggtgtgttggctcctgtagtcccacctactcgagaggctgaggcggagaatctgttgaacctgggaggcggaggttgcagtgagccgagatggcgccactgcactccaacctgggcgacacagcgagactccgtctcaaataaataaatagtagaaatggttgtcagcattttaacaaatagtggggttggggtggtctttattggtattcaggatctgaaagctctatgactatggtagaaaaatatgccatacatcaaacatctatctgtaagtagcattaactcttcaaaaaataatgtacattttttctacccaaatttttgtattttggaaaacttcggttttaatgatacatacgttcttgtctggtaaattgttagatcgtgttagatcaggtaaacaatctcaccaatgtgtgctttttctactaattttgtctaaaggctcttccttccaatatgaaatatacctataagtaggcatttctttctcttttttattcttactaaaatgtcattggagaatataaagtagttgaagtctcccttatgaaaaccagattttcatcagaacctctcgttaaaaattcagtgaatagcaataattaatattcaactgatttttataaaagtcaatgcatatagcacctgttgggttattttgtataattaaaatgtaccctaaaaaaaaatcccaccttagccaggtgtggtagctcacgcctgtaatcccagcactttgggaggctgaggcaggcggatcagctgaggtcaggagttcaagaccagcctggccaacatggtgaaaccacgttggtaggcgcctgcaatcccagctactggggaggctgaggcaggagaatcgctagcacctaggagcaggaggctgcagtgagagccgatcgtgccactgcactctagcctgggcaacagaatgagactgcatctcaaaacaaaacaaaaaccaaaaaattcacttagtattgttataatctggagtttaatttagtatttctgtgtttatctcatactcacacctgttcctcaaggctaagaacttgtctaaaatgctgcatgttctctttatgtaagttttaatgttgaagtagtaggatagtattcacctatttctatttgaaggaaaaccccagagaacattttatttcctttgttatgtttctcaaggttaaaaggttatatagtaaggtataagatagtttcatagaaaatcaaggaaatttgtggatctttaaggccatcagtaattgtattttatcttattttatttttgagacagagtctccctctggcttccacgctggagtgcagtggtgcagtcttggctcactgcaatctccacctcccggattcaagcggttctcctgtctgagcctcccgaataactaggattacaggggtgcaccaccattccctgctgatttttgtatttttagtagagatggggtttcaccatgttggccaggctgatctcgacttcctggcctcgagtgatccactcgccttggcctctcaaagtgttgggattacaggcgtgagccactacactaggcctatttttacacattattttataatataaatatatttaatgttacatattatataaatataaataaatatgtattcattatatgtgtcttttcaatttgttgagactttttgacaaccttgaaactggtgtattcattttcacttttaaggcattacaggcatgagccactgcacccgggcctatttttacacattgtgttacaggtgtatttaatgttacatattatataattataaataaatatgtattcattatatatatcttttcaatttattcttgttggcaaccttgaaactagtgtattcattttcacttttcttttttttttttttttttttttttttttgagacggagttgctatgtcacccaggctggagtgcagtgccgctctcagctcattgtaacctctgcctcccaggttcaagtgattctcctgcctcagcctcctgagtagctgggattacaggtgcccgccaccacacctggctaatttttgtatttttaatagaaacggggtttcaccatgttggccaggctggtctcgaacctgcctcggcctcccaaagtgttggaattacaggcatgagccaccacacccagcatcatttttcattttttaagtatgtttattgattttttttccttggcattttgacattgacagtaaagaagagatgtaaacaatgttttgggggctttgcctattcacccatatttgcattctgtatcttaacaaagatagtggttctcagccacttttttgcctttctacccaaggaatacaaaatacttccaacagtagtagtggcttattaccacagagattctcaacaagattggtagggaaagacagggagaaataattgtaattggcaaaataccatatggactttggttatttttgtaatatatagtatttttatctataatattgaccataagtttataaatatattccctaaatattctttagtttgctagcagaaccgaaacctttgtcattctaatttttttagctttgctccaatgttatagctttggtttttctaattttactgttcgggctagtatgtttgcttttatttatttatttatttatttatttatttatttatttattttttgagacagagtctcgctctgttgcccaggctggagtgcagtggcacgatcttggctcactgcaagctccgcctcccaggttcatgccattctcctgcctcagcctcccaagtagctgggactacaggcacccaccaccacgcccggcaaattttttaatatttttagtagagacggggtttcaccgtgttagctaggatggtctcgatcttctgaccttgtgatccgcccacctcggcctcccaaagtgctgggattacaggcatgagccactgcacccagcctgcttttatttattaaacgtgtcggaacaatttttttatatatcaacttgttttgccatactaacaaataattgtgttcattatttttgttttcttctagtttgtgcatatatattgcagtttttacagaattatatcaaataagttttattttacttttatagcattgtatttttccatgttgtataacctttatgatatttgattgttacttgatagttgaaaaataagtattaaatttgttctaaatgcctgacaggaaaataatagttttcagtttatgcctattttgacattgaattgaacatctctgtgcattttttcttttatgaattgtttctataggatactaatctcaaatgaattactagtcaaaggatataaatgtttctacagttgccagatttttgcctccccaaagacttgagtgagtttacactgtcagcagagcatgaatgcgttagctttgccatacttttgtgaactttggagttatgattaatgaagcgtgattacctaattgggaattatttctgggaataagttgtattatttagcagttttaaaattatttagttggccatatcatactatagttatttatctaccagtgatctatgtgatgtgacaaatattgtgtatttcatattttctgacattttactgtctttgtttcttttaaagtttaccaaaacttttgacagactggtaacaataattcttagatttcatgcagttttatgtggtttgtacactgagtattttaatgctagtttaagagttaatttctgggctgggcatggtggctcatgcctgtaatcccaccattttgggaggcctaggcaggtggatcacctgaggtcaggagttcgagaccagcctggccaatgtgagaaaacaccatctctactaaaaatacaaaaattagctgggcatgatggcgggtgcctgtaatctcagctactcgggagactgaggcaggagaattgctcgaacctgggaggcagaggttgcagtgagccaagatcacgccagtgcactctatcctgggcaacagagcgagacggtgtctcaaaaaaaaaaaaaagagttactttctgaactatacatttcatagttctgtcttatgaatgtgtcattatgatttattaagatttataatgacaaattcatttccatgtaggaaacacttggaataaagaaagtgtatatgagtatatgatagccaaattgactgagttttgtccctggcacatagttaagtgtgtaatcaatattttaggatagttattagaagccagattatcaggggtctaccacttactgtgttatcttgagtaaattatataacctctctgcctcagtttccttctctttaaggagaataatttaactcatagtcttgctgtgagcattcatgtgatatatatacaatacttaatacagtgtcaagaacttaatgagtactcagtttgtgttgtgggaattattattgaagttcattcagaaataatctagcctagccctccaggcatgcttgtgctgtagcttgaaagcagtacagcaaccatctacttggtagctttggcaacaaagttatttttccctaagaatttataatttgtggaggaacatgccaccttagaattttcataaattcatttgagagaatgtctcatatttttttgttccatatgtaccccttctcagacattttctgtatcaaattccttcagtatagcatatccttattttaagatgataaaattatgatactgtgattttcataaaatccaattatctttgtatttttgagacaaagtcttactctgtcatgcaggttggagtgcagtgatgcgactaagtctcactgcggcttccacctctggggctcgagagatcttcccacctaagcctcccaaatagctgggaccacactcacatgccaccacactcagctagtttttaaatttttgtagagatggggtcttgccgttgcccaggctggtctcaaactcccaggctcaagcgatcctcccacctcagtatcacaaagtgctgggattacaggctgctccccaccccaactattcttttcttctactccaccaatcccattataaacattctagggaaacctttcatttctccttccccatagtgggattgagattatgattaaaataccacagttctaaagttgttttgaagtctctgctaattatacaattataactacactatcaatttttggccacaaagttgagaatcagtgaaatattttatcatttgtaaggtaggttttaatgattgttgatatatggatgttgggtcgagggatattttttgtagtaatacactttacttacttgaattttgacatactttgaaaacggaagaaagaggtgagcttatcattgttttaatgggcatagtacataatccatagtcttactttatttcatttttagagacagggtctctgtcacccaggctggagtgtggtggtgcagtcgtagttcactgctgcctcaaacacctgggcttcagcgatcctcccacctcagcctcccgagtagctgggactacaggcatgtgctactatacccagctaattttttaattttttgtagagatggagtctcactatgttacccaggttggtcttgaattcttggcctcaagtaatcctcccatctcagcttcacaaagcgctggggttacaggcgtgagccaccacaccaagccggtagtgtattttatttgtgccctcttcataatgagaaatttttattgatgtatttttcataatggtgatgactatgaattactgtaattcttggagaactgaatttctatttctattttctttttgcttttacaaaaaataagtttctcaggagaaaaaaagcaatgaaaggtattttatcacctaccttgggcaaaaataatgctatggaccttagaccacataattctgttaccaaatctaaggtgatgttattagcacaacttgtgctactgttgtttatattcataattattactctgtaaattttttgtatttatgtatttgttattctattataattttaaactataaaactacttgctttctttacattgcctaggaataatcaagactcacttaaaaaatatttaatttaaaaattggactactgatattttaattgaatatttttgagatattgaactgatttcactcttcacatactcataatacagtctggagaagtttgtgatactttttacgtgtaccatcaactttgagaaatttcatcaaaattttagtatactcttgggaattgtgtgaaggacctctctcatgtctgctgtgagtgggggaaaaaatactgctgctttccttgttaacattgggcttaatatttttctctcagctgatgaatttgagttacctaaattgatgaactaaacattatatatcaaataaacttacagatagcatcagaatcatgggttaaagattaatataaaacttttttttttttttgagacggagtcttgctctgtcgcgcaggctggagtacagtggtaggttctcagctcactgaaccctccacctcccaggctcaagcagttctcatgcctcagccttttgagcagctggaactatagtctccgccaccacgccccgctgatttttttgtatttttagtagagacggggtttctccatgatgaccaggctggtcttgaactcctgacctcaagcagtctgcctaccttggcctcccaaagtgctgggattacagggttgagctatcatgcctggccaaaactcttatctaaaagtcaaactgagtatgtagttcagtttctggccttaaaaataaagaagatagtaagattaggtatttattaggcattagaaaaatgtacatttaaagtcaaagtaaaatgcagtaaaatttatgaacttaataaatactattttagtgtcatgcactattctgtgtattttacatatgttacttttatatattttgatagccctgaaatgtatttttttttttactgtagaggatcatagtgtaatcatacaatttaaaattttcctggccaggggcagtggctcacacctacaatcccagcactttgggaggctaatacaggaggatcattgccttgattaatggaggctttaagtcactcttattttaaattatccatttaaaatatccacttgggttcctgtagagatgacctcagtttccagtgttccccccagacgtttgcttcttgccgtaggatcaggaagctttaaggcactcttattttaaattatccatttaaaatatccattttaagttatccattttaaaattatccctggataatttaaaataagagtttgagctcaaggaattcaagaccagcctgggcaacatcgtgagaccggtcactccaaaaaaaatttagctgggtgtggtggcatgtgtacctgtggttccgcctactgaggaggttgaggtgggaggatcacttgagcccaggagatccaggttgcagtgagccatggttgggccactgtacttacagagcaagaccctgtctcaaaaaaaaaaaaaaaaaaaatcctgaattcaaaatactttagtcttgagaggcaagtgaagtcctactaggtcgtggctgcaggttttcaaactccttgatttaggtttgttattatgaccactttgctattcccaaggtgatctctaggatcatttcaggaatgtatgaagatagtcatgaatgtactgagtgttcgtatcctgcttcagttcaccttggctgtgcctacatgatgacagatattggtgtttttttttttttgagacagagtctcactctgtcacccagcctggagtgcagtagcgcgatctcggctcactgcaacctctgcctcccgggttcaagcagttctctgcgttagccttctgagtagctgggattacaggcacctgccactacgctcagctaatttttgtatttttagtagagaaagggtttcaccatcttggccaggctggtcttaaactcctgatctcgtgatccacccaccttggcctcccaaagtgctgggattacaggcatgagccactgtgcccagcccatgataacagatgtttgaaagggaataaagtcgtgtctagtgtcattgtgctagcgtgcccctcccccttcagtgttggccccagatcttccctttatttttttatgtttgtgggaaaggggccacatcagcagcaatcatcaaccaatcaataggatctacttagtggtgaacatattggctgtttaattggtaagagtcgctggcctgaccacaccacagcatggccacttgggttcctgtagagatggcctcagtttccaatgttcctcccagacgtttgcttcttgcccaatcgagaggggatctcaagactcctgattggtcattgtgagctctcaccctgcgtggctgtgtagatagactgcatagatacatgaagtggggatgggggccaaggtcctattactgctgtttggaaataacttgcctcttacagatccagccttattgtttttctgacatcctagtaatggcagatcctgcacaaagtggatttcagagttaatactgtgaggagacaaaataatgagaatagttttaccaaagacaatgaaatattgcataatgtctgcattttgccattgatttgagtgcatctttagaaaactgaatttcacgaaaacccaggacattgctggaaattgtatgccctttagaaactttatgtgaatttttatacaaatgctgttttatgagttatgtaaaatgttacaaaaatagaaaaaaaataccctgtgtctataaggtggtgctgctgttgaagtcgtggggcacaagtccatcttcctggtaccttacaactcttcttaccgtattaattttctgtttctgactcatacattaccacctacttaacatcttaaaacaataaagatttattgtctcacagttttagtaggccagaagtccaggcgggcccagccgagtcctcagcttagggacttacaaagccaagatgagtgcgttggcagagctgcattcctttttggagtctctagggaagaatccacttctaagttaattcaggtggttggctgaattcagtaggtctttcctttctttgtgtccctctttccttactggctatgagccaagggctggtcttttctcccaggagctgaagtgctttccatgtggccccctccagtaatggcaggtcaaatccctctcgtgcttctaacctgtctgacttctttttctggctgaatctctgactccagatggagaaagttctcagctcttgaggtctcttgattagattcctggataacccaggaatctatcttatttttggatctgtagtccttttttttttttttttttttttttttgttttttgagacagagtcttgctctgtcacccaggctggagtgtaatggtgcaatctcggctcactgcaacctccgcctcccaggttaaagcaattttcctgcctcagcctcccgagtagctgggattacaggcacccgccaccacgcctggctaatttttgtatttttagtagagatggggtttcaccatgttggccaggctggtctcgaactcctgacctcaggtgatccgcctgccttggcctcccaaagtgctgggattacaggtgtgagccaccatggctagcaaagatctgtgtagtctttttacatctgcactgttccttttgtggtggaaggtaacctattaacaggttccagggattagggtatggacatctttggaaggccattctgcctaatacactcatatactcctgaaaagaaacttgataaattctctacccttgtacattttaaagttgattcctacaattttcatcatagattgaaattgttgaaaaaaatataatttctgttttttccagatacaccacttttataagtacctaaatatcatagtgatttgatgctgtcattggttttaaaaaacaagcttgaattaattcatttcacagttggaagttttcagcgtccctttttcttattaaactttattttctttcgacttctccaacataattttatttgaatccaatgtattttaatgttttaaaattctttattaatgactctgtcatacttgtttgtagcaaatatacatttaatttttcaaaattttttactgatttcttcattcttgcggaactccctctctggacaatgcatttttgtatggtatttccacaatggaagaggtaatcattaaatgaaaattgttattctttctgtcatcacactatacaataaagtatatctgaattcctaaacacaaagcagaacaccaattcttaaagctatgctttgcctttaatagaaatatttgtaagacagggaaagccagaagcttgagggttaatggtgtcttgattaatggaggttttaaggcactcttattttaaattatccatttgttttgttccatggaagcttctacaacctagggcaactcattctaataagatttgggatggggataggtatggatttcttgtgaaaagtgggagaatgagggctctgggaaagtaggcagatcatctttgggaaagcaaacaaagggaagatgaagatacagaagctgattttcttaaaacttgtcttgctcaagtatcccttggaaagccttagtgtgtacctttagtaatacataccccactttgtctgtatcccatactgcctccttgaaagactgtccacctcctgcctacctcctgtcctcccacagggacagaagctaacttctctccaccacccaggattgcccttgcatctgttacacacttttgaggccatgcccaagagaggattaattcctttctcatactgatgcctactttttgggccctgtttcttgtcacagtatttggctcttaccaggaaatttgccattagcagtgtttgcacatttcagcagagattctacccacaggttagtgatatccaaatatagccatttgctgcataacaacattttgagtcagcagaccacatataagatgtggtagccatcatgatatagtataacacattactcacatttgtagtgatgttggtgtaaacaaacctactgtgctaccagttgtataaaagtatagcatttgtctttcattaagacaaggaaaaaatagcacaattacgtacagtatgtaatatttgataaacaatgatgttactggtttatgtatttaaatatactttttaatcattattttggagtgtacttttacttttttttaaaaaaaagtttattttaaaacaacctcaggcaggtccttcaggaggtattcttcaagaaggcgttgttatcataggtgatcacggctccatgttattgcccctgaagacctagtgggacaagatgtggaggtggaagacagtgacactgatgatcgtcaccctgtgtaggcctaggctaatgtgtgtatctgtgtgttagttcttaacaaaataattttaaagtaaaaaatatatatatatatatattttttttttcttttctttttgagatggagtttcgctcttcttgcctaggctggagtgcagtggtgcaatcttggctcactgcaaccgccgcctcccaggttcaagcgattctcctgcctcagcctcctgagtagctgggattacaggtgtgtgccaccacaccggctaattttgtatttttagtagagatgaggtccatgttggtcacgctggtcttgaactcctgacctcaggtgatccgcccacctcggtttcccaaagtgctgggattacaggcgtgagccaccatgcccagcctaaaaatttttaagatagaaaaaagcttattagaataaggatgaaaatatttttgtatagctgaacagtgtgtttgtggtggtggctttttttttttttttttctttgaggcagagtctcgctctgtcgcccaggctggagtgcaatggtgtgatctcgactcactgcaacctctgcctcctgggttcaagcgattctcctctgcctcagcctcccaagtagctgggactacaggcatccgccaccatgcccggctaattttttgtatttttagtagagacgggggtttcaccatattggccaggctggtctcgaactcctgaccttgtgatccaccctcctaggcctcctaaagtgctgtgattacgggcgtgagggtgtgagccacagcacccagcctaaaatcttttgtactgtgtttttactgtactctttctgtgtttagatacacaaataccattttcttacaaatggtaacagtattcagtacagtaacatcctgtacaggtttgtagcctaggagcaataggctatatcatcaaggtttgtgtgagtatagtctgaagtttgcacaatgatgttttggcctaacttcacatttctcaaagaatgtatccctgttgttaagtgatgcatgattatgtaagaaagacgtctacaataagtcaggtagtgggggcaaagcagaggctccttacatctgtgcctttcaagttacaaaaaaaggatgttatttttaatgttgttcaaagtctgggtgattatcttaacattgcatgtgttaagacataagctatacaggccagttacaactggctatcttatttctttttgcttgaaatgacaataccagtttgtcttccagttttttagggtattgtatttaatggaaaaaaccgcaattacttttgtacctggtcttttgtgagtaactgctgaaataagaacccaaatatctctatacaaataggaaaacccgaagccatactttaaaaataaacatttctctgaaagaaacaatttgcagaaatttatctctatcaagaagatgtggtcctttacattatcccacagagccatttgtcctttgaattgctgctccatttttgtagtccctattttacatttgtatggctgaatatactatttgggtcctttttcccttaaggaacagcctgtatataaagcataattttgttgccagctttgaaatgagtttttagtttctgatacaacagtgttttaaacatattaaatatttaaacatgtttcaagcaatcttgaaagtgtcaggaaatcaaagttaagtgcaacccttctttccaacattctgcacaatagggaaatctcccaatacctatatgacctggtaatggaagctcagcactgagaaaacgtagagaaaagtgtctttctctttgaatattgtgccttttcttaatgcggttggtaactgagctttctgccaggttcttactcattctcaccttgaccacaccatttatttacataatgattctgagcagtcatttctgagttttgtagactgagtatgtgagtttacctttccaaactacaacaatttaggttgtttctttgctcttatgttgtcattctggtcttcatatttttcctttcttttgtcacctatagattagccttacatattaaagaagtccttatgaatgttagtcttggctcctgacaggaccttctgctttcgaaaactctctttagtagtttgccaagccatctccatgaggtatctggacatcttacattttagaatgaaataagtatgaggacagaaacaactaattgtctgccaatattcctcctattattttttcttattggtagatgctccagttcttaagcatatggtgaaataaaggacatatttcctatccccccgatagctatggtcatatgattaagttctaagccatgaaatgtaaataaaagtttcctgtgaaatttctgaaaaatttccttaaagggaggctattgcttatctcctttttctcatcttgctgtctgatcagcagatgtgatggctagaacttacttgaacagttatttttaaaaccatgaaggagaagccacatgttgaggatggcagaccaacaaaatataaggacccttggttccaggcgatcatggttctggattgcctatgtttttttgtgaaagaaataaacttctgaatcatttaagccagttattttgagtgttctgtcattccgttgttattttgagttttctatcattaacagctgaacctaatcctaactgatacacatatatttaaaagtcaagctttttccaaataagcacatagactgggtcccatgggttttattgtgcagcaatgacataagaaaaactgttaatctccactctaaaaattttgatgctcaaattcagcactgacatttcacctgttatctatgactcctcctctttcatttttctactttcaccaaggtttcattgccttacttccatccttgaaattgttaatacctctaataggtggtaatatgccaggagttacgggaggctacaggataaacatcttcctggagcattgacaatttggagggagaaccttaagttttatattgaaaaacatggaatgggaggcaaaatttacatacatttttgaaatattaagaaaacatttttaaaaattctatggaattgaaatacaagaggctattaatttagatcccacatggtaataagttcactcttttctgcctctctttttccctaagggtactagatggaaacttgagaaaggactgcttattgataacagctgaggtattcctggaagcagagtaaataaagctcatggcccaccagctagaaaggtaagagattttaagcttttaacataaaagtattcttttcattttgtgattatctttcaaatactaccgaatttagtagatgtttccagacagttgtcttcagaatgctgaagtcctaccgtattgatagtgtttagtaaaaaaagatgctgagattcagcaaatttggaaatgtcttttggagatagaatgaatgtgagcatataaaagcacaatgaggacttaggttaaatatttaattttgtttaacatagagtttcctaaatttatctgactagggacccctctttagcaaagggttccgatataaaggtctcagttcttctaagaataataatataaactaatctgaggtattttctgtctttcaaaaatattttgggcaaaaagtttacccactctagggccgtacaagctaatgaaaatgtcaaatttatttgctttctaattgaatgatatcaactaagtttattaccacagttgtctcatgctgatcagaaacgttaattggaagttatacagtcccttatacatacctttattgaatactgtgtgccagccacagaatggtgatattagagtataaagtaaaaaaaaatttttttttctaatctcaagccatttacagtttggggatgtagcttctaaatatggaaggaaaataccaatttaataaatgtagtctggcgtacaaaatctttcaaaacatagtgatagactttgttagatatatcaaaatatacaagcagattgggttttttgtcacacctggatctggaggttcacatcaaaagaggaactatgcataaaagtatagttattctaattttgacaaaaattcggaaaataatttaaatctgtcaatacatttatatatttaaaaagcaaaaaattttaaagcaagtataaagcagaatgggtgataacacttgataattttttcttactctgtgatacctgcattaaataattttaagctgcttgactaacttaaatgatcaagtttactagaagcagtcatcataaaatataagctccattaggtcaggaactgtgtctgtgtcatcataccctgaagtctagcacattcctaccctattgcatgtgctcaataatgtttattgactgaatgatggggtaaatgagagatccaaatttgagggtaggggagtagtagatggaagaagctcggaagttagtggtgttgactaagaaaggaatggatgaatgggaaatggatgatataagggaggaaactgattaaaagcctgcatagctagagccagagattaaggggaagcctaagactggttaggaggtagtggtcagtccatgcaagggtctagaaacaatgttaagcatttgagactatcctgtgagctgcttgtttttttcataactgatccttgactctcattttgatagtactgctttagttcagaccattattctcccttcaacttagcagtagcttgtgccagttttctttgttttgttgttgttgttgtttagatttacctcttatttttgtcattttttgccagttttcttatgcatagtgtgctgcccatcttctatacttttattagtgatcttgcaaaaatcctcctcttgatttagttcacgtacttaaaatgtttcaatttcttactacagagttagacaaactttttctttaatgggggagtgggagactgggagactgatcatacatattttagaccttgtgggaaccacatgtgatctctgttgcatagtcttctttgtgtccccgcccccacctttaacaattttaaagtgtgaagaactcagcactttgacccagggccatagcttatataaccttggggcagtgggaagggaaggaaggatggtggaagggcaggtaatggtggaatccaaacattttaccatgttattaaaggcctttcaagatttggatatctctctggtcttactgtcttaatcttctatcctgttgatgagaagagtgaaactctataaaatatttgaagagatttatttggagccaaatatgagtagccagtggctaatgacacaacctaggagaccctgagaacatgtgcccaaggtggttgggctacagcttggttttatacattttagggagacataagacatcaatcaatacatttaaaatgtgcattgattgggtccagaaaggtaggacaactggaagtttggggggtggggtgctgtgttccagttcataggattcaaagattttctgattggcagttggttgaaagagttactatctaaagacctggaatcaatagaaaggaatgtctgggttaagataagaggttgtagagaataaggttttatcatgcaagagaatagactgtaaatgtttcttaccagacttaaagagtctgttctatcaatcttacggtctctgtgttgatattaatgttggtcagctgtgcctgaatttcaacgggaggagggtataaatgaggcctgtgggacctccacttcccatcatggccttaactagtttttcgggttaactttggaatgccctgggccaagggaagggtctgttggttggggggcttagaattttatttttggtttacagtcccacacttcagctatcagaggttctcagagtctcagtggactgtgctttattgtgcctcaacatgctgtctcctctttatgaaatatcccagaatggctgatgcctcttgctttgagaaaactcaactcaggcattacttcctttagtagcatttcagggccctctccaggattggctaggtatttagggaatggaaactcaatcagataaattcaagtaaaaagagggggtgggactcatactaatggtactggagactctcggatccaatcacaagacatagttgggcatcacagaaactattttccttcatgatttctcacctctgtttttctgtgcctactccattctggcttttattagtttttttttttatcagtaagaacatgacagaaaatgtctaccggtcctaaaatatgattttgaatctctgatgctcacttctgtgtgactgattttttctttctacagatttcctgaagaggtagtctgattggcttaactcggtcagtatctcccctagtttacctgaggcaggtatgtcaggatcatggatatgtaggattgcccttttctccaatgttggcagatcaagctctttaagaggggaatatgaatgcttttgatttatgttcccatagcctgtctttattattatatgtatcactgaattactattttcactttttctcttccttactagtctgattttaagggcagggactatgtcttattctttttaaaaaaatgtttatgtattttcataaaaaccatggtaacatcaagcaacttttattcttaatatggtattagatacaaaataggtagtgaaatgttttccaaataacttttataaagtaaatgatttgtattggaaatgctcagagtgctatgtattatctataacatttagtattacctatattttagaaacttgtttggaaacttgagtacgtgcttaaaaggttaagagtttgcaatgtttatagttctataaccaactaaatagaagatcaaattcatattttagaatccggatatttctaacgttagtcaccagaaatgtgtttgctccctcccatttttgtagactgatttaacagcactattttctatgaagtgaattgctttcctcatttgtttttgatagggatgtaggaaaataaaatattttatcgtgtgaatcacttcagtgatagaattaaaaatgacatgggaatattgatactacagcctaaagcatcttccttttcctcaacagacttaacctacatgtcatattttaaaaagggaacaaggagctaatagaataaatgattatatgatatcaccctttgagtcttctgatttgtaaattattctactgtagtataattttatttgctcttaaccttgcagtgcagaatgtagtttttctattctttgatatatatcatagcatgaaaattataaacaaaaaacaagcagagttcttagagaataaatatatcttgtagtgtttttttcatgactactgctacaaactacatcgatgctaattatataatggttatacagtactcccccgttatctgtggaggataagtttcaggagccccagtggatgcctgagactgtagatagtactgagccctatacatgctattttttttcctatgtagtaatgagcaggtagcatatatagcctggatgtgcttgacgaagcgacaattcacatctcaggtgggatggagcaagaagatgcgatttcatcactctatttaaaacagtacacagtttaaagcctatgaattgtttgtttctggagttgtccatttaatatttttagacagctgttgactgtgggtaactgaaaccatggaaagtgaagctgcagataagtggaggactgctgtgtaatgaattattacagtgcatattatttacatacaacttaaactccttctataagtttttattttttacttcaaaactctttaagggttctacaataagacattctgttacaaaatcacaatatgtccatgaaagtcaggaagttaacattgatatattgctactatctaatctgcaggtcacatttaagtttttccagttgttctgataatgtacttcatagaaaaaggattccgtctagaatctcaggttgcaattatttgttatgtcgcattggtcttttaaaatcggaaacagttccttaatgtttccttgactataatgattttggtgcttttggagattattatgccagtgaatttatagagtttacctcaatttggggttatataatactcttcattattagatacaggttctatatctttggcatgactattatagaagtgatgctgttacattcttattacattctatcagtggcacatgattttatctttcttatttctcgtggggttaagtcacatcacttgattaaggtgatgtttgccaggcttttgtgctgtaaattacttttgcccttagtaattaagctgtatagggagatataatactttgagatgatataaatatcctatttcttatcaaatgttcagtttattcctttatatcagtatgggttcatagaaccctctttatttacgatgtgatccattactatcattatttattttgatcatcatattatcccagatttaagtcctttcttactttctggccaaatctggcagcagtacaggatgcgtcttgaatatcttgtgccagaaagtaaggaaggacttctttatttccactacaagacccatcctgtactgctgaattagaatcagccaattcttcaaggagctgaggtcccttttggtggagaatggtatttacgcaccgtattaggccattcttgcattgctataaagaaatacctgagactgggtaatttataaagaaaagaggtttaattggctcctggttccacaggctatacaagcatggcactggcatctgctcagcttctcaggaagcctcaaggagcatttactcatggcagaaggcaaagcaggagcaggcacataacatggtgagagcaggagcaggaagagagttgcagggggcacacaattttaaaaaatcagatctcctgagtattcattcactgttgagaggacagcactgagccatgagggatctgccccaacacctctcaccaggccctacctccaacattgaagattacaattcaccatgagatttggcagggacatatattcaacctatatcacactccagagtctggatgctaagtgtgcttattggggtttcagtgttcccaggccctctcagtggacacagctagggacctacatgaccacatatgcgtgcatatacacattaacatctatatttctgtatctttatgttgagagccataagttaccattagtatcttcaaatgtcatctaataccaaggttcattctatatttataattcccttcaactgtagtatgaattcactcttacctagcacatccttgatatgtttacttatttgatcaatatccacgtatttacataatgaattgcctggtgccattaggcactcacctttcctctccatcaagtagatgtcttcctgtttgggtcctgacaccctgtgctggactagtgccactcctatcctttacttcatgtggatgccgccttagcccacttgggcattgacagctcacatcaggctgccttcccttcttttcttatccttctgagactccaacattaaatgcagggctgaccacccctttcccagcccaaccctcaactcatctatctcccagtggacatctttctcactctgcttagactcagacactgcagtgggctgccctcaggtagcctgtctgagctacctcccgtgcagacactctatatttgttttctctggtggcttaacttttatgtgaattttaagttggaagatgtgttttgccggttaatttcttccattttcttctattcatcttttcttaaaatgtttttctttattattctcttttcttattggcattttataatacatgattccatttggtaatgagcctgtctaataactctagaaattctaaaagtctctctgtactattaaaagtggtttacataaaatttctgtatagttgttagtcgtaaaatagcaggagaaatatttttgtcccatttttgacctcgaataagtcattttaccctttcagacctcagtctcctcatttgcaaaatgaatagttaggactatattaggaacctaacgacgaggtgcccgatcagaaatccatgtcataagaaaaagcctatattctatattcaagtgagagaattttaactaacattttttttttaaaaaaatgggcaaagaatcaggtgcagtgcctcatgcctgtaatcctagcactttgagaggctgaggcaggaggatggcttgagcctaggagttcaagatcagcctgggaaacatagggagatcctgtctctacaaaaaatgtaaaaattagctggagatggtggtatacacctgtggttccagctatttgcgaggctgaagtgggaggattgctcaagtctgagaaggtggagcctgtagtgaaccatgatcatgccactgcactccagcctgggtgacagagcaagacctcatcttgaaaaaaaggcgggggctgggcagaggaggcattttacatagaactacaaataaccattatatatatgaaaaagttcagcctcattagtgtgtcaagatatgcaacttaaaaattagttttttttactaatatgacaaaaatgttaaaaaatgatatccactgtttgtgttggtattaagaaatgaggtctttctctgctggtaaagtagaaatcaatactgtatatttggagggcagtttagcaatataaattgaaagccttaaaatatgcctttactttgatatagcagtttcacttctagaagttcatcttgtggaatttattacagatattgcacaaagatttgtcccaaagatattcattgatgataaaagcccattaataattatatgatggagtactatatagccgttaaaaatgacatctatttaatgacattactatttaattatatggcagaatttagataattgcattttagaggaagttgtaatactatttatatatttttcttctttttttcattgtcatagagtcatgtttttataatttataaagttatgtatcaccatacattgacaagactagactatgtactctgaaatgttaacagtagttatctctgaatggtagtattcaaggtaacttttattttctttttgcccttctgtattattcttggagcagatttaaagttccttataatgccttagttcattaggtgtagtttagtttacattattaggatataacaagtgatctccttctgaacgccaatgaaaacttcagcttttagtcaggcatggtagcattgcctgtaatcccagctacttacttaggaagctgaggcgggaagatcacttgagctcaggatttcaaggctgcagtgagctatgatcatgccactgcactccagcctgtgtgacagagcaaaactctgtctcttaaaacacacacagacacacacacacactctctctcttgctcgctcgctgttgctctctctttctgtttctctctgcagctttagggttttttagaattatgtaagattgatcacacacacacacacacacacacacacacactctctctctctctctctctctctctctctctctctttcggcagcgttagggttttttagaattatgtaagattgatcatttatacaggatacctaatagcagaaattgctatatgttgtcacaaacaaaattgaaagtagaatttaaacaagtatggagttctaaaataacatgctttatagcaataaaatagaggaaatacgaggaacatatacatgtttgtatgtggaactatcttagaaaactggaaagagggccaggcacaatggctcaggcctgtaatcccagcactttgggaggccaaggcgtggatcacctgagttcagtagttcaagaccagcctggccaacatggtgaaaccccatctctactaaaaatacaaaaattagccgggagtggtggtgcgtgcctgtaatcccggctactctggaggcttgaacctggcaggcggaggttgcagtgagccgagacgcaacattgcactccagcctgggcgacaagagcgagagtctgtctcaaaaaaaaaaaaaaaaagaaaagaaaactggaaagaggaagccttcacttttgtactgatctaagttctgcagcagaacatcaagcaagtgttctcagttcataggatcctcttatgtctatattaaaataactgcctattacctcaatatattttgtaggtttttttcttttcttttttagaattttcagggatttgctcttccctatttttctgttccatctcttcctctaatcttgggagcaattgttagtgctcttttaccccagagctgtttttggtcatatttctcatttgaagtttgacaacagtttgtatggaggaatatttatttttttctgaagtaacacatgtagatagcatacatgttaagatttttgtagattcacatttgaaaaatatatttatagggaccaggcacggtggctcacacctgtaatcccagcacttcgggaggccaaggcgggcggatcacgaggtcaggagatggagaccttcctagctgacatggtgaaaccccgtctctactaaaaatacaaaaaaattagccgggcatggtggcgggctcctgtagtcccagctacttaggaggctgaggcaggagaatggcgtgaacccgggagatggagcttacagtgaaccgagattgcgccactgcactccagcctggacgacagagcgagactccgtcccgaaaagaaaaaaaagaaaagaaaaatatgtttatagttttatgttgattctaccagaaccacatacctaggtgaaatttttaagtgttgaagataaagcttcatgttgtatttaatttggataaagtgccgggggcactttattaagcccctgccagtaggagacagagagaaagttgccatttcaaacctggaaattatgctgagtttttgtaggatgtgaaatgaagaatccagcccatggtgggataggaggagggaaaaaaactagggtgagtttcactgacttaagtaattgacagataccatttatgaatggtcaaatggtcattagccctggtctttgacttcatgcagctatggcaggaaggttatttcacaaaccttgaagttgatattttaaggatatttgtgtgtgtgtgtgtgtatacatatatatacacacacatatatatatacatatatatatatatatatatagtttttttttttttttttttttatttttttttcctgagatagggtcttgctctatcccccaggctggagtgtattggcaagagcatagttcactgcagtctcaaaatcctaggctcaagggattctcctgcctcagcctcctgagcagctaggactacacgcacataccaccatgcctggctaatttttaagttgcttttttttttttttgtatagagacagaaccttatgttccccagggtggtcttgaactcctggcctctgatccttctgcctcggcaccccaaagtgctatcattacaggtgtgagccattgcaccttgggcaggatttattatttttcaaacagttcaaggtatccttttaaaaacagctttttaaggtataattgacttataataaattatacatattcaaagtatacagcttgatacgttttgacttatatgtatacacccataaaaccatcaccacaatcaagatgataaatttgtcaccctcaaaagttttctcatgcccctttgtaatccttccctcccactccttctactcctgtccctcagcaaccagtgatctgctttctgtcgctgtggttttcattttctagaattttatataaatggaatcatacaatataatttctttgactgtctgctttcacttggcataattattttgagattcatccattgttgtagtgtcagtagttttcaagaaaatctctttattcgcttaagaatgccattgtcactttgaaccaagttattagtaaaagaagagcaaatccaagatgcagtctgatttgggacttttaatctttggcattttcgcctagctgattttttttttaaacccacaaggcattgtaaacattccagaatgaggacactttttcttatgtgtatctgtgcagtgactgcttcatagttacctctatgaaattaaagattatttgttacttaaatttattcctgatttcctgatgtattttgttatttttttctcaaagaaggagttatattattctgctttttacacacattggtatggcactttaattttagcttaactttttgggcattttgctttaaccttcattttactttatgttcatgagtgagtatatttcagcaatttacttaagatgccttcaccagtattgaagaattggaatggaagtatttacaatttgctgagaagtgggaaagtcatgttttagatttttcataatatttgaactttaggttacccaaatttactggtctgtctctttaataaaaatcatctgtttacacttttcctgattaaaggagtggtggtatttaatgtaatctatttctttctttcttttcttttttttttttttttgagatggagtctcactctgttgcagcacagtggcacgatctcagctcactgcaacctcggcctcccgggtttaagcaattctcctgcctcagcctcccgagtagctgggatttacaggcatgaaccaccacacccgactaatttttgtattgttagtagagacggggtttcaccatgttggccaggctggtcttgaactcctgacctcaggtgatttgcccgcctcggcctcccaaagtgctggcattacaggcgtgagccactgcgcctggctatctatttctttaaaaccttggagcgtagaggttggtagcttctccaagatgcagagttattatttccatgtgaagtaaatatggacttacccattttacaaattacagtttttttaattttttaaaatgtatccaactgatataatttcttttaacaatttaacaattactctgtgcctgctgttagcaagtaagatactgtgcagatacaacgatgaatagagacagccttataattttaataacagtagaaataatagaactgcagctgccattttatccagtactcatgtgccgagcattgtgctatatactttacatatactattttaaaatgcttacaacaactgtgaggtaggtgatactacccttgtattatagttggtgaaactgaagtgcaaagttgcttagaaccttgcacaatattgtataacttacgagtgacaaaaccaggttttggagccagttctgactcaaaagctcatattcctttggctgtgttatgtttcttcaagaagtagtaggcagtagaatggggtgggagaagcacacagattatataatagatgacattacagaacacaatgtggttgctgtaagcaaagcataaacaacatagcttgtggaagaaattttcaatctggattatggggaaggtatcacaaaggaagtgttatttgaagtgggccttgacagtgtaatatcaaaggaggcaaacattcatttgggagggtatattttagggagagctaaaataatatgcaaactgagggtgattttcagaggatggcaggcagtctgatactgttaaatgggccatggtgtattggaagtagcatttagaaggtcagattagatataaatgatagctaaatttgtatctctcaaagtatacctaaaaggttgagtctgtaggatttactaagtggataatcagatttgtatttatggtattcagtgatagttttgattcttaatttgaggttgtaagaaaaggagctctgagttggatgcttgattagttaatgtaagccccatcactatcttggaaactccatgaaggcaggtatctatcttgatttgccagtacatccccagcatctagcaagaagtactcatgccaagtacaaaatggaaactcaagagcaaggaagataaagaaatgttagaagaagagttaagagaaatcaaagaagccgacttctaaaaaattttacctagaactctcctggtgcttttcatgacagttgattttcctaccagtatagattgtagttacttgccagagagtaatgtgatatattaacaattgtctatgtgcagtcattgacttctccaacaatctatagctcagcaaaacctcccttccaggcttctgttatgagcatatttgcaacactgcaataaaaaggagataagcctggatttataggctttagattcagttagattaacaaagagatagcatttaagcctcccagaattgttatcgtttctgtctcagggtgcttgaactgttaatatttataactctcttagctaggtattagaaaatggtaataagggaatggagtttttatttgttggctaagaaatgggctgctgtgtaggtaagaaacttgttttgtagaggagggggatagtatagtggagagtagaaaagattaaggagaagggtaccaagggctaactccctctgaaagtttttctagagctatcagattgatccctccactacctctctactctcataatattttaactcttattcctaccaaattaattgaaaattgtacttccatattcctctttcctctagactgaaagtttctcaaatgcaaggagagttttcttcatctttgtgtctgtgtatagttgatgtttaaatattccttgtactaaactgagctaggcgctgttgtaggtgttaacccaaagataagttccttgccctcatggagctcatattctacttgtaatgacagaagcatggctattacagatttccttggatttttctagtgttctttttcctctcctcgcagacagcatggtaaagttgaatgtgagtgaagaaatggaaccctctcagataaaaattttgcatgggacaagggaagaaactttctctcttcttatttcctataccagatccacctttactccaggactctgaactttggctagttacacatttccccacaagaattaccaaatttttctgagcatgacattcttgaaacttcatttatgaacaaaattatgaaaaatgcaattttcctctatgcaccattagcttatttggataaccacatagttactcttatttaccactggatgaggtttcagtgaccataaggtgaagccattggtggagttttaaaaatgggtcatcaatctgagtagtttcagtatactgtacttgtccttaagctgatacaattggagctgtttatatagatcaactacattgtgggacaaataaattttgatgaattaggctgagaagctgaatatcagtaagtacattttttaaaattaaaagctttctgaagagaaatatggaattactaggttgcatcattctcatcagtgttcaaagtaaggatttttttactcttttaatggctgcccttcaatcacagccctaagggctgaattaaatgtttcttccacttttaatccctttggtggagttagatatgttaatacctatgtttaggatatttgtgtaggtgtgttgatatttcaagagcagtactctattataaaaattgttaatagtgactagttttggggtgacagtagtgttacagagagtaatttgagcactttattttctactgtttcaagaagtgtttcagaactatttttaacagtgtgaaaccactttgtttttcagtattcttgccatgagaaaaagaatgtgataagttattcaacttatgaaattcaagttacatgtgaattctgccaggtatgtgtgcaatatttggtatttttagccattttttacattttgggttgtaaaaatctttatagcttgtttctattaggtaagtatttgtggtgtttttttccatacaaaacaagtcacttacttagtatgtagtttagctgatactcctattttgtttttaaataatcaaattaaaagcatctaagtacacttagctatgacagacataaacatgttttaaggttttgatttcctctaaaatgagttctatcagtcccatgggatgttctgtgaaaaagtattcaaatagcaaatagctttggcaaaaatgccatactctgggtgctcccctagtcattttacattagcatattaaagactgtgaagagtcctgccaaaaaaaaaaaaaaaaaacaaagaaagaaagaaaagtatattttagcatttcccggatttgtttggccacacctttttttctttagtgtctactgacatccccgttgaaatgttttggggagcattgctattgaagggttaacaagctactatttgaaaaagaaacagtgttacagaattattagttgagtcaaatatatttgctatatagaatttctagaaagaaaacaagttgatggatgggataattaattgagaacttttaaatcgaaatttaaaagtaggaaagtaatcctgactcagagatgtctttttgcatttgttttgttcaaatcaggatccaaaaaggtccttaatttggttgtatgtttattaaatttcttctaatggaaaacagcaaccctcttcctttgctcttcttttcatctccatgacatttacttgttgaggagaccaggtcatttgttctaacttacagtgattcatcttagtgttttttgactttacgatggtgggaaagtaatacagtcagtatactgctcaattcatggtggggttatgtcccaataaacccatcgtaaattgaaaatatctgtattggatttggatgattgcctcctggtggtgttgtttaacttctttttctgtctcctgaatttccttgtagttggagctagggaggcttgattagattcactttcgacttttgacattccctgtccccacccttaacaacctttggtgttaatttaagactaatctgtgaattcagatgctgtcagcctggtccaaccattatgaagttcctatcaacttttctcctaatggttttaaaaatcagacattgatgatagttgcccagatccattatttcattagggattaaagtggtggtattcttcctcttccacttgttcctcctcctcccccttctccatgcctggttaattttttgtatttttagtagaggtggggtttcgaaagtgttagccaggatggtctttttttttttttttttttttttaaagagatggggtcttattttgtcacccaggctggattgcagtggcacaatcacaggttactgcagcctggacctcctgggctcaagagatcctcctgcctcagcctccagagtagctgggactacaggtgtacaccaccatgacgctaccacgacactaccacaagtggctgttttaaattatttgtagagatggggtcacgccgtctttcccaggctagtcttgaactcctgggctcaagccatcctcccacctcagcctcccaaagtgctgggattatagtcatgagccactgcacccagctaaagtggcaattttctaattattttattcttctgcacttgttgaaattctataaaagacttttccttcatcaactctttggttactggaaatacattttatgcacaaaaggcagattaaacacactgatcttttttctttctttcttttttttttttttttaaaccagttttcagatgagtgcattttcttagttgttgggttgtatgacttgtctgtcaagcccttactggtttgctgtatgccaggcttttctttcaatctcttactccacttctacttagagtcctgtgaaaatcagtcgttttttttagatatacagttgttcctcaatatctgtgggtgattggatccaggatctcctgaagataccaaaatttgaggatgctccagttacttatataaaatcgtgtaatatttgtgtatcacctatgcacatcctcccgtatactttaaatcatctctagattacttttaatacctactacaatgcatatgctgtgtgaatagttgttacactatattgtttaggtaataatgacaagaaaaaaagtctgtacatgtttagtacagatgcagttttttctcacatatttttgatccaagattgattgaatccatggatgcaaaactcatagatacagagggctgactgtacatattcttttatttttaattattttttatagtttgtgtccttctcaaagcttctgtaaggtttcctggaacacactgtctctggatgtagttacctgtataatttttgtctttttcctagtattaggttaaataactgtttgctccttttttgctttttattgaggtataatttaaacagaataaaatgcactatgtagagtaaaatctgttttatcaatcttttcttttatggaccttttgtgtcctgtttaacctttgcctactccaaaatcatgaagattctttcctatttttcttctagaaacttatgctttgcctttcacttttaggtctatgatctactgtgacttaatttttagtataatgtgagatagaattcatggggcattttttaaagttatgaatccttaattgacataacattaaggtcacgaaaagtcctgtgaaatgaagcctacacattcaacatttcccaaatttatttggctaaaaatcttttttccatgatagctaccatgctttgggaaacattgatctaaagcactgataaactactgttgtcaagggaatattacataattattattagttgagtcaagtactcttgctatataaaatttctagaaccaattattgaaaagaccatccttttcccacttaactgcagttgagcatttgtacaaatcaggtagccttatgtgtggttccatttctgtactccttcttttccatttctttgtatgtttatcattggactgataccacagtgtcttaattattgtaattttataatgggtcatgatatctggtaataaaagtcctctagcttaattacaattcttcatgactgccttgtttattcattgtcttttgcattttgttacagatttttcagtttctacacatacataaaagcactgggatttattttatttatttattttttttttttttgagacagagtctcactctgttgcccaggctggagtgcagtggtacagtctcagctcactgcaacctctacctccccaggttcaagtgattctcatgcctcagcctctctcaagtagctgggactacaggtgtgtgccaccatgcccagcttattttttaatttttagtagagacagggtttcaccatgttggccaggcttgtctcgaacttctgaccttaagtgatccacctgcctcagcctcccagagtgctgggattgcaggcatgagccaccacacctggctgaagaacaaaactgatataataattttggtttgtatctatttaaagatactgaattcattacttaaaaccacccagaagagaaacctccaggctcagatagcttcactggtgaattcttccaacatttaaggaagaattagtacctatcttatgcagatttttctagagaatggaaaagaattaacatgacccaattcttataaagccactgaacttagatacctggcaaggttatttcttatgacatagattgtaaacatcttaaaatacgagcaaaagggaggatttatttaagaaattctggtttgtttgttcaacattcagtgtgatataccacattaaaacaataagagaaaaaaatagtatctgaatagatgcagaaaaagcatttgataaagctcaatgtctactcatcattaaaactcgcaggaaactagaaattggaggaagctttcttaatctgataaagagtatccgaaaaaaatctgcagcatctgctttctccctgagatttacgtgtatttttaagactagcatctgcacagtgcaataaagctaagcacaataaaatgagatatgcctgtaccaggaattctcataatgtgagagcggtctgtgaagtcaaaaacatttttataataatactaaaatatttacctttttaaaattctcattatctcacaaggatttgatgccattttctagaggatacatgatgatatcacaacaggttgaataccagaagcacataggagaattcagctgtgttatactctgttaagccagatgttaaggatttgcaaaaagtgggaaataatgcctttctcactaaattttttgttttgaaaatatattgttttaaaaaatatgtgttaacatgcagtgagttcattgttatttttaaatcataaattaatatttttagaatttctcagttttaatttctgatgtggtcagtattgatagtacataaacaaaaacgttctttgggagcctaaatttttaagagtgtagaggatcctgtttgagaactgcggtgccatactgttctcactcattatttagtaagttttactagtggtcagttacagccaatcttgttagaatactttgctcttacttaaaaatttatatatcagtattccttagtttgtaaacatttaagaagcactagaaggataatatgttatttagataaatcgcagatatcatgaggaggtgttccaaatttagttataaaatagcttataatgctcacagattgtgtaggtcaaaaatttgtacagggtacaagaaaatggcttgtctctgctttttgtctctgcctagtactggcaccagcagcaggcatttgctattaataaactgtgattctcagtgtctgcctcagtcttaacttttcagggcactgccctttgacctcatttctctgatggatgtaagaagagttgatgattttccgtttgtttaacttatttctctttatgaggacaggaatgatgactttcaagttctttatgtgttggactagaaaccagaagtctagaccagtgtttccccaagtgtcatccttgcacctaccagtgcaatatcaagttgtccataggctatttgacaattatagcaataaatattttggataaagcaataaaacttttgttaacacatttcacaaattttgtatatgagattaataatggtgacttcctggaaaccatttgtattctcagtgatcattgcgtacatgctttaaacatgaagcagtgactactgtgaaccagcatgggtttcctaaaaatgagatatatcaaatctttggcaaaagttttgatacattacaaggaaacagcataaaatattgacaagacttttaaacttggactcagaagattaacttatgatcctcagtataccactaacaaaaagttggaaattaaggatttagaaagagatcagagttagagatacagattttgttatgttaatactaccttatctcctttactgggaggagagattccctgaggctgggatccatttctcttttatttttgaatttctctgagtcttctatagtgcttccaatataggaaaaggtgtaaatttaagaagggatttaagagtttgtttttagacatgttgatgttttggtagcatatttaggtagaaatgtttaagccaatagatacaaatattccactagaatataggactggagatggagattttgccacattattttcataacagtacagtaggatccttggaagactgcatagtatttgctcatttaattttcttgaataaatgaaatgtgttcatttcaccataagtacttttacactgttgagcaggaaaaagtttgcctgacagagcagtgttcctaacctttttcctatagtgcaaaatctgcatgttacatgtattttatctactctcataataagaaagatagaattaaaatgtcagaaaagtgttttattttgtattaaaatagaaaagttaataagcttaatgaaaaatcttgagatttatattttaaattattctttattttaaaatatgtactctaaagtgtcttctgtttgattataggcaatacaaggacctgtggaatatgagtgatgacaaaccctttctatgtactgcgcctggatgtggccaggtaatatataaattactttaaattattttgtatatttccacttattaaaacattgatgatataatatgttatcactaaaagtattttcttacagtattctgtaaaattttagagttaggatgaaaaaaaacccaggaaacttttggcaagaaattctgctttttcttcaatagtgcaactgagctttagaaagtataatccaatacggagggggggagcattatatcttgtaatggaaaggtggaaatcctacacaaaagtccaagatataaaagtataatttgactgttattggttgaaaattattgataaactgcctaattagaaatcagatcgatattatatgagaattattttgcttactgaacttttatgaaattaactggtatttacttcttagagtatcactaatgtattaatgttgttaagcctaacgtctttaatattgggcatgtggcagcagtttcagaaagtaatattttagtttttttttaacaacccactaaattattaatctattcctattatacttatcttaaaataactatagacaggaagaattaaagaataaatgtaatgtatagcaaagttacaaagtacttaaatatacggaccataaatgtaagtaagcattattctttctcatttattttctttagttgatattttaaattgaaatataattgacttacaataaactgtatatacttaaaatgtaccatttgataagttttaacacacgtatactcaaaaccatcagcacaatcaggatagtaaacatacaatcacccaaaagtttcctcatgcctatttataattcctcttatcccacctaccttcatcaattactggtctgccttctgttactgtagatttgtttgcattttccagaattttgtataaatggaatcatatagtatgtatgttttttcactccacataattcaatatttctccatgttatgttaccaatagttaattccttttcattgagatataatatttcattatctcacaatttatctgttcatctgatggatattggtttacttctattttttagttgttaataaagctgatgtgaatacttgtgtacaagtctttttatggacacatgctttcatttctcttggaggaatacatgggagtataatgatgggattatctgatagatatatgtttgactttttaggaaattaccaggctgcttttttcattgtgtttgttggccatttgtatcccttacattttgtgaagtatctttttaaatcttttgctcattttaaaaaattgggttgtctttttattattgagttgtaggagttctttatatatcctggataccagtccttgtcagaggcttctttttctgtggtttgcatcttaattttcgtaataatatcttttgatgagcagatgtttctaattttaatgaatcctaatgtattaatttttttcctcttatggttgttgcttcctgtgacttgtcagaaatttttgcttgcctttagattatgaaggtattctcctttgttttcctctaaaacttactgtttcatttagatttctctttaatcttgaattaatttttgtgtatggtgtgagataggggttgaagctaactttttttttttttttgagacggaatttcgctcttgttgcccaggcaggagtgcaatggcacaatctcggctcaccacaatctccgcctcccaggttaaagtgattctcctgccttagcctcccaagtagcttggattacaggcatgcgccaccacacctggctaattttgtatttttagtagagatggggtttcttcatgttggtcaggctggtcttgaactcctgatctcaggtgatccgcctgcctcgacctcccaaagtgctgagatgataggcgtgagccaccgcgcccagccagttgaagctaagtttttaaaaaatacgggtttagatatcccagcataatttcctgaaaagatttttctttcctcattaaactgctttggctcctttaatgaaaatcaaatgattgtgtaagtgtgggtctgtttctgggcattatattctgttccattcatcactctgtcaacttttatgctagtaccacaccattttgattactctagctttacagttagtgttccagtcagttagggtaaattctccaatttagtcctcatttttcaagatatttttggttagtctcttaagttttagtcattctggtgagggtttaatggtatctcattgtaattttgatttatgtgatatttaatgatgtagagcgaggtaaacataggagttatcagggttaatgcaattttagataggttaaccagggaatgtgcctctgctaaggtgacatttgaacaaagacctgaagaaaatgcaggagcaaaccttgtatgtttctagactaaaggagcagcaaatgtaaaagctctagggagggaatgtgtatggtgtgtttaagaacagaaacgcaactactgtggctggagcatataatgaccaacagagagaaggttaagagaggaggtcagaggagacagaaaaaaagacatatcctatgataaggtgtttgggttttattcactgagcagtgaaaagccactgctgagtggtcacagggagacaagaggctgacagcagtccaggtgagagatgatggtggtttgaattaggtgttaacagtggacacagagagagaaataggctaatttgacatatgttttggagatatatttgacatatatatttttctgtaaagttaagagagctaaaaactacagttctctttgcacctagaattctgcatatgattttaggtttcaccaaccaaatttactctttctggtaaatcagatttactttaacttttttttttttttttctcgagacagggtctcactctgtcacccgggctggagtgcagtagcatgatcatgacacactgaagcctcaacctcctgggctcaggtgatcctcccacctcagcctccagagtagccgggaccacaggtgctcaccaccacacctgactaattttttgcttggtttttttttttggatacaggatctctcaatgttgtccaggctgttctcaaactcctgggctcaagccatctgcctaccttggcctcccagtgtgctgagattgtagacatgagccacttcgcctgacccactttactttttggatttggtactgagttaaatggaatgagagatagtattactcaaatcatccattttgctggcttggagtgaacaaacaacttgattctgtaatccctgaagtacagctaatgcaatatgtgtttctagggccagcctttggacaaagactagttttgacatgttctagatatcattcttggagactcaaaaaagccctttcctgattctcttctgcttaaaatagttagaatgggttttgtgattgaattcttactaatacacatgccattttaaataaaagcattacaattaaacagaagaaaaactgattgctgaacattagaatttgtgtgtgtatgtgtatcataaggaattgttaaaagacctctgtaacattaactatatatgtgaaaaacattaagaagttagggaattatttttttaggtttcctactattaaaggagttaacatgcatactttctacctccacttccctatcccctaatgtctgataattactcttattttttccattgtcgaggtttgtaatacttacattttgtcttatccataattcccatatttgcttagttttacttctgtatcacaatagtatagatggaagggtgaaagctaagctttagggcacctctggtgtttaaaagtcagaaagaggaggagaatgtagcacagaagattaagaagtagcaaccagtgaggaaaattgaatcttgaaagttagaaaaaatatttcaaagtaagagaaacaatatagtcatatcctaaataggataagatgataattcagtatttactattgaatttagagactatgataagagtagctttcaatgaaggggcagtaacaacagtgtaattggagtaggttgaagagagaatgggaagaaccagaaatggagacattataggacagttctttcttggaggtgtagctaaagggaaagtgagatacatagcttcaatgtaggattgaagatggtggaacttttttgttttgcattttaaggtgggaatatcacagcatatttggcaatgcagaaaatgggaccattgcaggagtggggtccttaaatagctaggagaggatgggatttagttttatttttaaaacaaaattgggaccatactgcacagttttgtattctgttagtatttggatgacattacacatatcagcattttgtgtattaatcgaaagcatggctttaagtcactattgcttgagcatgtctgattccactattataaacttttaattttggtattataagcaacattgtgatgaatatctttctacataaccctttgtatatgtctacttagtttcttaaaatacattttggaactagaataactggatttaaatgtttacacgtttctaagtttcttcgtgtattttgccaaattgttttttaaaagctaaatcaattttttatactcactcataattgaattctcactaatagtgatgcttttaaacattaaacatttgatcctgagtattattttaggggggcctgtgttcgtaccctaagatacttaaaataatctctttgcaagtattactgatcaaaatataacctggctactcatccatttgttaaatcttgctgagaacagaaatggtatggtctgtttttagatttatataatatttcctaggaactacttagtaagaattggttttagaagcatcattttgatggtgactgctttttcacaagattgctttttcacacagtctttttaagtttcttgttattttttgtcaccagtaagcaatgacattattctgaatttgagtttcagctttaacacaatggtcttagttaaatttaaggtttcaaatagatttttacaatttaaaatctattttggtgacaatacaacttcagagagagtcctatagaaatgattacaaagagtttttaatactagacttgtgctattaaatcttttcttgtatgcctcagttactcttaggttttccacatgcctgttaatttcacttgttttaaagtgatgctccttggaatttagtaaaagagacactgagataatttggtgaaagattcatttatctttgttagtcttccatatacttggtagtatttttgcttttggtgccccgtcattgaaaaatgtttctttggtagaatgtttacacattataagctgttttataaaggagataaagattcattttatatttagtctaaagtgacaatggagatgtatgtgtgggagtgtgtgcgtgtgtgtgcatgagagagacagtgaatatatcagtgtaacttcctgctgttgttcaatagtccttaaactagtgaaaaaagtagtgaaatgagctattggcccaatggcttgaaaacttatttgtgtctatctaatatgtttaaaaggaataataatatatcatggatatgagtgtatgtattaactatagaatgactgattttttaggaagttaattctggtgagagtggtcaagccttagtaacacagatttcccagatatcagaacttaaattattatagaagcaactgatctaccttcttcccatctgacaggttaccctttctttttaaccttttaagagagattgctacctgctaggcacctatcaaaaaaaaaaatcttttttttttcactttttccattgtttattgagctatatactcaaggtcttagtcttgtttaacaaaatacttgtgtttctttgtatatctacagtattttctttggggttgtgctttgaaatgcctggaagaatacagtttatgaattcagtatgttggtgttgctagtaatatagatatttttacaaaacttatttttggaataaactttaatttgactgggaagacatttcatatagattctgtaaaaaaatttagcttgcagctattttataaataaataaagaatgcatttctttcatattaaacttctggtgactgccttttcacaagattgccttttcacacggtcttaagtttcttgttaaaaataataaattttctcagataaccaaggtcaaattcacctgtatcaagtgccagtgtattttgtcttttgcagtgtttttgtattttgagtgtattttgtcctttgcagtgttgctgtccctgtatataattaatactgttacaggatcagtaatccctttgtaaattgcatttagggaaatttgatctgtggatcttatatgagagtttataaatacatattccttgcattctcccttttaatattcatatgatcctaaatatttgttaggttgcttctggccacttctttacacttaggattgaacttggtgccatttcgtatgttttgtacgaacacaatgttatttattctacatgcagttctttgatttgaatatttggggtcaaactaatccaagcaaagaaaattgatagaataaaattcctaggcgacaacattccaacttcttatctattaatttgttgagtttgcagttttaaaatctgggacctgcaccaaaatgcattcattcacaaatgtttaatgattgccttcagtggaaaagccacattatgaggttctttgaaacataaactaaatattactttcagatgcttttagtgtaggatgtaagacacgtatatttaaaacagcaatacaaagaaaaagcataaaatattaatgtcagtatgctctgcagatatgttcgttttctgagaactttgttattcagcaatctgtcaaaagtaccactgtttcttatttctccaaaattgggggagattcttataatgataaagtaataggaagacagtacctgggtggggaaaagtttgattgtggtcctactgcctatagttgctgcccagtaaatgtctgaagagtgaatgaatatgtcaagtagtggaagtgttgttgcatctgaacactctccttcagtggtaatacaggcaggttctgaagagaggttataaaataatagttttctgttggtatgtgaagtaatccaaagactaagtgataaaatgtagcaagattaaattgaagttgaattcatcttaatgaacaatggtttagggtcttttttagccccctcagattgatctttaagattcatctattttattgtaatgaattcattctttcagttagcatttattgagtacttaactatatgctaagtttgggggaccacggtaggagctcagcctacttaaaaggacagacatatgaaaatatgataggtgctataaccaaggcattgtgccgcacacatgagatgattttcacctctacaggcagacggatagtggactgggccaaagatgttaaaatgttaaaaatgtttcattcttttacattgtgtttaaggtaaccctaaagctactattattagttgcatgaaaggatgtagtgaattgggtaggggaaggagaccacaagaaatggaattcattttgatggtttgggcaaaccaagttcaagtatatatattttaacatcctcacttgtaaggttataaagagtgaattgagatctgttaacttagcattttaaaattattgctctgaaataacagctccctgttttcagttataaatgttgcttaatgagcatcttcaaaaatgttgatgttcagacattggagataatgcatttattatgttgtaatcataaatgttacctttggcatgcaaaacttatccaagttagaggtaggaaaaaatatgatggataactttaaaaataaaatgttctaaaaacaactttgctccatttttatgtaagaactctcatgaaaaaattattttggctactttaaatttttttattttaaaatgagctgttttgttattgtatcggttgctatttctttgctggattaaaacaaaggcattcttttttatgtggtaacataaaaatcagatttatttctaaattttgtccaggcgtaatacttttataagaaaattctcttttaaaaagtggtaagtaaccttaagtctaggtaaatattaatactacagtactttcttgaaaagtcattgaaccatggagtatagtttctactatgataagacaaattaatggtggtctatttttagtatccataagaaatttatataaagtttctttgcctccaattttatttttaaatgctctcaaatgagttatgtgacctagcaatatatcagtattgcttattcttgagtaataggtttctctgtgattgtttgcaatctagtgtgctatctactaacaataacggattcttttatagtttaaaaactgctatttcactgttaatggtggttttacatgttgtggaaattaatttcctaatcattttacttatttgatcaaattgaaaatcttaactatattttaaaactttttgccacagcgttttaccaacgaggatcatttggctgtccataaacataaacatgagatgacactgaaatttggtccagcacgtaatgacagtgtcattgtggctggttagtatatgcttttattaatagcttgtatacatatttcacctggaatgtgcacaatttttgtgtattctctgtaaataatatagtctggtgatattccaatgacttcattatagtaaatgttggcaacatgtattttacccattacattttcatgtttccttctgactattcatttcatttttttgtgtggttttcaaatttatattccaatgtcgattttgtggaagttcattagaactctgggaacattcataccatctacaaattttacatttaactaataattgaactaacatggtatttagtcagcatttcttttagctgtcttgtacaactgacttacaaggctgtgtgaagatagaaaatgatcaagcttctcccattggagaaagaacagtgagcagacttgttcattagagttgtttatatttcttttcagactaaacatttgtattagtaaaatattctcagtaaggaggctctaaattcagtcaatgcagtttttgtgtgttgacactatgaacgtacagtatcacctaagcagatgattatttttcactgtatgtgaaaagaaaaacccagttcatacattggttgattgtcattccatgctgtattagctgcctttttttggtatttaaatatatacacacacacatctatgtatatatacatatatgtcatgtataattttgctacttttttgtatattttataagtattatgataaaacaaaactatataaatttcagatcctttgtgtcatcacagatttacatatcataaatattcagattaactccagatttttcttttctcttgtaaagcttgttatatatcatataagtctggaattacacccaaatactgtaatacttttaaattattaatcagtatagagaccaaattgttctatgcagtgttttggatagataataaagcaaatattcggtggttttccctctacttacagtattgaaatttttgtaatgaagaaattgaaggtaacaaagttaatttatcgaaaacaatatacgtaggaaaaatgtaggggaacttccaacatatcctaactaagttccataagtaacttagagatatgttacttatacagaagagtgagataatgcttttttttttttggagtattttacattagacattaagagctagaaccaaaggaaccaaacaagcaaaatagtaacaacctcgaaagttcactctcctaggcatgaagctctttgtttctctgaaactttctgccttagcacaatctctgtctgtgtgtaactctttaactcaaatatgttttgaaattggtttctagaaattactttcctgtctgatcacatttaatgcagtagaaaaatagagcacattcaaacacagtacttgaccttttttttcactaacatgttgagatgaataggttaacattactatgcaaataaaatgcatgatgtgtgtggtatatttttggtgatcagtagccatatgcaatgtgcatgttaaatgattgtgcctatgttgacttttctgaagtctgatggttccagtaatcattgataaaagtgacttatgcttatgtattttatttttttaagattttcccctccctttaatgtaagttaagagccttctgatgaacttagatagacaaaccctttgggtgtgaacagaagagtcacatttagatttgacctactaatttagtcatgatggacttaagctaatacatgtactttacttactgtaatgtgatttttgagatcttttgggaggtgggaattaagggataggctagaaactagtaaaattatgatataatagagtccttttagtaattctgatattactaacagtgcctgaaacaggcctgcattatgtctagttttgtattacaagtgggtcattttagtgtgaaatatatttgtacatagtaaaaatactagtcctctaggtatacatgtggggggcaaaggtaaaataggaagtaatgccctctgtggggacataatggttaacaaatatgtaaattttaatcttacaaaaggaattaggagtattttctcttaaaccaagagtcttccttagtagagtacttttacttcacttaggctagatccctgctatagcctgtaaaattggtgctctaaaatatattaaatgtgaatagaatttgaatgtgctaccaactctaatcaatatgaatagacacccttgaaaatagtaacactaaataggcagaatttataagtttcttgcttttcattcagtgtaaatcttacctggcattttttgtagcctatacatggacactgagtacctatgttaatgtacatagtaggagtacatattcgagtaaagttgaaatgtttcatgttgtaagaaaatagagtagactctttctttactccttaggaattaagctagaacattctggaggcatgtgactcacacatattccttgtacctagcttgtaaaatgcattaaattagaaaattagtttcagtagatagtggtaaaaagagggtttgttgttttagggctgttttaactttttttttctttcttacaatatttttatctacctattaaagattgttttatcttagtttgctttcataatagagtatgaacagctagtggaagaaccaagttaaagcagatatacatgctcttatcctagttttccccaaatttcatttatttaaataattgtagtttttaataatgtaaatttaaaaaattctttatactgtgttagataataatagtttatctcttgagtagaggatgtttatgccattctactcagaaagaagcagtggactaaggagcaaaaaggacttctttcctactttcatatttcatagttcttaaagttggaggaaatacgaagtacaacaaaaatttaaccaaattttgtttgttttaaaggaagaggtctttccaaagagagaattaacaactgactgaaccagtcctgctaatttgttaacttagtagctatattttagagtcttaacatatttaaatatgcatgattacttcttgacatttatttcagatcagaccccaacaccaacaagattcttgaaaaactgtgaagaagtgggtttgtttaatgagttggcgagtccatttgagaatgaattcaagaaagcttcagaagatgacattaaaaaagtatgttgtaaccatgaaatttaaaaagagtacttctgacagaaaagtaatcatagtttatacttcctgctttttaaatttagacacactgtttttgaacttataaccttttccttattatttgaattatagatgcctctagatttatcccctcttgcaacacctatcataagaagcaaaattgaggagccttctgttgtagaaacaactcaccaggatagtcctttacctcacccagagtctactaccagtgatgagaaggttagaaatttttagaaatacaaagtaagggggaggaacagtacccaaataaagtttactatttaatctccataaaatgttaatgtattaaattcagtgtcagcttgcaatagttttatatgtgaaagcctgtcaatactcagatatttcagggtaagaagactgcagcttttattgtacatagaaaaattataggggagaacagtcatgttacataaaacttatttttaaaagatatataaatttataaatttaacttaatttttctgtgttttgctattttatatttagctacttttatacagtaacagcttaattaagaatctattcaaaaaattatttgaacagtggttttttagacttttacaggattaagggactagttactcattctcagcagtggatctttgttagcggcaattaggacgatgatgatactagcttgaatacccagataatctgggaccacctgggctacagttgtgtgttgagtaacattattatgggaacttcttgatcactcttttgttcacaagcacatagaataagcacatatttatttgggagtaccatgcaggacacagcgaagggcaatgggacacataaagaggcagtggcaatattcttttttagattgttattctaaaaccatacttattaatggacttctgtcatggcagaggagctagaaataaggaaatacagaaaaaataactttttggctaagaataaatgctttgttttctgtttttttttcttcattttctttttctcattttaaaagtacattctcattcttcttctctaagaatacagaaacatgaaaagaaaaccaaaatcacctattagcacataattgaataagaattactatcttgaaacatttttttctagatatatacatttataggtacaaatacataagtgaatagttaaatagaaggatagatggatataaagatcctagctttattttatattgtgctttagaccctcagtattgatgaatattttcccatgtcattagagagttccccaaatcatactttttaatgattgtactttattttattatatgatatgtatatgtattatgttatcctgttctttttggacataaaggttgtttccacattattacagttattggaaatgctttttaaatctctgatacaaatcttttttcctagagagcatttcattcttttcacacttaacagtttttcattgttcgtggctgcttcagcatcttttaggagtattccttctttctgcattccccaatcattaggccctccttgagcaaggtataccatatgaaattgatttaaaaaaaaaaaaatctggacctcttcttctttcttgattttcttcctaggtgatctcatccaggcccataactttaataaacatctacatactgatgactcccaaatttctatgggcataggtatctcaccagattgccagatttatatccaactccatcttgacattaccttttctatgtctaatagacatcttaaacttaataggtcaaaatcagagtccttgattcttcccccagttttccccatctcagtaaattttctccatccatttagttgttctagctgagaatttaggggtcatccttaatttcttctttcttttacactgaaactaacagcatattttatcagacctgaatctcatcctctatgtctgtgttcagtgacaccacgtaagcccaaaccatcatcatcttttgtttggattattaacagttaccttctaacttgtcttcctgcttctacctccaatccattttctgtaagatgacttttaatacattaaatatgtcacctgcttaaaatctttcaatggtctaccattgtatttaaaataattcacactccttggcataagccctctttgatctgggcctgtctacgcatctatccttacctcatgcctctctattgtgttcatcaaatattcaaagctttttcctacctcaggacatgacatatatggtattgcttccttctccctacaatgaaatgctctcctcctcatccttttatcatcagttcgaatgctgtttttgcaaagaagctcacctattcttactatgctgtctaaattaactgactcttccttaccttcagctaatctttcatcctttgttacattgcacgtattattctgtaacacttaacatttactacaatctgaaattttcttacttgttttacttgtttattgtctcttccttgagagctagtccttgggagcataagttctcaacttactgaataaatgaagttacaatactactactttatccttcttcctatgtagcttaataagattttgatgataagtggcagcatacaggccaattcataaaacaccatagacccaatttttacactgactatttaaggagttctgggtaaaatcttttaaaactttttgttctataatttgtaaaaccagaggaaataccatctttaaggtcttggctgacaaattctgttttcctgacttgaaagagttcactccggtaattatttattttacattcaagatatcagtattacgtggccttttgatatgaagaaattattgatatagaagaggtagctaactggaattaacaattatttgtattgctctaaaagttcttatttctgttacttaattgtatcagccataacacagtctcactggacctgtttcctcttcatacagtataatgagggagggggactaaacagtcccttctggattttaagttctgtgattctctgagaatggattatatttttattttttattaaaattctcttggtatcatagccaagttgcccagtctaacttatttctggattgataggagaacaagttgtactggaaaaaaaaaaaacgagtctttttaaaattaaaatattaattgaacattgcatttgaatctttacagctcttctaaaatgttcttttaattaatttgagatattaatttgcttttagcagttattattctgtagatgcttttagaagtgtgttacattctgttcactaaggtacatgatttgtatttttaaatgccacccttttttatctcattgttaaataggaagtaccattggcacaaactgcacagcccacatcagctattgttcgtccagcatcattacaggttcccaatgtgctgcttacaagttctgactcaagtgtaattattcagcaggcagtaccttcaccaacctcaagtactgtaatcacccaggcaccatcctctaacaggccaattgtgtaagtgattcaggccaatcattgaacatatacatgaattaagtttgttttgtaatgatttttcctaagacatttgattattcaaactaagatcttagttttgtatgtgtgtgcatgcttcgaattttggaaaaagtacttgcgtagtcttctttaatataaatattaactaacagagtgggagataaatacaactaaaaacaaatatagaatgtgaatttaagatagtcttattttcatgctatttcacacaaaatataaaattactgcatcaccagattccatttctttcagttcttactggtagctcccaagagctctctgatgacagtttttctcattttacaaattggagattgtcctaagtaaatccataacttttctcttcttttcaatactgctacacaggttatgcatttaagatgcaattaaaaataattaaattttgctatttgctttgctgtggttagaaaatgtatttttaaatgatatgattataggagtaaaaatactattgtatttttaagagacagttggtatgaatctcttttttaaaatttctcttcttttgtttttcttagccctgtaccaggcccatttcctcttctgttacatcttcctaatggacaaaccatgcctgttgctattcctgcatcaattacaagttctaatgtgcatgttccagctgcagtcccagtaagaaagttagactatttaaatctctatcgcaaaactgatctttgtagtcagaaaataaagttggctgcttgactggcttatgaaattgaatttaacataatattgattagcagttgatagtatttatttgttatcattgtaatagcatataccattcaaggtatagctattttttctcttctccccaaaaccttaattttttttttatactgagatcttcttattcaacccatatcaatttgactggacttgtagcattcaaatattaacacagatttcaaattttagaaagatatttgtactagaatacttgtcaggtaactctgtggtatttctattagtatggaaattgtttataaagacacactctgaatttttgtggtcaagtagggtttgtagaatctttgatagcccagcatgttaaaatgtaaatgttctagaaaaataatctttcactttccctgtgaaaagaccccgcaaaaaagttttttgaggggtgtgttaaatatataaattttgaaagacgtagacaaaatagttaactatctacttatgatatttaatagtttggccaggcatggcaactcatgcctgttgtaatcccagcgtattgggcggctgaggtaggaggattgtgtgagcccaggcgtttgagactgcagtgagctatggatcctgcctggatgacagggcaagaccccaagtcaaaaaaaaaaaaaaagtaatagtttaatgaacatttaaaaacacattgtttggaataatgtgtgttagaaaattgcttttttcttacttacattacataaaacagttttattcaaacaaactcttcagttatgtctttgacattcaaattttcatcctgagaaccactttttgagacatctagcacagtttccagaacacagtattttctttttcatctaaatcatttacgatattactttatgaatctctctattattctctccctggaaatcttacaccaagcattaggtacttatttatgtaataaaaagatagttttttcttttaccttctaagatgcttgttactgatcagtacagtgtaatcatttacagtgtagcttttaaaaattatttttaggccaagtgcagtggctcatgcctgtaatcccagcactttgggagaccagggtgggtggcttgcctaagtccaggagttcaagaccaggctgggcaacatggcaaaaccccatctctacaaaaaataaacacaaattagccagttgtgatggaagcacctgtagtctcagctactcagaaggctgaggtgggaggatcacttgagcctggaggttgagactgtagttagccgagattgcaccactgcattccaggctgggcaacaaagtaagaccttgtctcaaaaataataaaaaataaaacttatttttaaaagcttacttatagtaacattccaacactttcggtgagattacccccaagaatattactaggattaatgtttgatatttatatctttttttaattaactaattcttccacgtgatctttcaaactatccaaaattagcattgattgacgtaatttcaagataatgtgccttctttaaaaagaactttgttgttcaaaatgcattatttgagagactttgtaaggactcagatataaggtatctgcttcctctttactgagaatatttttttgaggagggaaacattcttgccttgtttttgagattctgattatcctgttacatgtacctagtgatgaaagcaaccggaaatgaaagaaaagatatgctttatttatacagtaactgtgttcactcagtgttaggtttaagaaaaaaaaggaaaaaaccaaaatggtaaaacctgttacagattatttcagaaattattacagtgtgttatttgttattatgtggtatgtataagaaaattcattgtatatatttttagaaaagcaaaattcattgttgaaattattttttatgcctaagtgtcacaagttttgacattcttcctttcatattcaaaatggaagtttgacagatctttgagaatttttgcattaatcactttgaatattatgaatttctaacagggaccattaagaaagaaattgtagaaactgaaaattaggaaagcacacgtctcagaaattgacaacttttgaaggataagtcaggatataagaccaaataaggatttggtatagagataaaatcagctggtgataaatttacaatgttctgattcttaaagtctcaaattattacaacagcagtaaagtacaaatctcattttgaatatattctctagcaattatttttccttatgtcatgcatagctcgttcgaccagtcaccatggtgcctagtgttccaggaatcccaggtccttcctctccccaaccagtacagtcagaagcaaaaatggtaagccagattttatttgttctgtacattgcttgaggctgttttgaattaatgttttcactaaagcctgcttcaaatgcacaatttagatcacatttttataaagttacggactgttttatactatagataaaccacaaaatttgaaaaaagaaatcttcctttagcatagtgagtagttagtgatactttaaaattagtggcagattagaagttctgtttcttgtcacttgttgtttgtctggctttttcttgtggctttttctcctcctagtggaaaataggagtattacatctgaaactagatgtgatcatctgaaggcagtgctgctaataatgatgagtggttttaacagtattaaaaagaattctgaaatagtgtacaagttagcaaacatgataaaaccatttttttctgttgtgctgtttggatgctattaaattaatgtttagatgtgtattttaattttaattttaatcctaactccactattcactacctttaattaagcaactgtaactttcctgagattgcatttcctcatctgtaaaataaaaagattaagctttggtttctggggtacttcttaaccctaaatcctataaacgttctaattttcttagtagaagatctgacgattctatttttaaagaaaatcagggccgggcgcagtggctcacacctgtaatcccaagcactttgggaggctgaggtgagcagatcacctaaggtcaggagttcgagagcaacctggccaacatggtgaaaccccatctctactaaaaatacaaaaattagccgagcgtggtggtgcatgcctgtaatcctagctactcgggtggctgaggcacaagaatttgcttgaacccgggaggccgaggttgcagtgagccagcatcgcactattgcactccagcctgggtgacagagtgaaactccatctcaaaaataaaataaaataaaataaaaatcagtgtaattctccttgctgtgttataatacaataatgtcagttaattaataacatcgattaattgggtagatgttaacgttctatatcataatagggctaacaacagcaattaattaatgtatccttaggaaatcaatagattagtagttattagacaccttctatttgcttcagttatttgctaggcactatactaaatacaaatttttacatgctaaaacatattgcagagctgaatttatttatttatttattttttgagatggagtctcgctctctcacccaggctggagtacagtggcacaatctcagctcactgcaacctccgcctcctgggttcaagcaattctcctgcctcagcctcctgagtagctgggattacaggtgtgcaccaccatgcctggctaatttttgtatttttagtagagacgggttttcaccatgttggtcagactggtctcgaactcctgacctcgtgatcccccctccccagcctcccaaagtgttgggattacaggcgtgagccaccacacccggcctgaaaaatttttactgctattctccattagtgcagacaatcagtcagaaatttgcacaggacaccctgttttagcaataaaacttacatattatctgaatgaacagcagttggttgaagagtataaaaattaggtggttattgattgttagagaagaccctaaaaacccaaggaggaaatttttcacatcatagtatgttcaggtcagagctttggaaatactaagatgaatcttcttcacttgatagcagaagagcttcaccaggggcattttttgcacttcctattttagtatactgattgatgaaaaattcaatttaatttaccatgcagtgggaactgaatagagcagatatagatattaaaaggagatcctgttattgtgtactgcatctaaaagtatttttacatattcattggacttttttctataaattaattcaaaaggaacaaatccagttttaagaaatacctttatttacaagagtaggccatatttttagaaactgttaaactttacacttaacctgaataactgtttcttttaggtcatcaggaaattaaattaaaaagaataaaagtttctctctttccgatcagtccactccatctattctgatgtttgtaaccatagattagttatagaatttcatataaatagccactttatactcttatgtccagctcagcatgtctcagatttatccatgttgttgagtgatcacagtttgcttctttttattgctgagtggtattccattgtgtgaatataccacaatttctttgtccattctcctgctcatggacactttaatggtttctagtgtttagctattgtgaataaagctaccatacacagtctttttttttttttttttttttttattgatcattcttgggtgtttctcacagaggggaatttggcagggtcataggacaatagtggagggaaggtcagcacataaacaagtgaacaaaggtctctggttttcctatgcagaggaccctgcggccttccgcagtgtttgtgtccctgggtacttgagattagggagtggtgatgactcttaacgagcatgctgccttcatgcatctgtttaacaaagcacatcttgcaccgcccttaatccatttaaccctgagtggacacagcacaagtttcagagagcacatgattgggggtaaggtcatagatcaacagcatcccaaggcagaggaatttttcttagtacagaactaagtgaagtctcccatgtctactttctacacagatacagcaacaatctgatttctctatcttttccccacctttcccccttttctattccgcaaaaccgccatcgtcatcatggcccgttctcaatgagctgttgggtacacctcccagatggggtggtggccaggcaaaggggctcctcacttcccagaaggggcggccgggcagaggcgccccccacctcccggacgggtcggctggccgggcggaggcgccccccacctccctcccggatggggcggctggccgggcgggggctgaccccccacctccctcccggaaggggcggctggccgggcgggggctgaccccccacctccctcccggacggggctgctggccgggcgggggctgaccccccacctccctcccggacggggcggctggccgggtggacgctgaccccccacctccctcccggacgaggcggctggccgggcgggggttgaccccccacctccctcccggacggggtggctgccggacggagacgctcctggcttcccagacggggcggctgctgggcggaggggctcctcacttctcagatggggcggctgccgggcggcggggctcctcacatcccagacggggtcgcggccgggcagaggcgctccccacatctgagacgatgggcggctgggcagagacgctcctcacttcctagatgggatggcggccgggaagaggcgctcctcacttcccagactgggcagccgggcagaggggctcctcacatcccagacgatgggcggccaggcagagacgctcctcacttcccagacggggtggcggctgggcagagggtgcaatctcggcactttgggaggccaaggcaggcggctgggaggtggaggttgtagcgagccgagatcacgccactgcactccagcctgggcacctttgagcactgagtgaacgagactccgtctgcaatcctggcacctcggggggccgaggctggcagatcactcgcggttaggagctggagaccagcccggccaacacagcgaaaccccgtctccaccaaaaaaaatacgaaaaccagtcaggcgtggcggcgcgcgcctgcaatcgcaggcactcggcctgctgtggcaggagaatcaggcagggaggttgcagtgagcagagatggcggcagcacagtccagctttggctcggcatcagagggagaccgtggaaagagagggagagggagaccatggggagagggagagggagaccgtggggagagggagagggagagggagccacaaaacgtacttctatgaggatatctgctcagcaattgtctgtctcatacacattcttatgtaactttcatggccatatattttcattttattgactaaacagctaaaagtagaatcgccgagtcagagggtaggtatacatttaactttataagaaattgctaaacctttacccaaaggtttacattcctaccagcagcgtgtgggaattccagttgttcccacattcttgtcaacatttggttctccctgtctttttaatcatagacattctagagctgtttagcagtgtctcataattttaatttccatttcctttttggccaggcattagttgtgaggtcttttgcccatttaaaaaattgtgttgtttttcttttattgattgattgattgagacggggtttggctctgttactcaggctggagtgttgtggcatgatcttggctcactgcagcctggatctcccagcctcaagtgatcctcctgccttagcccctcaagtagctgggactacttgtatttttttgtaaagattgctctgccaggcttgtcttgaactcctgagctcaggcaatccaccctcctcggcctcccaaagtactgggattacgggcatgagagtcaccgcaccgggccaattgtttttattattgcataattatttttatttatttatttttgagacagagtcttgctctgtcgcccaggctggagtgcagtggcacaatctcagttcactgcaacctctgcctccagggttcacgcagttttcctgcctcagcctcccgagtagctgggattacaggcttccgccaccacatgcagctaatttttgtatttttagtagagatggggtttcaccatgttggccaggctggtctcgaactcctgaccttaagtgatctgcctaccccagcttcccaaagtgttgggattacaggcgtgagtcactgcacctgactgtaattctttttttgttgttgttgtttttggacagtctttctctttgtcactcaggctggagtgcagtggtgagatcttggctcactgcagcctccccttcccaggttcaagcgattctcccgcctcagcctcctagtagctgggattacagtcacctgccaccacacccagctaatttttgtatttttagagatgggtatcaccatgttggccaggctggtctcaaactcctgacctaaggtgatccacctgcctcggcttcccaaagtgctgtgattacaggcgtgagctactgcactcagcctggaattctttatttacactggatataaggtttttgttagagagagaggtacgtatatttctactgtctattttcttttagtgtgtagcttgcctttatttttcttaatggtatgtttatactcccattgacttacttttgtctttaatatttgttttctcctacttaattaagcttaatttgcttatcttttttgggtttcttaaagtagaagcttagattatctatttaaatcttttttctaatatagacatttaaagctataaaatttcctctgtgcacaaattttgatatgctatacttttattgtcattacttttttaatttctcctgtgatttcttctttgacctgtgagttatttagaagtgcactgtataatttccaaatatttcaaggcttttctatttatctttttcatattgatttatattttaattacattgtggtttgggaacttaccatctttggtatatttgattttcctttatttccattttctaatagatcatagctatttatttcagctcatttgtgaaacagtagatattgctatgctggtacagtaacctgaactggtaacttaaaatgtcagtgtactggataagggaattctggttacttgaatttttttgttgcatagaaattatttcacacttcaatattctttttatattaacaacatcatttaacagctatttctatcaattgttacatggcaaacatttcttgggttctaagaaattcaatagacatgatcttaaattttgagatttttcttgcaaatgtgttcagtagccatcaggagagtcaaaaaagaatgttcttctaagaagaccattatggttttcttttccagcatgtgtagcaattaggattgtattttatcaatgagctattttgttttgggttttgatttcatatttttttgggggggggcagattttaatgcccttgatggtgacttgtacacataatgattattcagggactacttttaaaaaataatataagatttattaagattacaagtttaaaaacctagtgctttcctaagttctcaaggcaatttacatgtacagttatgtaatgattgcttttaaagagcttaaaatataatcttaaacacgctaagctatatacatgtaaagctatgtactcaataattctctcaattgtctttcttaagtacttaaataattcttaaatttaactaaacttagtgatacatagttttcttaaatattcattaattatttagaagcttacttaagattatctcagcacttacaactaaaatcacaggcccattatctcagcacttaacaactaaaatcacaggcccaagtcaatctcttaattaaacattttcacttaaagtccaagggtaacgtgttattccgcttggcaagttagattagacacttgtagaacgtaaaataccaaataggtatagtttatttgaaatttaagtttgaaattaaaatgtcagtggtattggtttacttttttaagcttcagtgggcttaagaagactcaccatataaacaattctgtcatcccaactgaagaacattgaagatgggttcgtatcccagtgcacagagctttcttaatgaccagataaatggtcacagaacttgattctttcatgccttaaagatagaactccaagtccacattctccaaataagtggttcccagctcacattccctagattcatgttacacattaagtgatttttctgactcttcacctgtttgcgcaccgccccccccaccctgccaccaccttaaaacttgtaatttcttcttttactgcttttgttggattttactttgttgttttcagatctttgaaagtattttaaacatcatccttttggggttctgcatctctctcaagaatttattagacctttatgatcacaatctgttaataacatgctgtatattgtagcagtagtgattctgctaaaatgacctgtggttaaaaataatgggattggaacatggaagaatgagtagcacactacagctaaagagaagtttactttgtatgctaacataggatgtttttgtaattctctgattttcagatgttcagtgcctttccaggaagatattatgtatgcattgtgtttgtgtgtgctgtgaatactgaaataagatctttcttttctgctaaaaaaaaaaaaaagtcttcagagtaagcttgtattttttaatttttaagaactttaagcctttggaaaagtaagcatgtgttaaatgtcgatagggaccgaaaaatgaaagactatatagtactttttaatacaacagaaaaattcccaggatataattttctacagaattagactagttgtcactaaattttggtttcagggttttgtttgtcgttaagcccgtaaatcatattactcttctaataaaacaattttcttttgtaatatttgtaatcaaaaagcagctcttctgaataagaaaatgttaatcatctgggaattttaagatttagtaaagtatttaaatagtatcctccagaatctttttttttttttttttaagatgtgtgacaaactgagaaatatctttgcacacagtgggtagccagtaggttttctgcagggggtttctactgaaagctgacagagggcatcttggcaaatgttcagaaacctacattaacttggttgggccctgcatggaacctcatgttcagcagaattcttctgacctgcctctgcatgccgagctaatcagcaaatacctaatgagcccactccaaagaaacagaccctctctcaacctacttgattttcatatgttctctgggggtggggtgacaagatttcatgaggactgatgatgctgcaaagaccacaataatgataattaacttgctgaatttagaagattatgctgttaattagttgcaaaataaagataagtaatagagcagcagatggtaggataacacccaggagaaggagggttattactctgatgagcttttgtggcacatatgaaatatggatctgactttttcataaattgtttctagagaacattatcttttttctttgaactgtgatggagtactttgttcctactactaagttctgacagatgtgataaaatttattttcaagggtgcaacatagaacttgaatgacaattatttctaggagatcacctcttaaagcgaatgtgtcagattggtcagcacaacaaattattcatcctttaattaattgaaacaatctatatctctctaagaaaaagagttttcagtatagtagttgaactttacatcactgaaaattaaacattaaaatactggtctgtttcatagaaacataatgaagacatttttgtttatcaaacaaagtctacctttactttaaattaaaattatgcctaagttttcttgtacatgttggataatatagaccttataaagtcctccttttttttttttcctcttttttttgagtcagggtcttgctctgttacccaggccagagctcactgcagcctcaaacttctgggctcaagcaaacctcctgcctcagcctcctgagtagttgggactacaggcatgcaccaccacacctggctaatttttaagttttttgtagaaatggagttttaccatattgcccaggctggtgtggaactcctgggctcaaggagtcctgccttggcctcccaaagtgctgagattacaggcataagccatcacaccccaccttaaatctttaatttttatgagtgctcaatctttacttcttagagtacttaatccttatttacatatattaaatttgtctattgagagagatttttgatcttagtaatggactgaccaatatcagatgcttaacttaattgattactaatagatttagaaaatttaacattagactagagctccagtttggcaaagcttttgtttagaatatgtttggtgaactgggagtcaacaaatagagtttctggttttatctctgctaactttgattctgggaagtaacttcagttttttggagtttctgtatctgtaagatggtgattggactaattgactttcattatctctgctagctccaaaattctattgtaaaataaatgttcattacatttgttttcattgattttttttttaaaccaaagtatttggccttcttcaaatgctcctaacaaatatgtatggctggattgtagatatccttacattaattgtaaaatttatatgaatgatatttagtgactgcttttttgacctaagtctaatttttttagcgtgtgtgcatttttgttgtagttttagaaaaattaatggacagtttagaacagtgttaattaacccttaaaatctttttcttctgttgtatacccactggcatacttttcaagtcagacccattgtaatcaatgtaacagcatggagcaaacattagagcttcctcactggatgagtactgtataccctagggcagtcaaggaaggataatgaatgaatactgatgctgcttttaagtgctttataaggtagtaacttgccctactaaagattattcaagagagtgatgtttatgtacttcaggctcccctatgtgcagttactgtatttcattaattctgagagttaagctcttcactgtaaaactttaaatgctcttcaattctatgataatttctacctaaggacttaaaaatcttttccaaacacataatttactaagcctcacatttctacttctagttatatttgtgcacattttaaaactagaaatgaaagccccaatttatcactatagactgggtactagtcattgtattttgatgtctaacattctatttataaaatatataaatatgcagactggcgacctcccaagactctctccctttgttctgacccacacttttccaactcaggtctttctactttaaatacttcttgatcgtttttctaagtattcctatctggttctagccagctactactttagtcccgcatttaatttcagttttaatccatccacttccacattatcccatcaattagggtcctaatttcctatgttttagctactaatatagttgtttctgattgtttagaaaaggaactaggaatcttatcttgattctaaaaaattcagtttttcttatggtcttgagcatgtctctgttaggaatgcttacttgttccccggtgctgtaaagaaatagcacttgaacataaatttaatttcctcagcaaggccaatttttttactttctgcagaaagggtacactcgccagcagttttcccatgagagtacactgaacaaaggagacagggtcatttataacctgacgcatccaccctactgctgtgtccagtttccattggctggaatgggacctcacattctgtatttgtcctgattggctagcaacttagaagttttaaaagaggcaaaggcagaggagaacaaaggaaggaggaagtaacttgtggaatgctaagaaaggtaaaaacaccttcaaataaggaagaggaacaggctatgacctaatgcttacttggaccagtatacgcatgccagggcaaatatgtaggtaaattgtgggagctaagaacataaagtacattgatttctttattacggctagcagatatttgaatgttagcacaggtctttgaataaattttgcttctaagagaagttactatttattcctaattagatggggaggagagtctttgaagaggaacctctactttactttttacatctcatatataaaatatgtctgggatcaaaccaatgcttaagatgacccttagggatattttgaaaattcagaaacataggaactatcctgattctttggacctccgtgctaagaaaatagaggcctcagtagtattcttaaaagaaataaggaaactgacatctgaaaaattcttttacgagtcagatagttttacatgttatatttatttttcaattcaactctgcaaggaagttattattcccagttttataggtaaagaaattgagactcaaagatcaatgatttgttcaaagtcacagatagtttgaggtagagttaggttctgaacctaaagtgtattctcagctttataagaccatagtacattgcatgttctaatcagtgaaagcactaggatattacataagtggtactttttataattcataaagaagtagtctgtcagaaaagagggagaaaacatgccagatcctggcttagcagttgcagtaacaggtttggcactctaaatccttatgattgttttttgaatcattaagccacaaagtttcagactctctgtcttgagttttccctgtgttttctggtagcaccaaggataaagtatgcagcatggtgctgtggaaatattttgcacttgaaattaaagagatctgggtttatatccaggatttgaactagcttaacagctctgcatccttgagcaaatgatatctggtttcctaaagtgtaaaatggggatactatacaattaaaaactcattaaaaaactacagataatacaacaacacaggtgaatctcaactgcattgtgctaagagaaagaagccagattcaaaaggctatacaatgtatgtttccaagtatgtgatcttctggaagagacaaaactcttgggatcagaaaacagatcagtcgtttccagggccagggagtagaaggagagtatgacaggaaagggcatgaggattttattgtggtaaaactgctgtgtatcctgattgtagggtaggttgcatgagtgtatttgtttgttaaaattcaatagaggccaggcacgatggctcacacctgtaatcccagaactttaggagccgaggagggtggatcacttgaggtcaggagttcaagaccagcctggccaacatggcaaaaccctgtctctattaaaaatacaaaaatgagccggtcgtggtggcatgcacctgtaatcccagctcctcaggaggctaaggcaggagaattgcttgaaccgtgaaggtgaaggttgcagtgagctaagatcatgccactgccctccagcctgggcgacaggcgagactccctcttgaaaaaaaaaaaaaaaaaaaagaaatttaataggattgtacactaaacagagttaacttgctatgtgtaacttatatctcaagaaaaaacttttctttttacaaattgactttattttaaaaatcacacccagaatatacggtgattcacaagagagagaaaatgtccactaacatttgttcacgcataattactgcctcagttgaaattccggtgatcttttcatatatgcttcagtttttatgggatctggatcacatatgatagacagtaagaagataggcctagatgaaaaggaagaaattacaagttttgaaatagttataaaaatttctgaattgttcttagttgaagtgaatggaaatacttgtactggtattatttgggggtcttttttaaaagctcttctctcactcacccctttctgctgtactcagggaaggaagaaaggaaaagattgccaagaatatgtgttcttaacacttaacaccccagacagttatgtatttctaagaagtttgggaagcactgggtaggctgcaacatggttctcacatctctatctctcttttgtctctcagttgcactcgctctcactctcttattagcctccatcccctcaaagatgcacctctataagaatcttaggaaagtgtaatatacataactctgactccaattcctgtaataatatgtatttggggcccaagaactacatctcagttattaagaacagtatcagcaataatagtctcaggtctgttggatccctgaagtccctttcattgctgagatactgtggtctgattatctgtgcaaattatttcatatttacagatcataacaaaaccaccttaaagatcacatatgaccattttcactaaagaaaccaatttctatcagttaacagatatgtttgttttgtacctatgtagcaaatcattatatcagttgctaaaaggaatacccaaaagtataagataatctctgctcttagagagcttactaactggttgggagataaaatagttgcatatgacaaatttttattgatagcataataagcttcattcaaattgttgcttgataaagtggtagacataaatatctagggcctcattctaatactaggtctgtcatgctctgaatgtgagtccagtacaatccaataattaactggcaaacctgcaacagcaaaagagaactagatctgcttactggggacagggaaaacctaagagagacaaacccagctgtaggttcttggaggaggctcagtttgggcccatttgatctctgtttgcaggtttggtgccagtgcttacttggacaatgacatgatgttacatttttaaggcctttattattattttctcaaaattcactaggaacagcaaaatacagaatcctctagtagtactaggcaaaaggactcagggaaactacccaaggtgctattgtttgtcttgttgatattcatgatgatctttaaggacttaaaaaaaatttttaatggtgtttgcattgcagagattaaaagctgctttgacccagcaacatcctccagttaccaatggtgatactgtcaaaggtcatggtagcggattggttaggactcagtcagaggaatctcgaccgcagtcattacaacagccagccacatccactacagaaactccggtatgtgtgttgtttttattattcagcactctgtcatctttaaacagaaaagtacagtgtaacttacggcttatttaaaaaatattactctggtcatgttgttattccaaagatgtatcaaaagcctcaggaaaaggtagctcagtatacaagtattgatacaaaaataaacataatagagcagtgtttctgttcaggacacctgcaaatatttctgtgggtgtccatatatgttggtcacaattctttttaaagaaaacatctttttctgttgattttaggacagtgaaactgaatactgctttgagaaatttcctttactctctatttcctgattgaagaagtttatagagttatgactttggaaaatagttatataaccagaaaaataatattagaaccttatagtgagaagaatgaaattgtatcttgttttcttattgtccaaaactacaaatttgacataaactgtaactattaacactagatattttttcttgctgtggcataaacaggtttgatttgaactgttctcctatgtaaccaaagtattgatgttataggaaaatttaataggttaagttctgtaaattttatagacaataacaacttctttgttaagagatgctgtgttcttcagaaatgtatgtaactaaatcttacgttctttttcaagtagcaaaactaagatttctaaagaatctttttggatctcttcttaaaaaattattgattttcctttttcctaaaatgccatatgtttatgattacaatgcatatcatatttcagtattgtgttgccatctacaaccattaaagtgtgtatgtcccaaagaggcagatgttttttctgtttccgttactagcagaacaaataattcttgtttctgcttttaatatttgctcactcattgtaaaacattactctttgttatttatttgtataagtaaccttatctcacttgtaggtaatcagaagtcttttagagaaataggtagataaatattcacacatatacacacatatgtaggtattacattactaacataaatcaaatgattcctgaattaaaacttgtgaaacatcaccaaaggagcaaatatgctttatggcagctatttatactagagacccctttcacttatctctagtttgtgactgcctatgagatgattgatattgttatatgcctgcagtgcttttctaattctttctagtaaaggattattgtactcctgttaaatgtttcagaattctatttagaccttttatctttacttgaagaatattagcattggcattaaaaagcaaaagttttcaatcaaagaaacacatataaacaagttttagattgccacctaagcataggtatttacataactgtatcttgtcttttaaaaacttaatatataatgaaatgtagttgtggttgtcatccactaaccaactttacttagggaccaaaagggaaaatgaggggctgagtgattgtgtatatgtgttaatgttatacctcagggtttaacaatgattcacaggccatatgcaacccatgggtgtttttgtgtggtctgcaagttaagtatgattttttacatttttaaagggttatttctaaaaaatgaatataatttattgtccttactttcttgcactaactatagtttccctggatctaatttttatttatatccttatatgttattgtattggatggaagccccatgagggtaggactttatctgtttgttcactgctatacttagtttctagaatagttcctataaggattttctgaatgaaatagaatgaattaatagacatggggagagaaggagcagtatacacttctaagaagcctccaatccttggtaggcataaaaatatacaaatgtaactctgagtagcagaaattaagcttctgttattctgctagtacttatgattagtctttgctataatgagttaaatcaattaaaaacaaaaataaactgttctctcttattcagccagatgagtaaaagaaaaaacctgccattctcaataagaaaaataggaggttgtggctcacgcctataatcccagcactttgggagcctgaggcgggtggatcacctgaggtcaggagttcgagaccacaacctggtgaaaccccgtctctactaaaaatacaaaaattaagctgggtgtggtggtgggcacctgtaatccgagctactcgggaggctgagtaggagaatcacttggaacccaggaggcggaagttgtagtgagccaagatcacgtcattgcactccagcctgggccacagagcgagactccatctcaaaaaaaaaaagaaaaagaaaaataggaggatgaagaaaaaaatttcaagattgcaaatcttgaagccagccatagaaatatttttctaaaacattaagttgcaattatgtaagtaaaataaacgctctaatttaaatgcttaatctttattacaattaaaatatttcttttttgagacgggatcttcctctgttgcccatgcggagtacagtggtgcgatcatgtctcactgcagcctcgacttcccaggctcaagcaatcctctcccacctcagcctcttgagtaactaggaccacaagcacatgccaccgcacttggctaattttttaaattatttgtagagatgaggttttgctatgttgcccaggcgtgaaatactttatacatgaaataactctctttgtaatgctagttatttggacaaagaaatgataactttattttttggaatttgttagagtgaaaaatagtttggtaatttacctgcagaatttatcttgagctttatataagacttgtattacatagattaggagaaaacaaattttatttgtgcataccatttttaaatataataaattataggtaaaagattgttttcaggcttctcctttggattgtgtgcctgtagccataaagtgttcttttctctgcaccatttccaagagctcattttcttctttctttttttttttttttcgtattttttgagactgagtctcgctgtatagcccaggctggcgtgcagtggtgttatcttgactcactgcaacctctgcctcccgggttcaagtgattctcgtgcctcagcctcccaattatctaggattataggcatgcaccaccacgctcagctaatttttttgtattttaatagagactggttttcaccatgttggccaggctggtctcgaactcctgacctcaagtgatccacccgccttggcctcccagagtgctgggattacaggcatgagccaccacgcccggccaagagttcattttttgacacccatattcatttgttctgtggcacagttttggggtttgtgaaagacttgaagatacctattgttttatagtcttatacactagacaatattactagtgactgaagatttctttctcttactaatctgagataaccaagctgattcattggggagcagagggaacaattaaaatgaaaattaaggctcctgtgggattctccctaccagaaaaatgagtattaataaatataagaacttgacccttagaaaaagactgaccctaaatttcacaaactgaagaaaagctgaatataccaaagaatatatatattttcactccataactttagagaaacaaattttaagaaaattggcatttaatgtgagatatttaatttaaaaatagcatagaaatcatggttttctatcatgaatttaaataggaagttattaaacgttttgagaaatttataatcagttttccagggatttaataatataataaaatctgttaaaatatacttggaaaaatatttctatatatcatttgtattgtattttaaattttttcatatttgtatgtaaatgaaaatattatacataaagaatacatttgctgtgacattgcattagtgagaattgtgttatagcatagctcataacataagtatattcaagaaggaagttaaaccacagggtgattttcatattgccccaacatactgatgtattcaacaagacttagaaaatacagttgctctccccctttgacaccctttactgcctatgttaattcactcactagatacaaatataacaggctttcatctctgtttataataggcttctccagctcacacaactccacagacccaaagtacaagtggtcgtcggagaagagcagctaacgaagatcctgatgaaaaaaggagaaagtttttagagcgaaatagagcagcagcttcaagatgccgacaaaaaaggaaagtctgggttcagtctttagagaagaaagctgaagacttgagttcattaaatggtcagctgcaggtatggtgcatatatgtgaattttgttttatttcttttttaataattgtgaacatagattttttttttcctagttgggcctccaaacattttaggacatgatattgggtgtgtatggaatctatagtaaatcatagttttgtaaacctgtttgtttggatgctgagatgaaataatataaaactttcaacactgatacagtgaagaaatttaaaatgtgtttacctgtgtacaaaagtagctaaactatccggtttgaactttataaagttgtgatataaagtgcagagaattttaaaatttaaaaatatcactgttatttcacttttcttgtctatttttttggtttatagcacaactataagtttcttcagtagcagtttttatttttaaattatttcattctttgaattataaattttgttctgttttgttttatttaaagtgaatatattgctcgtgaaaggtgccagattgacagctttggaaactgaaggactctaattatccacagaccaggtacaatatggccagtggcagtacagatcatttcatactgccctgccaatgtgcctcagatacatttcttaaaacctcatggagtataaagttttaaggcagcaccgaatctgtttcctttgtttttcttccttccttttgtttttgttgtgttttttaacgtaaatattctcctatataatcttaaactgccaactgataagtatcaaccagaaaattgatgttaatgaattgcagttattagtctagctcaatcttctgaattatccatacccagttaaaagtgaatctttctgtataatcataattgatggtaagagacctgctgtcttcttaaatctgtctttaagatatcaccaatatagttgtctgtttaaatggttaggaaacagtttttagcatcagacatagcatttaaccaaatgtaagttttataatttaaatttttttaatgtgaagcagacatctttaagtctttattttgctttgaatattgacatgatagaacaaatagattgtcttgcagaacttatttttaacgattttattttaatgatttagaagaaaattttaatacaacttaccacatcacatagacttaaaatatgtgcttatcttctagggtttattaagaaatatattttatcatttatcatctgataaattgtttttttgtttttgagacggagtctcactctatcacctgggctgaagtgcagtggtgcaatctcggctcactgcaacctccagctcccgggtgccagtgattctcctgcctcagcctcccaggtagctgggattacaggtgtgcaccaccacacccggctaatttttgtatttttagtagagatggggtttcaccatgttggccaggctggtctcgaactcctgacctcaggtgatccacccgcctcagcctcccaaattgctagattacaggcgtgagccactgtgcccagcccatcatctgataaatttttaatccagaatgtttcagaaatttttagaaaacatttctaaattttctttttttttaatagtacagactgtaggtactaatttatgctgcaaaaatggctattttatatcaagtctgttagaatatttattattatttaaattttcaaatattacatgaacaaagtgatttaggtatgtgtattttttttctgttcttaactaacaaaatcttctgaatgacctgctattttatagttgtatgacataaaacacaatcactgttgtcttcagttgtcttacctgtagaatagatgtggtaataccacttctctgtattgttacataaatcagtcaattcaagggtttcttcgtacagaaaattttaactagtaagacaaatttaccattattttcctttgtaatttggcttattatgccttatttaagaagtaaaagtacctgaaaactatgaagtagtacatacatatatgttattatttacagggattttaagctgggcaagttttctgctttgacccattttagagcaatcttaataccttttaatgagatattgctgtttccatagttacactgcagcactggttaccactattagccctttattattgcagaaaaccatggaaaattaagtattcaaaataaatataatcttgactccatttatttcatgttttttctgtcacacagtctatgattaaaatgtcattattgtagcagtgctttgtatatacttcctaatttgggtagaagttttttgattggagaaataaagataagatttatcattaggtagaagtttgctgacatcattttttgaagcatgagactattaaatgaaagctaaatttaggaaatcactaaattaagctctacatttgaacttgagtttagttaatacctcaaattatgtacagaagaagtaaaaccagtatttttgaccattaaaagctgggtgatgatggcatcatcttagatttagaaatgcattttaaaataggatccaaaatgatatattatcaaggattttacttacaatacttctccaaaaaagaaaaagcattatatccatctatttatattaacctgggaaaatatctataatatatatatttgtatgggcaaaaagaaagttgttggaaacagcccaaatgtccatccaagatgaatggatagacaagttgtggtttatatgtacaatggaatattattccaccataaaaaggaatgaagtatatgctacagtgtagatgaacctcaaaacattatgttaagtgaaagaatatagaacaaacatcagatgttgtatcattccatttatgtgaaatacccagaataaataaatccatagagagagatggcatattaatgggggagggagaataaggagaaactgcttagtgggtaagggttttactttggagcgatggaaatattttgttactagacagagggtggtagttgcacaacattgtgaatgcactaaatgccagtttaaactgattacctttatgttatatgaatctcaccttggtaaattacgaaaaaaggtcagttacatctaaattaagcattattattatgcttaataaagcataatgctttcttattaataaaaaggtttacagttagatgggtaaatgtataggtataggaactggtatagaaatgactccgtaagtataggtagcattttagaaatgacatgtaccaaggtgcaaacgatggtgaggagggaattgagagcatggatggtttgggaagaaagggtacttcaatgatgactttctgttattgcttcaagtcaatatattattttgactttttgttgttttctacttatttgtcaagtaaaataagttttttaaaagtgacagattgtagctttcagaatgtgaagagttaacatgcctataatagattcagggagaaaaatttctttcagtctgccaacagcaaaaccgttaactgtgaagaacagaatgacttgtaaagaaaattgaatgtcagagaaataattaaaccctactttatgtgaaaacattaatcaattctgtatttccttgatgatccttcatgtgacatgtaggcttagctgatcagtgtagtgggctgtaatgacccatagtttacttatatattttatatgtaatacaaggtttaacaagtgttgaggtatgattgttcatatttttaccaaatacatattaggccttaaaatatattcaaccttattgccgcattcactaaatttaatcatgttttagttttcccaaatcattgctaaaagagcaatttcatcaaattatattagagacatttatggtaatctagaccaaaaattgaatactgttggttataaattattgttttttttttttggagacagagttttgctcttattccccaggctagagtgcaatggcgcaatctcagctcactgcaacctccacctcccgggttcaagcaattctcctgcctcagcctcctgagtagctgggattacaggcatgcgccaccacacctggctaattttgtatttttagtagagatgggtttctccacgttggtcaggctggtctcgaactcccgacctcaagtgatctgcccgcctcagcttcccaaagtgctgggattacaggcatgagcaactgcacccagccaattactgtatttttaaagtaatatctattttgttaattttgttatcttttacttgaaatggtttttacctgtttatagctttgtcttgcagttatgctcattatgggggttaattttcagtttataaatgtagcatgtttccttatgaacaaaaagcagattccttttctttactaacagtagctgcttaacagttactctgtgggtacaacttgataattatttttgtgtggatttggctgttatattaggttggtgcaaacagaatcgcagcttttgccattaaaggtaacggcaaaacatacttttaatggcaaaaactgtgattccgtttgcaccaacctaataacttagatactgcaaaatgtgtgtggagtggaagcacaataaattaatgaaagcacacttttatagctagagaattatttactcataagttaatgatgtggaaaaggttttattggtccgttgacttatagaaaatgagattaaatcttttatttctggtaccagacaatattttatttcagtatttatcacttgaaataggaaaaaatagcaataattggaagatacattataatacctttttgatttaatttctgaattctatgatctatcttccacgtttttccactgagtttttaactatattctagatgaaagaaaggggtattagtgtagctgccatcatctcatgcattttattctgagtttgagatctaatacttacatttgaagcttttactaagaatcttcctaagcctttgtttctccgtcaaactgatagaataagtactattatgaaaagcaactgaaataaggtatagaacagtgttgtaactacactgtgcaaatgctagttatttttcattctgtcattatgcatctattatgtgcaaggcatattattagatgtggataacagcgaaaaagacattgtctttgcacttacagaatttgtggcagaggagacagacatgaaacaagtaattaaagtgtgagaataggaaaggagtcattcccattcattttgcaaagtgtttccaaaatattttgtagctctagtgagaactcttgtctttttttctgttaaaaatataaattttttaaaaactagtttgttttcatatgtaaggttttacattccacgataacccttggaactgtgtggagggaaacttgatacttaactgccttttgtgaggcttaaacattttaaaaattcatagcaatgagaaattccgcaaaataagaaactattcatactgtttctttatttttgggggtaatggctgaagtagaaagtcaaagatcataaatttagggaatacctgatattcatggccaaatatcaataaaagtttcgattgattagtcagttggctatcgtgtgatgatttcagcaggctgatttacattacatagacaatgtaagaaaaatttgtctgctgctatgtaattaacctttgagtagccacattattagagtggagcggtggtagagataatgacaaaataatttacattagattttagaccagaataataatttcttttagcatctgttccatcttgccaaatatgttttactttgacaaagtgatgatttctcacatttgaatgggactttcacattttcaaaatgcttttatatcccttattttacttcatcttcagaatgacccaggaagataactaacatatcctgcaagtatactaactcacaaatagtagatagtacaaccagaaggactttggaggctgaatccaactaaaatctagtctaaaataatccacaaaatagtaagaggtatacatttttttttcatttaatattaagtctttttgtggctgaacatccccttgatatttattttggcttaagcagactggttttgtgtgtgtgtgtaacctctgtttttatattctgaggtctctgtgtatagaaacttaaggagtcttcccattatatttgtgtagcagccccttctctctgtctacctgtcttctgatctttcttaatagaaagatttcagaattaaaatcaggacttatgcagccatcttatctgaatagtaataaatcatgcctatctttatttttagaaatacagtattttctttatgagattaaaattcttgaatgcttggagtagtttgttgaatttactatatttatcataaatgaggccaggagcagtggctcactcctgtaattccagcactttgggaggctgaggcaggtagatcacttgaggctgggagttcaagaccagcgtggccaacatggtgaaaccccatctctactaaaataaataaatgtgtatatatatatgacttaggaaccactcagcttttgtctcttctaactaattcagttataaaacctttaccagcatgagcatcctatttccaacccacgcttgacctggtcttgaccactagcatatgcttatacttactagggctgtacagctcaactaatccacttcttaaaggtttggcccaccctcatgcctaaactgcactccagctatgtttgctttgcagtatttctctcagtcccaattcctagccagtaattgtgtctcatttgctgcttttaatctagtggtgataccatcttttaatgaaatcgactattagagtacagtaataatacaagttatatttaatttgtaacctgtcatccaaaagtcacttttgagcttcagaatcatcattaggaaaatgttactgtaaaacattttagatcaggacaatgtaaaaaattggactgaatttgtattgtgcagaccttgaatttgttggtttatttcttaaccatttctgccatttaaaaggtgtagtggaaaaaattggttatttgaattttggataaatataatttacagcatgcttgtatattataccttttagatacatgcaaatttatatataagaatgtgcagagtttttaaaacgaagagtaacaaattaaaaaataaaagaatgtgcaaaagtttttatttttaatttcttcttcttggccttttccattgtttccccaagttaatgccaattaaaattcagttagcacaaatatacgttgtagcaagaatcaagtactgtacctcttcagtccttgatgttcattaacctttcctagctactggcatcttcatgttacaactatatgttagtaaaccaggtagtctaattagatcaacagtctgaataccaccaaccgttaagtttgaaatgtagaaattgatgtcctgttcatcagtttcagacctgtctatttaaagagagaattgtgtgtgtgtgtgtgtgtgtgtgtgtgtgtgtgtgtgtgtgtgtatgttatgtatttatttatttattttatttttttgagacttgagtctcactctgtagcccaggctggaatgcagtggtgcaacctccacctcttgaattcaagcagttctcctgcctcagccttccaagtcgctgggattacaggcatgcgccaccagacccagctaattcttatatttttagtagagacagggtttcaccacgttggccaggctggtcttaaactcctgacctcaagttatctgcccgcctcagtctcccaaagttctgggattacaggcatgagccaccacacccagtctatatttaaatcacttattttatatcacttagctagccaacacataacactttcagtacttttgtcacatatagcattttgttacataatacggtttattatgaatgtatagagtgtttcagagagaagacatttgtgatttttagagttccgtaattgaggtgatactacataatatgccaatttacataactgagaaaattaacagtgtagctgtattggtgagattattgctataaatgatgaagttaggacctctgaccagattcatattatttaagctttttcatttcaccttctttgatattttttacctcctagacatagaattacgtggtcctctctaaaatatgtctgtctactcagtccatatcaggcaatgtgctgtgctctggggataccaaggaaaagatatgttctgccttcaagaaattcccagtctggtagaggtagcaagcaagtacaccaaaagttacaatccagtgtgataagtactatggaagagatctatatgtatacacacaaaagtatgtggctgtgggaacccagaaataggcacctaacttattttcctatgcattctttttttttttaactttttttttttttttatactttaagttttagcgtacatgtgcacaatgtgccggttagttacatatgtatacatgtgccatgctggtgtgctgtacccattaactcgtcatttagcattaggtatatctcctaatgctatccctcccccctccccccaccccacaacagtccccagagtgtgatgttccccttcctgtgtccatgtgttctcattgttcggttcccatctatgagtgagaacatgtggtgtttggtttttttgtccttgcgatagtttacggagaatgatgatttgcattttcatccttgtccctacaaaggacatgaacacatcattttttatggctgcatagtattccatggtgtatatgtgccacattttcttaatccagtctatcatcgttggacattttggttggttccaagtctttgctattgtgaatagtgctgcaataaacatacatgtgcatgtgtctttatagcagcatgatttatagtcctttgggtatatacccagtaatgggatggctgggtcaattggtatttctagttctagatccctgaggaatcgccacactgacttccacaatggttgaactagtttacagtcccaccaacagtgtaaaagtgttcctatttctccatatcctctccagcacctgttgtttcctgcctttttaatgattgccattctaactggtgtgagatggtatctcattgtggttttgatttgcatttctctgatggccagtgatgagcatttttttcatgtgtcttttggctgcataaatgtcttcttttgagaagtgtctgttcatatcctttgcccagtttttgatggggttctttgtttttttcttgtaaatttgtttgagttcattgtagattctcgatattagccctttgtcagataagtaggttgcgaaaattttcttccattttgtaggttgcctgttcactctgatggtagtttcttttgctgtgcagaagctctttagtttaattagatcccatttgtcagttttggcttttgttgccattgcttttggtgttttagacatgaagtctttgcccatgcctatgtcctgaatggtaatgcctaggttttcttctagggtttttatggttttaggtctaaccttaaagtctttaatccatcttgagttaatttttgtataagtaaggaagggatccagtttcagctttctacatatggctagccagttttcccagcaccatttattaaatagggaatcctttccccattgcttgtttttctcaggtttgtcaacgatcagatagttgtacatatgcggcgttatttctgagggctctattctgttccattgatctatatctctgttttggtaccagtaccatgctgttttggttactgtagccttgtagtatagtttgaagtcaggtagcgtgatgcctccagctttgttcttttggcttaggattgacttggcgatgcaggctcttttttggttccatatgaactttaaagtagttttttccaattctgtgaagaaagtcattggtagcttgatggggatggcattgaatctataaattaccttgggcagtatggccattttcacaatattgattcttcctacccatgagcatggaatgttcttccatttgtttgtatcctcttttatttcattgagcagtggtttgtagttctccttgaagaggtccttcacgtcccttgtaagttggattcttatgtattttattctctttgaagcaattgtgaaatgctttcctatgcattctaaactgttctgagttgacacttaaataaaatatttagcaagacaaagaagaggggataaagacaacggtatgtatttagctagcaatttcaaacttacttttgtaagtcaagacaaatactggttatttcatatggttcaaactaatgtgaaggtagcaagggtatgagaggcttgaagcatcactagtgtttggtgttaaaggatagagtatgttggaagagcagtgagagttgaaaatcattatgttcaccatcaccagattgtaaaagattgtatattcttgagtaaaaataaatatccagcccatttcctgttacaggatttaatgagagaaacttgtagacatcagtctcaaaatcaagctgacaggatgggtaatatacattgggtaatatacattggattattcataacatggtttcatcaatagtgtcatttatactgaactataattagcagtattgacaccagttggagaaggtgtttcctaaatgacagcttatcttttcaagccaaactgttttaaattttaccttttgtactttgattactatctacccattcttgcctcaaatacaatattctaaatcatttaatcttttaattaacggtttagagttattatgagcatcaatttttgttctgtacttaaatacagtgatgtagttcattgttattggggtgtgaggaactgtttgacccaatagacttgcctttagattgcttaacttttattatttaatttttatgtttctgtcacttatcacttaaggaggcccaagtctgctaaattatttcatttattttttttgagacggagtctcactctgtcaccaaggctggagtacagtggcacaatctcacctcactgcagcctctgcttcctgggttcaagcagttctcctgcctcagcctccagagtagtgagtagctgggattagaagtaccctccaccacgcccaactaatttttgtattttttgtagagacagggtttcaccatgttggccaggctggtcttgaactcctgacctcaagtgatacaactgcctcggcctcccaaagtgctgggatcacaggcgtgagccaccgtgtcagcctgctaaattattttacattcagctttctgcttaagaaacaaggtagaaaatgtcatgcctgagcttttatgtacacctgtttgctatattttctaatttactttttggttcatggatgaaatctgaatggttatagttactgtgtgagtccaagtaagtagaagtatttgtaagctaagaattttttatattaccagtttattaaattcatattatttctaactcttgagtattggtaatgatcactgacttacgtgtttttaatattcggggtgactcaaaggaattagtcggacttgctcaatttggaactttttaccagattaatgtatcccaaacaatggctgaagtactcattctgaagattaggacaaatctccattgacttagcagatttaaatttagatgtgtacaaattgcctgggtcaaaggcagctaagccatttaaatgttatatctagtttcattggtttcagtgtccagcaagagtgccttgcagtgaattttaggtatccatgattctttggttattttggtttcccctgtggagcttttcttggtttctaggaaactggaaacttgcttatttgaatttctaggatgatttttttcatttttaggtgaatggaatcagtgaaaattcatcctgactcccttgatgtttctttttaaataatcagaagagcatgcaacatatataaaataaaaatactttcaacaggtcaccaataatatataagaagtcccagggaaatggaaacaattttgaaatatgctatccagctgtggcattatcttaaatttttattcaagttacagctttttaataaatgctaaaatataaaagctgccctgtgctgattagacatatttaatcagcatattttctttgtttttaatgttctgccagtgatgtccaattttatactttaatccttgcttgttttaaatagtaaaaaatatgtttagtctgtggtaaggtacataagttgtttcttctccagagtgaagtcaccctgctgagaaatgaagtggcacagctgaaacagcttcttctggctcataaagattgccctgtaaccgccatgcagaagaaatctggctatcatagtgagtaatgttccattacctatagccttaggctacgtcagtgaaataccgtcagagtgaactgagctgctactttaaaaatggagactgtgcttctaatattcaagattaaatatcagaatttctgtaaggttattatagaatgcagtagagaggtataattttttagaatctagagagtttgagttttcctgtttctagcttttttcctaagcattactatagatcaacaaaatggattagctaataatttaaaatatactgtaagtacttgatgatattttgttcatcttctcaggataacactttgtcttagattgacagggtgaaacactacttttttcccagcctccgttcattaatgatgatatttttctttttaaaatcagctgactgcctttaacaatatatgatatccctttaaggtatcagatcctattgttctttcttagataatgtcagcattgtgtaacgtttttattgttgtaaacctttatattgagatatctagttagtttataaaaatgttaaaacgggaacagtagttaaattatctgcttgtaaatttcctgctaaatgttttcccaaagaatgagattcttttgttttcagcattttagaggttaattgtgccttttcctttttgtaatgtccttcttttttgataagatgcacagtgttggaaccagctgttactcttgaataaatggccaattttgtccatagtatacaaatttgtaacaaacaacagagttgggaatgcattaggcaacatttataatatataacccacagttttagtctttatgatttagtgatatttcaggatatttgtaaatgtgaagattgtttcaaccatatgtatccacttcattttaatttgccagtgtcagtaattcaaaagaaagaaacattttgtattggatgcaaacagttcctcaggtgctcacgataaaacttaatggccaccatctttacttgtagtcattgtaagcagtttcatcagaatgggcaatattttttaatttaaaagattccgtagatttagctactctcaattgccatatatatttagaacgctgatttttgtcagttttgagcatataaatcttgcttatttgatatctagtaattttgacaggatggtgaaacacattggagtaaattggaaccatatagaaatatgtttgggatttatattaacaatgattgcttcagggatgaggccattatggttcccatctgacttaacaacataatttcctatagaagctactagttcagcatttatgcatacgtgattttcttaacaagaaatctctcttggattttcatagtttaaaaggaaataaattgttttataaaattaaaaggaaattaactgttctcttaaattgtatccaattcagaattacctgtaatttttaaatctttgataatttattagataatcccaacagttttgactctattatccaggcaatgtatgctcagcagatgcaaaccagttattcatttgacaattgatttacaagatatcttaagtgtatagatgcgtaggtttatatactgtatacttaaatgactgaaaatctagattaatacatttttagtacatagagtactaagttatgagaatataagaaatgaataggatatttttgttgtttggaaataatcctatctttattcctgtctagtcatgtagataatcaaattaactgaaatatagttctaccataaaattaattctcttcagatcttgggagataattggattttgtagaaattttcaggtaatttatattttcaagtttgaaatctttgaaataagtctgacttctctgttgtgtagtagtaaaaatagatacagaaattgactaagtgaatacctttgaaaaatttacactcttcattatgttgtagcacacagctcttgctaacagtggtgagttgtaatactagctaaatctttaaaaacatttgggaatcaaaactaagatttagtagaaattaaggaatgttacaaaatctttcaagtaaaggtggaagtactaagtcacagccatagggtctgtcccgcccagttttagcactgaaagtcctgcttcctaagaagacccctcagtcgtgggaaaaccatgacagttagtcaccccaacagttaagtaatataaaacctgaatgaaaataataagagtacattttaaatatttgggttccatgaaaaataaagcacaaaagtgatcttattgccatgaattcacattctttagatctgggcataattaaagttgtattataattgtctctataattataaatgggaagaaaagcttcttggggactaatcaaccacaaatacttttattactgaaaatatgtataggccaggcactgtggctcatcccttgtaagcccaacactttgggaggccaaggcgggaagattgtttgaacccatgagttcaagaccagtctgggtgaaatagcgggaccccatctctacaaaaaataaagtttaaaaaagccaggcattttggcacacacctatagtcccagctacttgggaggctgaggcaagaggatcacttgagcccaagagttcaaggctgcagtgagctgtgatcgtgccatagcactccagcctgggcgacagggagaccctatctcaaataaggaaaagaaacttgtggacataggtagagaactttcaagattactgaattgccaaacagctggtttcttttagcttaggtagagctggaagtggctctttgagtacagcatggttttctgtatctctctagtgcttgtgattacaccagtcattttctcccctcacctagaactggacataggtgcaaatatatcacattgtaaaggtatttgatgtgtatgtaaggtttataattacataattgtgagtacctgattctttgtactgcttaaagatttgctttacctaattctgaaagtctgtaggtaagcattcatcccttataatttactgtttcattttaagttgttgactccagtatgtatttacgtttccttataccactcatcacagatcagcctctttatttttaaaagctggtgtgtcccttgaactcaacattcagggaaacgtcagcctgttgttcttttaaagaatagtggtgaagttagaatggtgatcattaaaaagtcaggaaacaacaggtgctgaagaggatgtggagaaataggaacacttttacactgttggtgggactgtaaactagttcaaccattgtggaagtcagtgtggcgattcctcagggatcttgaactagaaatacgatttgacccagccatcccattactgggtatatacccaaaggattataaatcatgctgctataaaggcacatgcaaatgtatgtttattgcagcactattcacaatagcaaacacttggaaccaacccaaatgtccaacaatgatagactggattaagaaaatgtggcacatatacatcatggaatactatgcagccataaaaaatgatgagttcatgtcctttgtagggacatggatgaagctggaaaccatcattctcagcaaactattgcaaggacaaaaaaccaaacactgcatgttctcactcataggtaggaattgaacaataagaacacatggacataggaaggggaacatcacacaccggggcctgttgtggggtggggggaggggggagggatagcattgggagatatacctaatgttggatgacgagttaatgggtgcagcacaccaacatggcatatgtatacgtatgtaactaacctgcacgttgtgcacatgtaccctaaaacttaaagtatgatttttaaaaagtgataaaaataaaaaaattttaaaaatcacatataaatacttaaaaaaaaaaaagaatagtggtgaaacaaaacaaatagagctttttagtattccctccagttaaactgtcattgccagtattttgttttctttatacatgtaatgattatgtaatgattatattggctattttaataactgaattataaatattttataacattcattactgcttgatcagaaaagtaggggggtgaaggagaggggcactagttgagaaacgacctgttgggtgctatgttcactattttggtgataggttcaatagaagcccaaaccccaggattgcacaatatacccatgtaacatacctgcatatgtaccatctgaatctataattttttttaagtattcattctgttttatataatttttaaaggattactacttctggtggttggtggtggtggtggtgttgttttattgtaccttgtggtcaagtatctaggggtatggttttgatttatagcatgttatagagaagatggggttccatctcattaatgtattttaaaacctgcttttcaaaaatgcatggatttgaggcagatgttgaaaaattctgtaaaaactatatttcagaaaatgcacaaaattaataattttattttagctaaagttgacactaccaggtatccccctctccatcttctacattgcaaatcataggctaagtcctgcttcataagatgtccacaatttttttcactaattgactttcagaatgggcatctggccattagtaagcaggccaatacacattcttagatttgattttagaagcctatttactgtcactcctaaacactgaataaaaaaagttttaatgccaagtgaaaaaagcaaggtgcaaaagaatacatccagtgtgatactgtttttaaaatgtttcaaaataaacaaagctgaactatattgtttagggatacatgcctatgtggtaaaactgcagagaaaaaacgagaatggttaaagaaatgtcagagtggtgattacctttggtgaggacaggaacctccaggaagcagaagtgttaatggcaatgttctctcttaagttggcggctcggttcccaggtgttcatgttatcattgttcctcataacttacatatactataaatatttgtgtgttatctatatcaaatttttactaaatgaaattactggattctgttctattaaaataaggatgtaagagacttgttcaggtctaaatatttgcagatttattttcgtaaatatttagaatgccctttccttaatatcttttcagatgcaatgtttagagttttatatggatttttacttgaatcccaatttattcatgcaactataacagctggtggcatttagattctaaatactgcttgttctcctatgtatgcatcattagaatcaggtgttataatcatccatggctgcaatagatggaaaatcagtcagaataaatacagttctggagaatgcagagggaataatttgaagatataatttgtatgtaagaattcattttgtttatgcatgtggttatacatttttatcttgtaataagaatgacatgtaggccaaccagactgagtttgttaaatgtgatacttaatgtttgattgtatctgtaagagactatcttccaaactctccctcattttctttctttaacactatttagcaaatatttcttcagctctattccataaggcagtgggcacccagatgtttccatatgcatggttgtgccttcttttgacctattgcaggtaaaattgcctacttcatgacctatatcaattgctgtaataccaacttgtctaatcagttttgtaagatactttctaactttttactctgtgtattgcctcagcatactggtgcattcttaccgattttaggaaaatgaataatttttcttttttccacccagctgctgataaagatgatagttcagaagacatttcagtgccgagtagtccacatacagaagctatacagcatagttcggtcagcacatccaatggagtcagttcaacctccaaggcagaagctgtagccacttcagtcctcacccagatggcggaccagagtacagagcctgctctttcacagatcgttatggctccttcctcccagtcacagccctcaggaagttgattaaaaacctgcagtacaacagttttagatactcattagtgacttcaaagggaaatcaaggaaagaccagtttccatttatgcgaaatctgtggttgtaaattttttttttttacttgaaattaaatttggctctaaagttggtgtagcagcagttgatcagactgaaaaacggtttttagtctctggaaaaagactgattttgctttttttataaatattattagatttattaatttttctgtgctcaatgtgtaaattgtattataattcattgtgatttatttcacttttaatttgctggtgttttaataaatgggggtgttactgaatctttcttcccacttccatttcttttgaccaccccttaaccctcaactgtgacggtagtagtattatcatttataccaaagttttgcatagtccctgttgactttgtaatgttaacggagtcataaaagcactaggcaagagaaagatagaaatttgcttttaatctttttgccttttattttgcacattatgcaaaaggaaaaacattaaagaacacttttttttaagtgagtgaaaacatggtaaagacatacagtgcttttatgcacattgttaagctaaatcaaggtcatttataatcattttccttttttatttaagattttaagtaaacaaattttagaattttcagcatttcaaaaatgattttatttttcaagtcttaaattcaatattttacacctatgttttgaggctaaaaatatgaaattatataatgtatgatacagggttatcaaatatctaataatttttgaaattagctcttgtttttggtttttttgttgttgtttttacagatttcaggttacaaactgcaaagtttatgcataattaagtatggtatggttgccagaaaagcctaaaattactacttagaaaatttaagactgtttacccccattgtcttgtacttgcgagctaacttgtactattcttgtgaaagcactgtcatcttttagtagcaaattttgataatgtttctcgtggaaaaaaaaatcagtatctatctttagaacaatgtaattataatgtgggaagtgtgcatgaatgagagagagtgtgtgtgtatctgtgtgtgtgtgcgcgtgtgtgtgtgtcttttaatagtttatgccagcaatctttgcttgaatgtttaacgatgccttcagtgtgatgctggccaatagatgattgcagtttaaaatgtcattattgtgcaggcttggataactaacattccatgatgtagcttgtttctgatgagatgattgtaggtacatttttctcattatccaatcatctgtgggatacttagttttctaatgtgccattatctatttttattctgcagttatgttcaaaatacagtacatattttaaaatagaataaattgttaaacataaaattttaaaagtagtagatgtgcgtaagaaaactttgtaaaatagttatgagtcctacccagtagcaacttctggcattcaagcaggattccactatgtaaatatctgtaatgcatttataataagttgtgtagtttgtcctgcatccatactacactatttgctaaagtctcagtgccatctcctaatgagactgacattttaaaagtctgtatggaatatccttgataattcaaggaaatatccctcctgcctaagttccaaactgggaaacattcaaattatataaatgacatttcaggactttaagtatgaagataatgggaattttattgttttgctttttaaaatgagagcatttttatttgataattttttttaaatttttaatttttaactaatttcattattttaaagtaatcagtttttcaaatcatgattttgatatcattattctaaggagttatctcaaaggcacaaaatatgaattctgcaagaaggctattttttattgtagtttgaatgggttaggaaaagcctcaatttttcactcttaagtccttcagtacatttttctttcatcttattacttatgcaagttaaggttctttggtaacagaattcttgcaactgtaaaataaaactacatagatgtaagaagtcatgtaaacggttaacaagcttaccaaggttagcaaaactttcattgtaaatcagtctgtactgagcaaataaaaatcattattagttgtataaacacaaattccattttgactttcaggatgtcatactacttctgtacctagcattttcagtccttatatttgcaatgttacacaaactgtactattttcttttatgtgcagtttgcatgagtaaaccatcagagaataaattctatctttaaattatgttcataatttgcttgttctcttacctttccttcataaagtaacatcaccagataatgattttttttttccttcaggacatttattaactgagaagaacctgagattctttctagttctgtgataaaattcattcattccttttaactgcagggtacttgggccttattcctctctgcactcactttgcatcccatttatatataatgaattatataattatataattcatatgtaattccccacacccctgaactttagtcacagatccacctgcctttggcatcccttggtgatggcctgacaaaacatctgaaacataacatgtccaacactgaactgctaaacagctcaccctaccctcaaacatttctcccacaaactttcacaagtcaattgatgacaatacaattcttcaagttgcttaagctagaacaaccttgttgtcacccttgattttctttctctcagcccacatccagtccgtcaagaaatactatttgctttcccctcaaaacaatccagaattcaaccacatatcaccatttataccactttcatcctaatctgtgcctttatgattcctcatccagttactgtacttgcttcataaatgtcttttcactttcacccctgcccaccacagcccatcctcaatacagcagccagagcgatgcttttaaaacttttgtcaggttacagcactgctctgcctagaatcctggagtggctcccctgtttcactcagaacttgaagacggcccacaaagcccagagatgatttattccatatcccatcccattgtgtctctgacctcatctgccacattgttttgtcagtgaacatttgagtgctactaggtgccagaggttgctctaagcacttgaagtaacacaatggccaaaagcaaaaatctctgcctttgtggaggccacgttctaaagatggtgggaggatgttgggaaatgcaatcaacaagtcagttatgtgttatattagaagtggtacaagctaagtgaagaagcagacttacaccagttttgctggagagtgtgtagagtgaccgttttagtcatatctgttagatatgaccaatctgaggagatgcatggctattttttaacaaacattctaccaatgtgcttaaggtagattatgtgatatagataaaaagtttcatgaaggcaagctgatgtatttctataacaggttaacaaatgatcaaacaggttaacaaaaggtcaaactcatgttagtcttgacttcagaggacaggaaagataatctcgtctatggtgtgtgcttactattaaatgtagttttgctaattctacatctatgagactataggatatgatggatgaccatatttgagattatcatgagagaatcctatttattccaaggccctcatcttagatagacatgaacaaacacagacacccaaaatacctagagaacacagttatcaaagcaaatgaacttttcctgtaattgtctcacatggcttaaaacaacagcaagtctttccagattatcagtaactatatattgaaatgtgggtgttcatagagttaatagtttggtattaagatcctagacagctagcatccttctgtgtggaaaaaaaatctcaaagtttagaatatttctaaagtcctttctgaagaaataaatggttctaccatttaaatataaatgatgagttgcaagttacatacattgccgtagaataggtgccatcagtgaaaatgtttccaaaattaaaagacttaatctgaaatagcaaaggccatgtggcattggaacctacaatggaagaaaaagcatgcatagttttctattgtagtccaaatcaaaggttaattgtaaaaatatcaaatatgtcacagcaatcaaaccagaagggctctgttaatgggcaagtggcttgcatcatttttcttcaaatgtacatgcaagttcttctagtggctttccaagaagagaagacacctcattttcattagtgttgctagtacacccttgtcatggtcacagtgccttcccttgtctctgtgttgcattagattttacatgtgagacatcatttcttgagacataattttttgaacaaaacaattgtattggtgttatcaggctttatctcagttatttgggaaaatatttcttactctgaatctcaaattttaactatggcagttatgtcaagaattggctttagtcattttgcagtatattttgctttctaggaaagtattaatagaaaaaaacagaatattcccccaaaacagcttcttttaaagttatttttccttaataatttttaaaagcatgtaaattaagaagagatgctatttttcataggctgacccaaaaattaggcaaatttttataaattttccattttttatgcatttatagtaggcatatatatttatggggcacatgagatgtttgatacaggcatgcaatgcataatcacatcatgtaaaaatgggatgttcgtcccctcaagtatttatcttttgtgtgtcaaatcaattatttcagttatttttaaatgtacaattaaagtattgactatcgtccccctgttgtattatcaaatactgggtcttcattcgttatatttttttgtacccgttaaccatccccacttcctactcaccctcccactgcccttcccagcctctggtaaccattcttctgttctctgccccataagttaaattgtttttatttttagaacccacaaagtgaggggatgtgatatatatctttctgtgcctggcttatttcacttagcataatgacccccagttccatccatgttgttggaaatagcaagatctcattcttttttatgactccattatgtagttaccacattttctttttccattgatctgttgatggacacattggttgcttctaaattttggctattgcaaacagaactgcaacaaacatgggaatgcggatagctcttcaatatactgacttcctttcttttaggtatacacctagcagtgagattactggatcatatggtagctttatttttaggtttttgaggaacctccaaactgttctccacagtggctatacttttacactcccaccaacattgtatgaggattcccttttctctatgtccttgccagcatttgttactgcagtcttttggataaaagccattttgcctggggtgagaggatatctcattgttttgatttgcatttctctgttgatagtgatgttgaacaccttttcatatatgcctgtttgccatttgtatgtcttcttttgagaaatgtctattcgaatctttggcccattttaaaatcagatttttagatttttttcctgtagatctagttgaggtttttatatattctggttataaatctctttcagacaggtagtttgcaaatattttctcccattctgtgggttgtctcttcactttgttgattgtttttttgtttgctttttgttttttgggttttttgtttttgttttttgctgtgcaagctttttaagtcaatgtgattccatttgtccattttttcattggttgcctgtgcttgtgggatgttactcaataaatttttgcccagaccaatgtcctagagaatttccccaattttttttgtagtagtttcatagttaagaggtcttagatttcagtctttaattcatttttatttgatttttttatatgatgagagaggggtgtagtttcatacttctgcatatggatatccatgtctcccagcaccgtttgttgaagagactgtcttttctccagtgtgtttttgtcacctttgttgcaaatgagttcactatagatgtctggatttatttctgggttcactattatattccattggtctatgtgcctttttatgccagtaccatgctatttggactactatagctctatggtataatttgaagtcaggtaatatgattcctcaagttttgttctttttgcttaggaaagctttggctattttgggtcttttgtgcttccatgtacgtttaaggattgtttttctatttctgtgaagaatgtgattggtattttgatagggattgcgttgaatctgtagatcactttgggtagtatgaacattttaacaatattggttcttccagtctatgaatatagaatatctttccatttgttggtgtccttttcaatttcttgcatcagcatgtgatagttttcaatatcgcaatctttcacatcttaaattaattcctaggtatttatttgtggttattgtaagtggtattacattttttatttccttttcagattgttcatcactgctggcatatagaaatgctactgattcttatatgttgatgttgtgtcctgcaattttactaaatttatcagtcctaataattttctggtgtagtctttaggttttattaaatataagatcatagcatctgcagacaaagataatttgacttctgcctttcaaatttggatgctctttatttcttgtctgattactctagctaggacttccagtcctatgttaaataacagtgttgacagtgggcatccttgtcatgttccagatctcagagaaaaggctttcagctttcccccattctgtatgatactggctgtgggtctttcatatatggcttttattatgttgaagtatgttccttctatacccagttgtttgagggttattatcatgaagggatgttgaattttatcaaatgctttttcatcatcaattgaaatgatcatatggtttttatccttcattctgtccatgtgatgcatcacattgattgatttgcatatgttaaaccatgcttgcaccccaggaataaatcccacttggtcatgttgaatgatcttttaatacattactgaatttggtttgctattattttgttgaggatttttgcatcaatattcatcagacatattggctggtagttttctttttatgttgtatgtgtgtctagttttggtatcagggtaatactggcctcatagaatgagtttagaagtatttccttctctattttttggaatagtttgagtaggattggtattagttcttctttgaacatttggtagaattcaacagtgaagccatcaggccctgggcatttctttactgggagactttattacagcttcaatctttttacttgtatattgatatttttattcaggtttaggaaattctctgttatcctgctgaataaactttctacccctatctctgtctctacctcctctataaggacaataactcttagatttgccctattgaggctgttttctagatcctgtaggcattcctcattggttttttatctttcttcttttttctcctctctgtattttcaaattaagctcactaattctttcttctgcttgatcatttctgctattaaaagactcgtgttcttcagtatgccaattgcatttttcagctccagcatttctgcttgtttctgtttaatcattttaatctctttgttaaatgtatctgatagaattctgaattccttttctgtgttatcttgaatttctttgcatttcctcaagcatggctattttgaattctctgaaaggtcagagaatatctttgtttctccaggattgctccctattgccttttttagttcatttggtgaggtcatgttttcctggatggcgttgatgcatgtagatgttcttcagcgtctgggcattttagagttaggtatttattgtagacactcagtctgggcttgtttgtcctttttgggaacactttcaagatatttgaaaggactcgagtgttgtgatctaagctgtacctgttttagggggcaccccaagcccagtaatgctgtggttcttgcagacttgtagaggtactgccttaatgctcttggatgagatccagaagacctctctggattaccaggtggagactgttgttttcttaatttttcctacgtgaacggagtcattctctctgttctgagccatatggaactgggggtggtgtgacacaagcactcctgtggccacaaacactaggactgcactgggtcagatctgaatctagcacagcaccaggtctcacccaacctttctataacctctcattggctatgacctatgtttgctcaaggccctggagctctaaaatcagcaggtggcaaagctattcaggcctctgtccttctcttcagggtagcaagttagttcacccaggccctgggcttgtccagaggtgccatccaggagccagggactggagtcaaaactgttagaagtctacctgccaagactggtgttctattgtattgtggctcaactggcactcaaaccataagacacagtccttcacactcttccctacccattccaaaggcaaaagagcctcaccaagtggccattgccaccacaggcccacagggagtacctcaagactgccaccaatgttcccttaagggccaagggctcttaggtgagattgtgatgaatgctgccttccctgggactcacccttcagggcagtgggctcccctctggctgaggcaggtccagaaatgccatccaagagccacgtcctggaattggggaccccaagaccctacttggtgctctaccccactatggctgagctggtatctaaggtggaagacaaaccccccctttgcttttccatccactttctcaagtggaaggaatctcaccccataaccccatagccaccacagctgggaatgtgctgtacttgcctgaagccagcaagtttcaagaggctcactgaaggccctcaacatagtacctgagtatcgctgctggttattcagggcccaaaggctcttcagttagtaggattctgccaggactgggtccttcctttcatggaagcatgttcccttctggtccagagtatgtctagaaatgtatctgggggctagggcctggaaacggggcctcatgattctgaccaataccctatctagctgtagctgagctgggatccaagatgcaaggcaaagtcttacccactcttccctctcctctccttaagtggaggaaatggggttgttttggagctttgagcaacctggggttagggaagggatgatgccagcactcacacagtcaccctggctgtgtctcagtaggttgtgttccctgctgttcattgtctctgggcccagttcagcactaagattggcctaggagttgcattccttgtggcctagactgcctttcaagtgttatctggagccccagagcacttcactctgcggtggtgaggcttttgggaacttaagttcaggccactgggatcggcgattcctctggctagggctgctttcaatgctcccttcgtgggcgggcatcagctgagtttgggtcagttttgttttctaatttttggtttttatgaaggtgttttattttgtgtgtgtgtagacagttgttaaattggtgcccttgctgtggggataatcagtggagatttctagtctgccatcttgccctgcccctactccccaaatttttaatgttatttatttagcagaatttaagatggtagcattgtctattaggagtttctcatgaagcaaatacattatatgatgtttatgaggaaatgagaaaatttgtgaatgccattatcttttttcttttgtgacagagtctcactcctttacccaggctggacatgatctcagctcactgcaacctccacctcccgggttcaagcaatactcctgccttagcctcctgagtagctgggattacaggcgtgcaccaccatacctggctaatttttgtatttttagtagagatggggtttcactatgttggccaggctggtctcgaactcctgacctcaagtgataaaatgctgggattacaggcttgaaccaccactcccggccaatgccattatcttaaaccaactttgcattatcgttaatactgtattacctattttactgaatgatttttttctactagttttttatctctatgtaatttaaacatgtggctagttcctaggtccatttttaggaggtatgcttattaaaattcattttcatagtgtctaattaaataacatcaatttgaataaagtgagttagataatataactattctattgtaattaattaggacatttaaaaaataattcaacagataaacattgacttcctcccatggctaaattattagggaaataccttctacattacatcttaaattattcagctcaggtggtggtttctgagaacactttcaacaccatgaggtaatatgctgaatcataaacaaccacgtcagccgcctacattaacatactgcaaacaagactcttcagatcttttttatggcatttaagtccaattcaaataaaacttcaattctttatggactggagtatatctgtgacaaagaaacatcagataacattttaaaaagaatgtatgctaccattgttatttttattactatctgtagaagcttttatacgtgccccaaaagtagctatttttgaaaatgagtttgatcaataatttaaacacttgcacaaaatatattggtatgcctgttataagtgcataggcatgtataatttaaaatcacttacaatttaaaagttttagcctcttttttaagattttcctcttgccaggtgtgatgactcacatatgtaatcccagcactatggtaggctaaggtggaaggatgacttgagcctaggagttcaagactagcctgggcaacatagaacctctctctataaaaaataaaaaaaatagctgggcatagtggcacatgcctattgtgccagcaactcaggaggctgagataggaggattgcttgaccctgggagttcaaggctacggcaagctatgatcataccactgcactccagtctgggtgacagagtgagaccctatgtaaggtaatggatgtgcttaggtcaaggataggctgaggtaaacatcctgtatgacttagcaggattggaacgcaggcgcacaattccatgtataatgtaaacacagctatgtacataacacgggaaggtcatcactgggctttacgctactattgtctgtaaaaggtataattgccctgctgacactgttcaggcgctcgtgcccagagaaagagagagaaagccagagatgtctgtcttgcagactggcaagagggagccaggacacagctcggcttgcttacacccagagggaaagagttaagctggtgaccctgaaggcagagcgagcaggagagtgcagctgtgtgtgggagcgacaagaactgcagagttagagcaagcaacagagacagacagtgtaagagagctgctgaataaagctgtatttcacctacctgtggctccccccacttcctgctgctgagtgttctctcagctatctcccattcatccacccactccctttggacctcagcatgggctggaacctggacttgaacctaacaccctttctctacaaaaaattaaaatataaaattataaccaaaacaggttaaaaaaaagttaggtataaaaaggggattaattcagcacagacttaaaagacaactctataggaataatttaatatttgataaaaagataatttcttagaaaatgtcatttatccaagatgactctgtaaaagttagaaaaccaaatagatctgtaaacaatcaagaaatgtaattggtgattaaatatcaaaaaacaaaatgagagagacaagcatctacttctagaggctttatagggaagttattacaaaatcacttaaaaataatatataactttacagaggatgggcagaaaaaaatctcaccaactcattttatgagcttaacacctaaatcagactgaaacattaacacccaaaccagactatgacagtttggttatttttattgttcagtggtattccactgtatggttatatcacaatatgtat

SEQ ID NO: 1272 - DNA, 4090 bp, Homo sapiens
tgccgaagacccgccttcttctccttaagcctgacggaatcacctgactcggaggcgctccctcagaaggaagggtactagatggaaacttgagaaaggactgcttattgataacagctgaggtattcctggaagcagagtaaataaagctcatggcccaccagctagaaagtattcttgccatgagaaaaagaatgtgataagttattcaacttatgaaattcaagttacatgtgaattctgccaggcaatacaaggacctgtggaatatgagtgatgacaaaccctttctatgtactgcgcctggatgtggccagcgttttaccaacgaggatcatttggctgtccataaacataaacatgagatgacactgaaatttggtccagcacgtaatgacagtgtcattgtggctgatcagaccccaacaccaacaagattcttgaaaaactgtgaagaagtgggtttgtttaatgagttggcgagtccatttgagaatgaattcaagaaagcttcagaagatgacattaaaaaaatgcctctagatttatcccctcttgcaacacctatcataagaagcaaaattgaggagccttctgttgtagaaacaactcaccaggatagtcctttacctcacccagagtctactaccagtgatgagaaggaagtaccattggcacaaactgcacagcccacatcagctattgttcgtccagcatcattacaggttcccaatgtgctgcttacaagttctgactcaagtgtaattattcagcaggcagtaccttcaccaacctcaagtactgtaatcacccaggcaccatcctctaacaggccaattgtccctgtaccaggcccatttcctcttctgttacatcttcctaatggacaaaccatgcctgttgctattcctgcatcaattacaagttctaatgtgcatgttccagctgcagtcccactcgttcgaccagtcaccatggtgcctagtgttccaggaatcccaggtccttcctctccccaaccagtacagtcagaagcaaaaatgagattaaaagctgctttgacccagcaacatcctccagttaccaatggtgatactgtcaaaggtcatggtagcggattggttaggactcagtcagaggaatctcgaccgcagtcattacaacagccagccacatccactacagaaactccggcttctccagctcacacaactccacagacccaaagtacaagtggtcgtcggagaagagcagctaacgaagatcctgatgaaaaaaggagaaagtttttagagcgaaatagagcagcagcttcaagatgccgacaaaaaaggaaagtctgggttcagtctttagagaagaaagctgaagacttgagttcattaaatggtcagctgcagagtgaagtcaccctgctgagaaatgaagtggcacagctgaaacagcttcttctggctcataaagattgccctgtaaccgccatgcagaagaaatctggctatcatactgctgataaagatgatagttcagaagacatttcagtgccgagtagtccacatacagaagctatacagcatagttcggtcagcacatccaatggagtcagttcaacctccaaggcagaagctgtagccacttcagtcctcacccagatggcggaccagagtacagagcctgctctttcacagatcgttatggctccttcctcccagtcacagccctcaggaagttgattaaaaacctgcagtacaacagttttagatactcattagtgacttcaaagggaaatcaaggaaagaccagtttccatttatgcgaaatctgtggttgtaaattttttttttttacttgaaattaaatttggctctaaagttggtgtagcagcagttgatcagactgaaaaacggtttttagtctctggaaaaagactgattttgctttttttataaatattattagatttattaatttttctgtgctcaatgtgtaaattgtattataattcattgtgatttatttcacttttaatttgctggtgttttaataaatgggggtgttactgaatctttcttcccacttccatttcttttgaccaccccttaaccctcaactgtgacggtagtagtattatcatttataccaaagttttgcatagtccctgttgactttgtaatgttaacggagtcataaaagcactaggcaagagaaagatagaaatttgcttttaatctttttgccttttattttgcacattatgcaaaaggaaaaacattaaagaacacttttttttaagtgagtgaaaacatggtaaagacatacagtgcttttatgcacattgttaagctaaatcaaggtcatttataatcattttccttttttatttaagattttaagtaaacaaattttagaattttcagcatttcaaaaatgattttatttttcaagtcttaaattcaatattttacacctatgttttgaggctaaaaatatgaaattatataatgtatgatacagggttatcaaatatctaataatttttgaaattagctcttgtttttggtttttttgttgttgtttttacagatttcaggttacaaactgcaaagtttatgcataattaagtatggtatggttgccagaaaagcctaaaattactacttagaaaatttaagactgtttacccccattgtcttgtacttgcgagctaacttgtactattcttgtgaaagcactgtcatcttttagtagcaaattttgataatgtttctcgtggaaaaaaaaatcagtatctatctttagaacaatgtaattataatgtgggaagtgtgcatgaatgagagagagtgtgtgtgtatctgtgtgtgtgtgcgcgtgtgtgtgtgtcttttaatagtttatgccagcaatctttgcttgaatgtttaacgatgccttcagtgtgatgctggccaatagatgattgcagtttaaaatgtcattattgtgcaggcttggataactaacattccatgatgtagcttgtttctgatgagatgattgtaggtacatttttctcattatccaatcatctgtgggatacttagttttctaatgtgccattatctatttttattctgcagttatgttcaaaatacagtacatattttaaaatagaataaattgttaaacataaaattttaaaagtagtagatgtgcgtaagaaaactttgtaaaatagttatgagtcctacccagtagcaacttctggcattcaagcaggattccactatgtaaatatctgtaatgcatttataataagttgtgtagtttgtcctgcatccatactacactatttgctaaagtctcagtgccatctcctaatgagactgacattttaaaagtctgtatggaatatccttgataattcaaggaaatatccctcctgcctaagttccaaactgggaaacattcaaattatataaatgacatttcaggactttaagtatgaagataatgggaattttattgttttgctttttaaaatgagagcatttttatttgataattttttttaaatttttaatttttaactaatttcattattttaaagtaatcagtttttcaaatcatgattttgatatcattattctaaggagttatctcaaaggcacaaaatatgaattctgcaagaaggctattttttattgtagtttgaatgggttaggaaaagcctcaatttttcactcttaagtccttcagtacatttttctttcatcttattacttatgcaagttaaggttctttggtaacagaattcttgcaactgtaaaataaaactacatagatgtaagaagtcatgtaaacggttaacaagcttaccaaggttagcaaaactttcattgtaaatcagtctgtactgagcaaataaaaatcattattagttgtataaacacaaattccattttgactttcaggatgtcatactacttctgtacctagcattttcagtccttatatttgcaatgttacacaaactgtactattttcttttatgtgcagtttgcatgagtaaaccatcagagaataaattctatctttaaattatgttcat

SEQ ID NO: 1273 - protein, 501 aa, Homo sapiens
MKFKLHVNSARQYKDLWNMSDDKPFLCTAPGCGQRFTNEDHLAVHKHKHEMTLKFGPARNDSVIVADQTPTPTRFLKNCEEVGLFNELDFENEFKKASEDDIKKMPLDLSPLATPIIRSKIEEPSVVETTHQDSPLPHPESTTSDEKEVPLAQTAQPTSAIVRPASLQVPNVLLTSSDSSVIIQQAVPSPTSSTVITQAPSSNRPIVPVPGPFPLLLHLPNGQTMPVAIPASITSSNVHVPAAVPLVRPVTMVPSVPGIPGPSSPQPVQSEAKMRLKAALTQQHPPVTNGDTVKGHGSGLVRTQSEESRPQSLQQPATSTTETPDAHTTPQTQSTSGRRRRAANEDPDEKRRKFLERNRAAASRCRQKRKVWVQSLEKKAEDLSSLNGQLQSEVTLLRNEVAQLKQLLLAHKDCPVTAMQKKSGYHTADKDDSSEDISVPSSPHTEAIQHSSVSTSNGVSSTSKAEAVATSVLTQMADQSTEPALSQIVMAPSSQSQPSGS

SEQ ID NO: 1274 - DNA, 3796 bp, Homo sapiens
tgccgaagacccgccttcttctccttaagcctgacggaatcacctgactcggaggcgctccctcagaaggaagggtactagatggaaacttgagaaaggactgcttattgataacagctgaggtattcctggaagcagagtaaataaagctcatggcccaccagctagaaagtattcttgccatgagaaaaagaatgtgataagttattcaacttatgaaattcaagttacatgtgaattctgccaggcaatacaaggacctgtggaatatgagtgatgacaaaccctttctatgtactgcgcctggatgtggccagcgttttaccaacgaggatcatttggctgtccataaacataaacatgagatgacactgaaatttggtccagcacgtaatgacagtgtcattgtggctgatcagaccccaacaccaacaagattcttgaaaaactgtgaagaagtgggtttgtttaatgagttggcgagtccatttgagaatgaattcaagaaagcttcagaagatgacattaaaaaaatgcctctagatttatcccctcttgcaacacctatcataagaagcaaaattgaggagccttctgttgtagaaacaactcaccaggatagtcctttacctcacccagagtctactaccagtgatgagaagctcgttcgaccagtcaccatggtgcctagtgttccaggaatcccaggtccttcctctccccaaccagtacagtcagaagcaaaaatgagattaaaagctgctttgacccagcaacatcctccagttaccaatggtgatactgtcaaaggtcatggtagcggattggttaggactcagtcagaggaatctcgaccgcagtcattacaacagccagccacatccactacagaaactccggcttctccagctcacacaactccacagacccaaagtacaagtggtcgtcggagaagagcagctaacgaagatcctgatgaaaaaaggagaaagtttttagagcgaaatagagcagcagcttcaagatgccgacaaaaaaggaaagtctgggttcagtctttagagaagaaagctgaagacttgagttcattaaatggtcagctgcagagtgaagtcaccctgctgagaaatgaagtggcacagctgaaacagcttcttctggctcataaagattgccctgtaaccgccatgcagaagaaatctggctatcatactgctgataaagatgatagttcagaagacatttcagtgccgagtagtccacatacagaagctatacagcatagttcggtcagcacatccaatggagtcagttcaacctccaaggcagaagctgtagccacttcagtcctcacccagatggcggaccagagtacagagcctgctctttcacagatcgttatggctccttcctcccagtcacagccctcaggaagttgattaaaaacctgcagtacaacagttttagatactcattagtgacttcaaagggaaatcaaggaaagaccagtttccatttatgcgaaatctgtggttgtaaattttttttttttacttgaaattaaatttggctctaaagttggtgtagcagcagttgatcagactgaaaaacggtttttagtctctggaaaaagactgattttgctttttttataaatattattagatttattaatttttctgtgctcaatgtgtaaattgtattataattcattgtgatttatttcacttttaatttgctggtgttttaataaatgggggtgttactgaatctttcttcccacttccatttcttttgaccaccccttaaccctcaactgtgacggtagtagtattatcatttataccaaagttttgcatagtccctgttgactttgtaatgttaacggagtcataaaagcactaggcaagagaaagatagaaatttgcttttaatctttttgccttttattttgcacattatgcaaaaggaaaaacattaaagaacacttttttttaagtgagtgaaaacatggtaaagacatacagtgcttttatgcacattgttaagctaaatcaaggtcatttataatcattttccttttttatttaagattttaagtaaacaaattttagaattttcagcatttcaaaaatgattttatttttcaagtcttaaattcaatattttacacctatgttttgaggctaaaaatatgaaattatataatgtatgatacagggttatcaaatatctaataatttttgaaattagctcttgtttttggtttttttgttgttgtttttacagatttcaggttacaaactgcaaagtttatgcataattaagtatggtatggttgccagaaaagcctaaaattactacttagaaaatttaagactgtttacccccattgtcttgtacttgcgagctaacttgtactattcttgtgaaagcactgtcatcttttagtagcaaattttgataatgtttctcgtggaaaaaaaaatcagtatctatctttagaacaatgtaattataatgtgggaagtgtgcatgaatgagagagagtgtgtgtgtatctgtgtgtgtgtgcgcgtgtgtgtgtgtcttttaatagtttatgccagcaatctttgcttgaatgtttaacgatgccttcagtgtgatgctggccaatagatgattgcagtttaaaatgtcattattgtgcaggcttggataactaacattccatgatgtagcttgtttctgatgagatgattgtaggtacatttttctcattatccaatcatctgtgggatacttagttttctaatgtgccattatctatttttattctgcagttatgttcaaaatacagtacatattttaaaatagaataaattgttaaacataaaattttaaaagtagtagatgtgcgtaagaaaactttgtaaaatagttatgagtcctacccagtagcaacttctggcattcaagcaggattccactatgtaaatatctgtaatgcatttataataagttgtgtagtttgtcctgcatccatactacactatttgctaaagtctcagtgccatctcctaatgagactgacattttaaaagtctgtatggaatatccttgataattcaaggaaatatccctcctgcctaagttccaaactgggaaacattcaaattatataaatgacatttcaggactttaagtatgaagataatgggaattttattgttttgctttttaaaatgagagcatttttatttgataattttttttaaatttttaatttttaactaatttcattattttaaagtaatcagtttttcaaatcatgattttgatatcattattctaaggagttatctcaaaggcacaaaatatgaattctgcaagaaggctattttttattgtagtttgaatgggttaggaaaagcctcaatttttcactcttaagtccttcagtacatttttctttcatcttattacttatgcaagttaaggttctttggtaacagaattcttgcaactgtaaaataaaactacatagatgtaagaagtcatgtaaacggttaacaagcttaccaaggttagcaaaactttcattgtaaatcagtctgtactgagcaaataaaaatcattattagttgtataaacacaaattccattttgactttcaggatgtcatactacttctgtacctagcattttcagtccttatatttgcaatgttacacaaactgtactattttcttttatgtgcagtttgcatgagtaaaccatcagagaataaattctatctttaaattatgttcat

SEQ ID NO: 1275 - protein, 403 aa, Homo sapiens
MKFKLHVNSARQYKDLWNMSDDKPFLCTAPGCGQRFTNEDHLAVHKHKHEMTLKFGPARNDSVIVADQTPTPTRFLKNCEEVGLFNELDFENEFKKASEDDIKKMPLDLSPLATPIIRSKIEEPSVVETTHQDSPLPHPESTTSDEKLVRPVTMVPSVPGIPGPSSPQPVQSEAKMRLKAALTQQHPPVTNGDTVKGHGSGLVRTQSEESRPQSLQQPATSTTETPDAHTTPQTQSTSGRRRRAANEDPDEKRRKFLERNRAAASRCRQKRKVWVQSLEKKAEDLSSLNGQLQSEVTLLRNEVAQLKQLLLAHKDCPVTAMQKKSGYHTADKDDSSEDISVPSSPHTEAIQHSSVSTSNGVSSTSKAEAVATSVLTQMADQSTEPALSQIVMAPSSQSQPSGS

SEQ ID NO: 1276 - DNA, 4160 bp, Homo sapiens
ctcgcgagagaggacggaagcctgtgggagcccgtggcctttaaagtgccgttcagccttttcctccaggggtgctttgtaaacacggctgtgctcagggctcgcgggtgaccgaaaggatcatgaactagtgacctggaaagggtactagatggaaacttgagaaaggactgcttattgataacagctgaggtattcctggaagcagagtaaataaagctcatggcccaccagctagaaagtattcttgccatgagaaaaagaatgtgataagttattcaacttatgaaattcaagttacatgtgaattctgccaggcaatacaaggacctgtggaatatgagtgatgacaaaccctttctatgtactgcgcctggatgtggccagcgttttaccaacgaggatcatttggctgtccataaacataaacatgagatgacactgaaatttggtccagcacgtaatgacagtgtcattgtggctgatcagaccccaacaccaacaagattcttgaaaaactgtgaagaagtgggtttgtttaatgagttggcgagtccatttgagaatgaattcaagaaagcttcagaagatgacattaaaaaaatgcctctagatttatcccctcttgcaacacctatcataagaagcaaaattgaggagccttctgttgtagaaacaactcaccaggatagtcctttacctcacccagagtctactaccagtgatgagaaggaagtaccattggcacaaactgcacagcccacatcagctattgttcgtccagcatcattacaggttcccaatgtgctgcttacaagttctgactcaagtgtaattattcagcaggcagtaccttcaccaacctcaagtactgtaatcacccaggcaccatcctctaacaggccaattgtccctgtaccaggcccatttcctcttctgttacatcttcctaatggacaaaccatgcctgttgctattcctgcatcaattacaagttctaatgtgcatgttccagctgcagtcccactcgttcgaccagtcaccatggtgcctagtgttccaggaatcccaggtccttcctctccccaaccagtacagtcagaagcaaaaatgagattaaaagctgctttgacccagcaacatcctccagttaccaatggtgatactgtcaaaggtcatggtagcggattggttaggactcagtcagaggaatctcgaccgcagtcattacaacagccagccacatccactacagaaactccggcttctccagctcacacaactccacagacccaaagtacaagtggtcgtcggagaagagcagctaacgaagatcctgatgaaaaaaggagaaagtttttagagcgaaatagagcagcagcttcaagatgccgacaaaaaaggaaagtctgggttcagtctttagagaagaaagctgaagacttgagttcattaaatggtcagctgcagagtgaagtcaccctgctgagaaatgaagtggcacagctgaaacagcttcttctggctcataaagattgccctgtaaccgccatgcagaagaaatctggctatcatactgctgataaagatgatagttcagaagacatttcagtgccgagtagtccacatacagaagctatacagcatagttcggtcagcacatccaatggagtcagttcaacctccaaggcagaagctgtagccacttcagtcctcacccagatggcggaccagagtacagagcctgctctttcacagatcgttatggctccttcctcccagtcacagccctcaggaagttgattaaaaacctgcagtacaacagttttagatactcattagtgacttcaaagggaaatcaaggaaagaccagtttccatttatgcgaaatctgtggttgtaaattttttttttttacttgaaattaaatttggctctaaagttggtgtagcagcagttgatcagactgaaaaacggtttttagtctctggaaaaagactgattttgctttttttataaatattattagatttattaatttttctgtgctcaatgtgtaaattgtattataattcattgtgatttatttcacttttaatttgctggtgttttaataaatgggggtgttactgaatctttcttcccacttccatttcttttgaccaccccttaaccctcaactgtgacggtagtagtattatcatttataccaaagttttgcatagtccctgttgactttgtaatgttaacggagtcataaaagcactaggcaagagaaagatagaaatttgcttttaatctttttgccttttattttgcacattatgcaaaaggaaaaacattaaagaacacttttttttaagtgagtgaaaacatggtaaagacatacagtgcttttatgcacattgttaagctaaatcaaggtcatttataatcattttccttttttatttaagattttaagtaaacaaattttagaattttcagcatttcaaaaatgattttatttttcaagtcttaaattcaatattttacacctatgttttgaggctaaaaatatgaaattatataatgtatgatacagggttatcaaatatctaataatttttgaaattagctcttgtttttggtttttttgttgttgtttttacagatttcaggttacaaactgcaaagtttatgcataattaagtatggtatggttgccagaaaagcctaaaattactacttagaaaatttaagactgtttacccccattgtcttgtacttgcgagctaacttgtactattcttgtgaaagcactgtcatcttttagtagcaaattttgataatgtttctcgtggaaaaaaaaatcagtatctatctttagaacaatgtaattataatgtgggaagtgtgcatgaatgagagagagtgtgtgtgtatctgtgtgtgtgtgcgcgtgtgtgtgtgtcttttaatagtttatgccagcaatctttgcttgaatgtttaacgatgccttcagtgtgatgctggccaatagatgattgcagtttaaaatgtcattattgtgcaggcttggataactaacattccatgatgtagcttgtttctgatgagatgattgtaggtacatttttctcattatccaatcatctgtgggatacttagttttctaatgtgccattatctatttttattctgcagttatgttcaaaatacagtacatattttaaaatagaataaattgttaaacataaaattttaaaagtagtagatgtgcgtaagaaaactttgtaaaatagttatgagtcctacccagtagcaacttctggcattcaagcaggattccactatgtaaatatctgtaatgcatttataataagttgtgtagtttgtcctgcatccatactacactatttgctaaagtctcagtgccatctcctaatgagactgacattttaaaagtctgtatggaatatccttgataattcaaggaaatatccctcctgcctaagttccaaactgggaaacattcaaattatataaatgacatttcaggactttaagtatgaagataatgggaattttattgttttgctttttaaaatgagagcatttttatttgataattttttttaaatttttaatttttaactaatttcattattttaaagtaatcagtttttcaaatcatgattttgatatcattattctaaggagttatctcaaaggcacaaaatatgaattctgcaagaaggctattttttattgtagtttgaatgggttaggaaaagcctcaatttttcactcttaagtccttcagtacatttttctttcatcttattacttatgcaagttaaggttctttggtaacagaattcttgcaactgtaaaataaaactacatagatgtaagaagtcatgtaaacggttaacaagcttaccaaggttagcaaaactttcattgtaaatcagtctgtactgagcaaataaaaatcattattagttgtataaacacaaattccattttgactttcaggatgtcatactacttctgtacctagcattttcagtccttatatttgcaatgttacacaaactgtactattttcttttatgtgcagtttgcatgagtaaaccatcagagaataaattctatctttaaattatgttcat

SEQ ID NO: 1277 - protein, 501 aa, Homo sapiens; identical to SEQ ID NO: 1273

SEQ ID NO: 1278 - DNA, 3007 bp, Homo sapiens
tgccgaagacccgccttcttctccttaagcctgacggaatcacctgactcggaggcgctccctcagaaggaagggtactagatggaaacttgagaaaggactgcttattgataacagctgaggtattcctggaagcagagtaaataaagctcatggcccaccagctagaaagtattcttgccatgagaaaaagaatgtgataagttattcaacttatgaaattcaagttacatgtgaattctgccaggcaatacaaggacctgtggaatatgagtgatgacaaaccctttctatgtactgcgcctggatgtggccagagtgaagtcaccctgctgagaaatgaagtggcacagctgaaacagcttcttctggctcataaagattgccctgtaaccgccatgcagaagaaatctggctatcatactgctgataaagatgatagttcagaagacatttcagtgccgagtagtccacatacagaagctatacagcatagttcggtcagcacatccaatggagtcagttcaacctccaaggcagaagctgtagccacttcagtcctcacccagatggcggaccagagtacagagcctgctctttcacagatcgttatggctccttcctcccagtcacagccctcaggaagttgattaaaaacctgcagtacaacagttttagatactcattagtgacttcaaagggaaatcaaggaaagaccagtttccatttatgcgaaatctgtggttgtaaattttttttttttacttgaaattaaatttggctctaaagttggtgtagcagcagttgatcagactgaaaaacggtttttagtctctggaaaaagactgattttgctttttttataaatattattagatttattaatttttctgtgctcaatgtgtaaattgtattataattcattgtgatttatttcacttttaatttgctggtgttttaataaatgggggtgttactgaatctttcttcccacttccatttcttttgaccaccccttaaccctcaactgtgacggtagtagtattatcatttataccaaagttttgcatagtccctgttgactttgtaatgttaacggagtcataaaagcactaggcaagagaaagatagaaatttgcttttaatctttttgccttttattttgcacattatgcaaaaggaaaaacattaaagaacacttttttttaagtgagtgaaaacatggtaaagacatacagtgcttttatgcacattgttaagctaaatcaaggtcatttataatcattttccttttttatttaagattttaagtaaacaaattttagaattttcagcatttcaaaaatgattttatttttcaagtcttaaattcaatattttacacctatgttttgaggctaaaaatatgaaattatataatgtatgatacagggttatcaaatatctaataatttttgaaattagctcttgtttttggtttttttgttgttgtttttacagatttcaggttacaaactgcaaagtttatgcataattaagtatggtatggttgccagaaaagcctaaaattactacttagaaaatttaagactgtttacccccattgtcttgtacttgcgagctaacttgtactattcttgtgaaagcactgtcatcttttagtagcaaattttgataatgtttctcgtggaaaaaaaaatcagtatctatctttagaacaatgtaattataatgtgggaagtgtgcatgaatgagagagagtgtgtgtgtatctgtgtgtgtgtgcgcgtgtgtgtgtgtcttttaatagtttatgccagcaatctttgcttgaatgtttaacgatgccttcagtgtgatgctggccaatagatgattgcagtttaaaatgtcattattgtgcaggcttggataactaacattccatgatgtagcttgtttctgatgagatgattgtaggtacatttttctcattatccaatcatctgtgggatacttagttttctaatgtgccattatctatttttattctgcagttatgttcaaaatacagtacatattttaaaatagaataaattgttaaacataaaattttaaaagtagtagatgtgcgtaagaaaactttgtaaaatagttatgagtcctacccagtagcaacttctggcattcaagcaggattccactatgtaaatatctgtaatgcatttataataagttgtgtagtttgtcctgcatccatactacactatttgctaaagtctcagtgccatctcctaatgagactgacattttaaaagtctgtatggaatatccttgataattcaaggaaatatccctcctgcctaagttccaaactgggaaacattcaaattatataaatgacatttcaggactttaagtatgaagataatgggaattttattgttttgctttttaaaatgagagcatttttatttgataattttttttaaatttttaatttttaactaatttcattattttaaagtaatcagtttttcaaatcatgattttgatatcattattctaaggagttatctcaaaggcacaaaatatgaattctgcaagaaggctattttttattgtagtttgaatgggttaggaaaagcctcaatttttcactcttaagtccttcagtacatttttctttcatcttattacttatgcaagttaaggttctttggtaacagaattcttgcaactgtaaaataaaactacatagatgtaagaagtcatgtaaacggttaacaagcttaccaaggttagcaaaactttcattgtaaatcagtctgtactgagcaaataaaaatcattattagttgtataaacacaaattccattttgactttcaggatgtcatactacttctgtacctagcattttcagtccttatatttgcaatgttacacaaactgtactattttcttttatgtgcagtttgcatgagtaaaccatcagagaataaattctatctttaaattatgttcat

SEQ ID NO: 1279 - protein, 144 aa, Homo sapiens
MKFKLHVNSARQYKDLWNMSDDKPFLCTAPGCGQSEVTLLRNEVAQLKQLLLAHKDCPVTAMQKKSGYHTADKDDSSEDISVPSSPHTEAIQHSSVSTSNGVSSTSKAEAVATSVLTQMADQSTEPALSQIVMAPSSQSQPSGS

SEQ ID NO: 1280 - DNA, 3071 bp, Homo sapiens
tttttaatggtgtttgcattgcagagattaaaagctgctttgacccagcaacatcctccagttaccaatggtgatactgtcaaaggtcatggtagcggattggttaggactcagtcagaggaatctcgaccgcagtcattacaacagccagccacatccactacagaaactccggcttctccagctcacacaactccacagacccaaagtacaagtggtcgtcggagaagagcagctaacgaagatcctgatgaaaaaaggagaaagtttttagagcgaaatagagcagcagcttcaagatgccgacaaaaaaggaaagtctgggttcagtctttagagaagaaagctgaagacttgagttcattaaatggtcagctgcagagtgaagtcaccctgctgagaaatgaagtggcacagctgaaacagcttcttctggctcataaagattgccctgtaaccgccatgcagaagaaatctggctatcatactgctgataaagatgatagttcagaagacatttcagtgccgagtagtccacatacagaagctatacagcatagttcggtcagcacatccaatggagtcagttcaacctccaaggcagaagctgtagccacttcagtcctcacccagatggcggaccagagtacagagcctgctctttcacagatcgttatggctccttcctcccagtcacagccctcaggaagttgattaaaaacctgcagtacaacagttttagatactcattagtgacttcaaagggaaatcaaggaaagaccagtttccatttatgcgaaatctgtggttgtaaattttttttttttacttgaaattaaatttggctctaaagttggtgtagcagcagttgatcagactgaaaaacggtttttagtctctggaaaaagactgattttgctttttttataaatattattagatttattaatttttctgtgctcaatgtgtaaattgtattataattcattgtgatttatttcacttttaatttgctggtgttttaataaatgggggtgttactgaatctttcttcccacttccatttcttttgaccaccccttaaccctcaactgtgacggtagtagtattatcatttataccaaagttttgcatagtccctgttgactttgtaatgttaacggagtcataaaagcactaggcaagagaaagatagaaatttgcttttaatctttttgccttttattttgcacattatgcaaaaggaaaaacattaaagaacacttttttttaagtgagtgaaaacatggtaaagacatacagtgcttttatgcacattgttaagctaaatcaaggtcatttataatcattttccttttttatttaagattttaagtaaacaaattttagaattttcagcatttcaaaaatgattttatttttcaagtcttaaattcaatattttacacctatgttttgaggctaaaaatatgaaattatataatgtatgatacagggttatcaaatatctaataatttttgaaattagctcttgtttttggtttttttgttgttgtttttacagatttcaggttacaaactgcaaagtttatgcataattaagtatggtatggttgccagaaaagcctaaaattactacttagaaaatttaagactgtttacccccattgtcttgtacttgcgagctaacttgtactattcttgtgaaagcactgtcatcttttagtagcaaattttgataatgtttctcgtggaaaaaaaaatcagtatctatctttagaacaatgtaattataatgtgggaagtgtgcatgaatgagagagagtgtgtgtgtatctgtgtgtgtgtgcgcgtgtgtgtgtgtcttttaatagtttatgccagcaatctttgcttgaatgtttaacgatgccttcagtgtgatgctggccaatagatgattgcagtttaaaatgtcattattgtgcaggcttggataactaacattccatgatgtagcttgtttctgatgagatgattgtaggtacatttttctcattatccaatcatctgtgggatacttagttttctaatgtgccattatctatttttattctgcagttatgttcaaaatacagtacatattttaaaatagaataaattgttaaacataaaattttaaaagtagtagatgtgcgtaagaaaactttgtaaaatagttatgagtcctacccagtagcaacttctggcattcaagcaggattccactatgtaaatatctgtaatgcatttataataagttgtgtagtttgtcctgcatccatactacactatttgctaaagtctcagtgccatctcctaatgagactgacattttaaaagtctgtatggaatatccttgataattcaaggaaatatccctcctgcctaagttccaaactgggaaacattcaaattatataaatgacatttcaggactttaagtatgaagataatgggaattttattgttttgctttttaaaatgagagcatttttatttgataattttttttaaatttttaatttttaactaatttcattattttaaagtaatcagtttttcaaatcatgattttgatatcattattctaaggagttatctcaaaggcacaaaatatgaattctgcaagaaggctattttttattgtagtttgaatgggttaggaaaagcctcaatttttcactcttaagtccttcagtacatttttctttcatcttattacttatgcaagttaaggttctttggtaacagaattcttgcaactgtaaaataaaactacatagatgtaagaagtcatgtaaacggttaacaagcttaccaaggttagcaaaactttcattgtaaatcagtctgtactgagcaaataaaaatcattattagttgtataaacacaaattccattttgactttcaggatgtcatactacttctgtacctagcattttcagtccttatatttgcaatgttacacaaactgtactattttcttttatgtgcagtttgcatgagtaaaccatcagagaataaattctatctttaaattatgttcat

SEQ ID NO: 1281 - protein, 233 aa, Homo sapiens
MVFALQRLKAALTQQHPPVTNGDTVKGHGSGLVRTQSEESRPQSLQQPATSTTETPDAHTTPQTQSTSGRRRRAANEDPDEKRRKFLERNRAAASRCRQKRKVWVQSLEKKAEDLSSLNGQLQSEVTLLRNEVAQLKQLLLAHKDCPVTAMQKKSGYHTADKDDSSEDISVPSSPHTEAIQHSSVSTSNGVSSTSKAEAVATSVLTQMADQSTEPALSQIVMAPSSQSQPSGS

SEQ ID NO: 1282 - DNA, 3918 bp, Homo sapiens
tattcttgccatgagaaaaagaatgtgataagttattcaacttatgaaattcaagttacatgtgaattctgccaggcaatacaaggacctgtggaatatgagtgatgacaaaccctttctatgtactgcgcctggatgtggccagcgttttaccaacgaggatcatttggctgtccataaacataaacatgagatgacactgaaatttggtccagcacgtaatgacagtgtcattgtggctgatcagaccccaacaccaacaagattcttgaaaaactgtgaagaagtgggtttgtttaatgagttggcgagtccatttgagaatgaattcaagaaagcttcagaagatgacattaaaaaaatgcctctagatttatcccctcttgcaacacctatcataagaagcaaaattgaggagccttctgttgtagaaacaactcaccaggatagtcctttacctcacccagagtctactaccagtgatgagaaggaagtaccattggcacaaactgcacagcccacatcagctattgttcgtccagcatcattacaggttcccaatgtgctgcttacaagttctgactcaagtgtaattattcagcaggcagtaccttcaccaacctcaagtactgtaatcacccaggcaccatcctctaacaggccaattgtccctgtaccaggcccatttcctcttctgttacatcttcctaatggacaaaccatgcctgttgctattcctgcatcaattacaagttctaatgtgcatgttccagctgcagtcccactcgttcgaccagtcaccatggtgcctagtgttccaggaatcccaggtccttcctctccccaaccagtacagtcagaagcaaaaatgagattaaaagctgctttgacccagcaacatcctccagttaccaatggtgatactgtcaaaggtcatggtagcggattggttaggactcagtcagaggaatctcgaccgcagtcattacaacagccagccacatccactacagaaactccggcttctccagctcacacaactccacagacccaaagtacaagtggtcgtcggagaagagcagctaacgaagatcctgatgaaaaaaggagaaagtttttagagcgaaatagagcagcagcttcaagatgccgacaaaaaaggaaagtctgggttcagtctttagagaagaaagctgaagacttgagttcattaaatggtcagctgcagagtgaagtcaccctgctgagaaatgaagtggcacagctgaaacagcttcttctggctcataaagattgccctgtaaccgccatgcagaagaaatctggctatcatactgctgataaagatgatagttcagaagacatttcagtgccgagtagtccacatacagaagctatacagcatagttcggtcagcacatccaatggagtcagttcaacctccaaggcagaagctgtagccacttcagtcctcacccagatggcggaccagagtacagagcctgctctttcacagatcgttatggctccttcctcccagtcacagccctcaggaagttgattaaaaacctgcagtacaacagttttagatactcattagtgacttcaaagggaaatcaaggaaagaccagtttccatttatgcgaaatctgtggttgtaaattttttttttttacttgaaattaaatttggctctaaagttggtgtagcagcagttgatcagactgaaaaacggtttttagtctctggaaaaagactgattttgctttttttataaatattattagatttattaatttttctgtgctcaatgtgtaaattgtattataattcattgtgatttatttcacttttaatttgctggtgttttaataaatgggggtgttactgaatctttcttcccacttccatttcttttgaccaccccttaaccctcaactgtgacggtagtagtattatcatttataccaaagttttgcatagtccctgttgactttgtaatgttaacggagtcataaaagcactaggcaagagaaagatagaaatttgcttttaatctttttgccttttattttgcacattatgcaaaaggaaaaacattaaagaacacttttttttaagtgagtgaaaacatggtaaagacatacagtgcttttatgcacattgttaagctaaatcaaggtcatttataatcattttccttttttatttaagattttaagtaaacaaattttagaattttcagcatttcaaaaatgattttatttttcaagtcttaaattcaatattttacacctatgttttgaggctaaaaatatgaaattatataatgtatgatacagggttatcaaatatctaataatttttgaaattagctcttgtttttggtttttttgttgttgtttttacagatttcaggttacaaactgcaaagtttatgcataattaagtatggtatggttgccagaaaagcctaaaattactacttagaaaatttaagactgtttacccccattgtcttgtacttgcgagctaacttgtactattcttgtgaaagcactgtcatcttttagtagcaaattttgataatgtttctcgtggaaaaaaaaatcagtatctatctttagaacaatgtaattataatgtgggaagtgtgcatgaatgagagagagtgtgtgtgtatctgtgtgtgtgtgcgcgtgtgtgtgtgtcttttaatagtttatgccagcaatctttgcttgaatgtttaacgatgccttcagtgtgatgctggccaatagatgattgcagtttaaaatgtcattattgtgcaggcttggataactaacattccatgatgtagcttgtttctgatgagatgattgtaggtacatttttctcattatccaatcatctgtgggatacttagttttctaatgtgccattatctatttttattctgcagttatgttcaaaatacagtacatattttaaaatagaataaattgttaaacataaaattttaaaagtagtagatgtgcgtaagaaaactttgtaaaatagttatgagtcctacccagtagcaacttctggcattcaagcaggattccactatgtaaatatctgtaatgcatttataataagttgtgtagtttgtcctgcatccatactacactatttgctaaagtctcagtgccatctcctaatgagactgacattttaaaagtctgtatggaatatccttgataattcaaggaaatatccctcctgcctaagttccaaactgggaaacattcaaattatataaatgacatttcaggactttaagtatgaagataatgggaattttattgttttgctttttaaaatgagagcatttttatttgataattttttttaaatttttaatttttaactaatttcattattttaaagtaatcagtttttcaaatcatgattttgatatcattattctaaggagttatctcaaaggcacaaaatatgaattctgcaagaaggctattttttattgtagtttgaatgggttaggaaaagcctcaatttttcactcttaagtccttcagtacatttttctttcatcttattacttatgcaagttaaggttctttggtaacagaattcttgcaactgtaaaataaaactacatagatgtaagaagtcatgtaaacggttaacaagcttaccaaggttagcaaaactttcattgtaaatcagtctgtactgagcaaataaaaatcattattagttgtataaacacaaattccattttgactttcaggatgtcatactacttctgtacctagcattttcagtccttatatttgcaatgttacacaaactgtactattttcttttatgtgcagtttgcatgagtaaaccatcagagaataaattctatctttaaattatgttcat

SEQ ID NO: 1283 - protein, 501 aa, Homo sapiens; identical to SEQ ID NO: 1273

SEQ ID NO: 1284 - DNA, 28531 bp, Mus musculus
gcagcctgggttacgtgagacttttcaatcagaaaaacaaaatggggccattgagatggctcacttgggcaaagctcttgccaccaatcctgacaacctgagtgagttcagtccctaggactcccatggtgggaggagagggctgattctcctttgattcccatatgaatctcatatatgtactcatgtgtgcatccctacatatgagcacacgaacacactaagtgtaataacagcttgaaaaaacagaacgaatgtcgggcgtggtggtgcacgcctttaatcccagcacttgggaggcagaggcaggcagatttctgagtttgaggccagcctgatctacaaagtgagttccaggacagccagggctacacagagaaaccccgtctcgaaccccctccccccccaaaaaaaagaaagaaaacagaacgtgaggcctgccattgtaatgcacacctttaatcccagcactggggaggcagaggcaggcagatctctgagtttgaggccagcctggtcttcagagtgagttccaggacagccagggctacacaaagaaaccctgtctcaaaaaacaaacacaaaatgaagaagcagtaagtggagcacctccttgatgagaggcccctttcacctccccaccttggaccttcactaggaactctgcagcagtggttccgacccttcctaatgcttcgaccctttaatatagttcctcatgttatggccacccccccccccaaccatgaaattactttcattgctacttcattactgcaatttttctattatcatgaattgtactgtaaatatctgtgttttgtgacggtcttagtcgacccctgtgaaagcgtcatttgacccccagaggatcgtgccctacacgctgctctacaggacaataaccgactgaggaaggtctattgccagggcctggactccaggcatcaacaccaaacgtatgtaggatttttggattccttgattttattttatgtgtctggatgtcttggcagcatatatgtttgtgcatgccttgatcagatatcctgggactggcgttacatactgttataaactgccagaaaccccaggcccaaaagtcaagaccagccggaaacctcagagggcttcaaagtggacttcttccatcccacagagctggagaagtgagatcccagccctgtattttccagctgagataccatcccggagagggggagaaggcagccctgctgtcaccttccacttgtccagaggcgaaggaacaggacaggccccatcccccactgatccctggggtgggtcaggctctgtggtgcaggtggggtctcctttaccccaccgaagtccctcccctacagccatgggtacgggggtgggccagctgcgtcccgcacgtctcgccgcaagaccgaccccggccttatctgctccggcagcttccgcaccccccaccccgcccccgcccccgcctccgcgcgccggaccccagggcccaggggagtcagagccgcggtgctgctgcccagcggagcggagagcgcgggcccccagctgggcggcggaagtgatcagcccctagcagggaccctcccagtcatcctgtccacccgaagcccgtcagggctctccaaaccaggctgtctccaccccccgatgggaaggttcccccaaagtctcaggggacaaggaagcggtgaaggtcgtcagggtaatagagattctgactgacacagccctcccgtgtacacacacacacacacacacacacacacacacacacacacacacacgcctagtgacatctgcccaggggtggaaagaaagagaaaggtggagacacctgaaggaaagtgaacagagaaccacagactagcgacgtgtgcactgagaggacacaccccagaaatatagcgcccctgcacactgtcagaaaaagaacaaggactccagcagagctgcaattacagaagagaaaacacagtcccgctaacatttaagggacgcccagcctccctggtgggatgataaatgcgaacgaagaccgctgtgggatgctattttacacctatggtcaggtaaaatgaattagccctttccaggcgtggcggtggtccgaggcagggcagcacagagcttgaggcttttagtagctacgtaatgagtgctagctcgagtgggtagtagactgagcctctgtctggacaagcagcaacaaacaaaccaataaaaataaaataaaaaatagaataagcctggcagactcaagaccttaaaaagaaggatggtaacagaatggctgttatgcccaactccaaacagccgcgaggaaaaccacctggcctccccttacaaagctgaagtcagcagagtccttaagccagccggcagccctgagggctgtgttccaaaacccccaggcacactgcaggtagcattgtgggaataatcaagtgagttggcaggagaacggatcagtttcagtggattcattcacagaagtagcatttagttcaacaaagtatctgaatgacccaaaattgcacaaaatatcacaaatgactggctaccacctgtgtagtgtgtgtgtgtgtgtgtgtgtgtgtgtgtgtgtgtgtgtgtgtgtatgtgtttgtgtgtgtgtgtgccagttctgaaagacaggcatgttgtagatgacttccaaagccaagtcaagtcacatctttataaacagcaatgctaatccgtccttatactgcttctactggaaagtaaccatcaaatggctccattgaatgttgaaaagttattagagcccaggaaatggggctaaaaggtagcaaagaaaaagattgaaatagtttgccttcttggagctggagagatggttcagtgggaaaagtacccattgctcttgcagacaacctaggttcggttcccatcaccttcaccaggcagcccacaagtacctgtaaatccagccttaggggacctgtccacacatggcacacgtaaactcatgcaggcacaagcaggcattcaaagataggaatattgaaaaataacactgggcatagtggtgcacaggtcttaggaggcagaggcaggaggatctccatgagttggaggccagcctggctttcatagtgaattccaggacggccagggctacaatagagagaacctgtctcaaaacaccaagataaataataaaaataataatttttcttcttgttttctaccaatagttttcaaagcttaatgtaaaaaatccactaaaaatattctcccaaaagggactggagaaaaggctgcgattaagagtgattacagctcttgcagaggccctggattagattccgacactcacaccaggtggctcacaacttcttataactccagttataagggggatccgatgccctgtggcttccgtgggcacccacataaacaccatgcacataaactcacacacacacacacacacacacatatgcacacacatacatacacacacgtgaacatacatttaataattgtgcggggaacatacaaaaacaattgtaaaattatctaaataatgaaaaaaaagccttaagattcttttttcttatgaggaaatgttaaatcaaacaacattgtccaagcatacacatatattgaagcactgagctcaacggtatcccagcacagaggaggctgaggaagggttaaattccaaaccagcctgggactcagggtgagaccttgttcagagaaaggggggaggggggagggggagggggaggggggaggggggagggagaattagtggcacataaggtttggctttccagcaccaaatacaaacaaaataggaccaaaatgctactcatcacacaattctagttacttcaaaaaggagacaaagagataggattgtgttttactcaggagaaaaaagtataagtaaacacagaaatgaaagaagaccctaaagagctaaggtgacttgcataaaagtgtaatggttttggtccaaattaacacacctgggccaggacataaaggggagtgtctttattgtgtacttctattcatacaggtaaagtttcaaggcaggattcctgtgtggcctcgacttgtcctagaactcactctgtaggccaggctggccttgaactcacagagatccacctgtctctgccttctgagtgctggaattaaaagcacacactaccactgcccagcagagtttgtcttttctaagagggtgtgttggctgagagagcacctatgctataaataaccccaaatgctcagacattacagccttcagggtggatgtccgagaaacagagagagcgagccttggaaacaggctggacttgaactcacacaaatacacctgcctctgcctctgcctctgcctctgcccctttgcccctctgcccctctgcccctctgcccctctgcccctctgcccctctgcccctctgcccctctgcccctctgcccctgcccctgcccctgcctcctaaatgctgtggtcatcatggacggctgggctgggttttgatagacgtagatgatgtcagggcgaggtggaggtttcagcataggcaaagatagagaagctgggcacaaggagagcagcgtggcttcctcatggaacagctgcagagtgcgggagagaggaaagctctggggagtcactcttgtcttgtagctcagaaggaatagaagaaagcaccgagtagcccggcagtggtggcgcacacctttaactccagcgcttgggaggcagaggcgggcggatttctaagttagaggccaacctggtctacagagtgagttccaggacaccaggacagccagggctacacagagaaaccgactcgatacacacacacacacacacacacacacacacacacacacacacacacacacacacaagaaaagacaaaagagaaaagaaaaaagaaagcacccagaaactcagaagcaagcatagtgcactatgaatacaatgtcctgggacaacactccagagagacagatgcactgtctatggccagggaacacctgatggagcctcattttggctgcgacccagggcaatgcctttccataacacactgttgcttgcttgctaaaccacacagagccccgtgaggaggacaagtgcttgctttcagaaggccacactctggaagtattcagccccagtccaagtgtgcagccttggataatgggtggccagagtaccagcaaggacagccaggccagccccaccactgcttcctgagcaatgtggccaggggtggtcccagcttctgagttctgagagcagaggcctggctctctctcacgtgctcaggtaaaagtgctgaaaattaaaacaaggtgttgatgtgaagtgctggacatcccagtgggggcagagtaacagacctgcagcttctgacaccaggatcccctggccacacagatctgagcagtgcccattccaccatgcagccgtttgtctgtccagcactcagccctgcaggtccttagggccttcaaataattgataagcatcagcaaatgtctatatttgctaggcaggaagaaaggggagatgcaccttgttgcctgaggtctctgttctttgcattgccttaacattctttgcacatacttgaaacatatacatttatgtatataatgaatattcatatctaacatttgaggctggacagaccgatggctcagtggttaagagggtttgttgttcttgcaaaggactagcagatacgtcagaaagctctcaacaccctgaaatctgactagggcattcagcccccctcttcaggtactgcacacatgcccgctgccccctacacaaagaatgttttaatctagcccttatgtaaatctccccacaggtaggcgtcctcctgagcgagtctcatgcaccttcattcacagcccacagagtccagctcacaatgaggctggcagcacaagacttcagtcaccagactctacctaaattcctctggtatttaacaaaactcatttctgacaaacatctgatatttaacaaagagcatttctgctataatgagcttttccttatggtttaccatgtagagttatcttttaaacctgaaagtctcatgggaagtccttctgaaacttacattgtttgagagatagcttggagaaaagaagaattacacaagtaacattggatacttgtgtttctcagaaggatatggttcccatctggtaccatgcccataacacgctcaaggcctgctgctcttgttgtgttgtcatagccacacaggtgtagctatcgcctaaggtgtctgtgtagtgcttaaccacaaaatgcagtgacaagcctggggtcccagaatccagaaggtggaggcagcagaggccaagagttcagggcaagcctcagctacacagtaaacctaaggctaccctcatctgcaggacactgtctaaaaatcaaaacacccaaaccactaatctatctaccacatttatctgctttatagattaagaaactgaggcaagtcatttgtgtgggaccagatttttttcttttttatatttactttgagaaaggatcttactgtgtgtccttccctggcctcaaacccagaaacctgcttgtttctatgtacagcatgtacatttatttaaaaaaaaaaaaagcacttttttttctgtttatgatttcctgaggaaatttaaatcatcctaatatgagtaatcattcatactcattatttattttattttttctttttctgtgtgtgggttgggttgttttggtttggttttagttttgagatagggtctctctattttttagctctggctgtcctggaacttaacaggcagattaggctagatctcacagagatcctcttgcatctgcctcccaggtgctggctgggcataaggtcctatttatttatttatttatttatttatttatttaattggttttttcgagacagggtttctctgtatagccctggctgccctggaactcactttgtagaccaggctggcctcaaactcagaaatccgcctgcctctgccttctgagtgctgggattaaagacgtgcgccaccacgcccagcttttatttttattttatttatttttttatttttatttttttgaatcaaggtctcattatgtagccctgactgctctggaaccatcatgtagaccaggctggcctggaactcacagagggctagctgcctgcacctgactcccgagtgctgggactaaaggtgtgtggcaccaacctggcactcttctgtcattttattcattcctcactacacacagacacagagacctaacactctaactgcatatacatgaacactactgccagagagaggaacccagtatgtagaccaggctgacctcaaacacagagacctacacgtgtctgcctcttgagtgctggaattaaaggcatgtggacctaccatgcctaatcttattcatttatttgtgtgtgcatacttgcaaacacacgcacacacacacacacacacacagagggagagagagggagagggagagggagagggagagggagagggagaggagaggagaggagaggagaggagaggagagaggagagagcacccaagtatatgtttgtgcagcacacacatgagaagcccatggagatcaaaagagggcatcagatttcctggaaccatatacaggtggctgtgagccatcatttgagtacagaaaactaaactcacgtcctctggaaaagcagccagtgctcttagctgctgaaccatccatctgtccttccccacaagatcaccttttctaaagtttgtttcaaacaatggatcttttcaccctcctatctctgctccagtctctgtccccaacccctcccccttgctcctttaattccttagattttgttggtgtcacttccaggccaggtgagaagaaggtttatactaagaaggatttgtagctgggtcttgctagtgtccgtgctggccaggagccctttgacctctagaatggcaggaatgctgacagtgttattgtgaaatcatttgcatattgtgaggtactttgcataagatggcatggtttgcatacagggaggaagatatctttaaagttctagtgtggcagccctaaacatcttctccctgtggcaaagaatctgactaggcattctgtctcagagcttgcagaagggcttagaagcccatcctgggagacttacagggttggcgaggcgagccagacaggtgtatttggaaggcgctggaagtctaggaagcatgcgtgttatattaggcaggtgtgatggtacaggcctttaatcccagcactcgggaagcagaagcaggcagatctctgtgagttcaaagccagtctggtctctaaatggagttgcaggacagccagggctatacagagaaactttgactcagggttggagggtggagggaggggtataaaaggctggggttgtagttgatagagtacttgcctggcacacacaatgcccaggctgtcagcactgcataaactggatgtaggagggcacatctatccaggcagtccacaggttccaggtcattctctgctatataataagtttaggggtagtctacatgagaccttatgtcaaaaatatataaataaataaaccaagagtggtggcacacgtatttaattctagcactgaggaggtagaagtaggcagatctctgtaggttcaaagtcagccacatctacatagaaagttccagaacaggcagggggttagggctacatagaaccaatctcaaagtaaaacgacaacaacaacaaccacacacacaaacacacactgtgaggtagggcatcaactgtgatgtgtgagttcggtctgctctcggagcgcccagaaggaacaagggaccatagagagccgcaatggtaggtgaggactaatgagcccctcactctgtcacagccagcccaggggagcactcattcggcctctgctgaatgtcttccatgtcagttactggctgattcccagagaaggatgcaaacatgtatcggatcgcaaaggagtggggggtgttaggccacatccacaccttagctccagcttagacatgaggtggccatcgcacgccctagggagaggtacatccaagttgaattccgcctctgccatatgtgtgacatatgtctgaccctaggtcaacagtcagtacccacctgaaagataaaaacgatttggtaaagttaacactgattactgagtaaatggtcagtaaagggctaccctagatcagagaactgtagccattgttattgccactaactgctccttcggtctaagagttcaggtacagctttgtcagggtaagagaacaccaagtcctttgttgtatcctggcttgaaattccagggcacaggctctagaaacgtgtactggacttcaaagggttacagtcctggagacggtggcctgaggttccaagtgaaaaaccaaagcataaaaataattcgatgagtaagaataaaattccctcttctgaggtacccagagccaggcccctccttgcggcaggcacttcccctttccctagctcatggaggagccaggcctgctgactcagagagccatagccctgctctcgtcccgggacggagcggtttggcagccgtgcgcgcccccgtgtggccactgctggaactgcatcctcagaaggacgccacactgaagccccgccgccctgttgatcccggttcccgcgtgggtgccgccctcaccctagcttaacttggctaaacgcgatgcccacgagggtacccacttccgtcctactctccccgcagccccagaatccgccccgagcggaagtgcgctgaccgcgcgggtcccccatggtaagaggcggaagcgcctcccccgccgtcgctccgtctagccccccggagccgcgcgcgtcgggttccggactgtcccgtgtgacgtggctgcacgccgggggtggctccgggctgggggcctagtggtggggccgggcgaggcagagcggggcggggcgcgacactgcagctggatggccgggcccgcccggagcgctgcatctgctgccgctgccacctctgccactgcgcggtgagtgatcgctggaccctcaggccggcgtccggggcgggatggaccgtgtcagttcccaaacctgtcgcgactcgtcctcagtttaggagttgaacttgcctgctctttggctctttacctctgacgtcccacgctctgcccctcagccctccctgctgccccgcttcttgtcttctccttccaccagacattctagctcattttattgactttcctttctcttgctttctcctttctctccataccccatacttctctgctgaacctgtggtccccccttgcctctgcatgacccgctaaggtcttggcctggcgagggcctgccttggtcccagtgaagctttgctcgtttgtttgtgctggtgttggcagtggcggccgcgaggggtcggggagggctggggcaggggtcactaattatggcctgaagattccagacataggcttgtagcccaccaatcagagaccgatgatttctctcttaacatccattggcagatgaggaaactgaggcagtttcaaggtcacagccagtagaagacggggcagatcacatttaaactttccagattgaacttctggcttggttgactcacatccccatccggctgccatcagtctgcagagcacattccttctgcgagtgcttcagacctcccctggcattcagaggacttgcattccctcctcgatgccagcagctacctgcattgtcaagttcacctcatattcatcgctgttagggagctctgttacctcatccattccctgatgaggacactgaggctcaggctcataagggactacagtcagttaacaatctagagcaccaaattaattagccataagttagttaccacagcctctggctctggcaactgtgaggcatctcttctcttcagccccacctcttgtctcttggtgcccaagaataagatcatttaggaggaagaggtttggactatgactcagtttccccacctgtgtttctttgtaccacgccatcaagctaaacagtgctggctttagaccctggggtgtctttaccggcacattctggcagccaagcctctcctggcagctagaggcacccaacagggatggtccctcctccggtggctgaaggagcccagccagtgcctcacccagtcattaaggaaagtttagcctcaggcggacacattgacacataggctggagccagctcagaaggaaaatatgtgtggttcttgggagacgtgtagatgggcagagggtgctccgtgcacccaccctggggattgtttccgctgcagagtgagcaggagggggatgccatggccggttgagaggtgggaagagacgctgtgcttcctaagtggggtgtgtggtccagggaggcagctcacgtgagcagtctttgtgttttctagcgcccggcatgcctggatgtccctgccctggctgtggtatggcaggccaaaggctcctcttcctcactgtccttgccctggagctcctggaaagggctggaggttcccagccagccctccggagcctgggggctgcagctgcctgtcgcctggataataaagaaagcgagtcctggggggctttgctgagtggggagcgactggacacctggatctgctccctcttgggctctctcatggttgggctcagtggggttttccccttgctggtcattcccctggagatggggaccctgttacagtcagaaggtgagtggcccttcagcagctgaggatcagaggggagggaacctgctgccggctctggggaaatgccaggtctcatgtaccaggtacaccagacatagtatgcctagcatggagtccagtgtcaccttggtcctgtgcgcatagggtatacatattcatttgttcactcatgcatgcatctgtttattatttcaatcaacaaacattccccagactcgttatgaagaatggctggcaatatggctgccatactacctgggctcaaatcatggctctgccacccaccaactatgtagaacatggcaatttacttaacctcactctgcctcagtctgtcagactttaaaatggggataataaggccgggcagtggtggcacacgcctttaatcccagcacttgggaggcagaggcaggcagatttctgagttcaaggacagcctgatctacagagtgagttccaggacagccaggactatacagagaaaccctgtctcgaaaaaacaaaaacaaaaacaaaaccaaacaaacaaacaaagtagggataataaggctgagcatgtcatttagtagtagaatgcttgcaggggttagggtgggggttggagagatggctcagtggttaagagcactgactgctcttctgaaggtcctgagttcaaatcccagcaaccacatggtggctcacaaccatctgtaatgagatccgatgccctcttctgatgtgtctgaagacagctacagtgtacttacataaaataaataaatctttaaaaagaaatgaactttagaatgcttacctaacacgttcaaggcctgggtttaagtcccaactcccccaaatgaacatactaacttcatagatcatagatgaagcacttggaggactgcctggcacaaggaaggggcaggtgtgtaaaggctcatggtggaccctaggtgcagaggtgagcaagtgctgcagcccccccccccccgtccgtgcccagttttggttagtggtataagggctagggatgtagtatagtggttctgtgtccagcagctcagtgcccacactgcataccacactggatgtgatagcacacacttgagtgaagacaggagtcagaagctcaaggccatcttcaagtactcagccaggcagaggccagcctctgctatcctttctcaaacaaataaaaaggaaggccggagctggagaggcggctcagctgttgagagcacagatccaggtgtgattgccagcactcgtgtcaggtggctcacaactgcctacctacagctccagcaggatgctctggccttagcaggcacctgcactcatagaatacatacagttaaaaataggaagaagtcgaaaaggaaggaatggttaaaatggctcagtgggtaaaggtgcttaccctgcaagcctggtgaactgagtgcgttcctcaaagacgtgtaaaggtggagggagagaacactccataaagttggcctctgacctccacaggtgcacccatgtatccatactcacacacattataaacaatagtaaaataaatgaagaaatagaaagaaagactcagccttttaccaattgccaggctcaggaccattcagtaatgcagatggtgcctggctgctggtgcctcccagttgtgaacagagcctccctggacctgtcatgtccatgcagtaagtgtgtctctcagacagcccaggctgtggacagctctgtggtggaatgattacttgatgtgtgtgaggcctgggcagctctgtgcagtatgcattgggagtgttggcattcccattttacaagtgccctctggccgccagcctggaaacagcagggtcccagtagggcggtgtccctctaggcctcggctgctctatcatctgatgagaataatatggcttccaaatctggatgtgcaagctagtaaaagtcccaaggtcctaccagttttctaagggtggcactagctgaggagagaaattcccatttaatcaacatttgctctgtgcttggtggtttaattctgccaagatccaatttatacatgggtaaactaagtctcagaagtttttattttgtggttgccatcagatggattagagatccagaacttgccagggtccaagcctgtctcttaaccaataacagtcagtccacaatgatcccacagtccacgggagatcttcctgagaacagccgcccaaacctagcctttggaagcttgcagtctagaaagccagtgagatgggcgagcttagtagcagaggctcagcgctgcctcatgtctctgctttgcagccggagcctggcgactgaggcagctgctcagctttgccttaggtggactcctgggcaacgtgtttctgcacctgctgccggaggcgtgggcctacacctgtaacatcacccccggtgagtgagagcatgaggcaggatagaagtgcagaactggtgcctctcccccgggttaacctaggccctgctggctccacagggtctgggaggggggtgtgggaagagagatccagaaaagcttgtttaagagggaaggtctaatcctgatgccctggcctctttgggaggtctaggccccagctgcttgttcagtagctagttcccctggcaacccctcaatgccctggactagctctgatctaggccctattccaaatggctcccttctagccactggcttggcatggcctgttagtgctccccctgcaggtggtgaagggcagagtctgcagcgacagcaacaactggggctatgggtcatcgctggcttcctgaccttcctggcgttggagaagatgttcctcaacagcaaggaggaccccagccaggtgagccccaagccccagagcctggatatagcagttggtttttgttttcctaaagtagaacccaaggcctggagaagcccagggtctaagttaagtctaagacatctcctgactctctttccttactcttgagagcaacattattagcctctgaagtagtttaactatatagatcagtggttctcaattggagtcaaagaccctttcataggggttgcctaagatcagctgcatgttggatatttacattacaataacatagcataacagtagcaaaaattagagccatgaagtagcaacaaaataattttatagttgggggttagtacaacatgagaaaccatatgaaggggttgcagcattcggaaggctgagaaccactgttgtacatgggtagtaacagcagtgtgggcttgaggtctgactctgaggagcccagcctgatggatcgatcagcaaagtctagccagatcaaagaggtattcatcgtctcttatcctctctctctctttctgcctgcctgtctgagtggggggcatctaatgtctcctctctttccttcttctggctgtaggcccccagcaaagaccccactgctgccgcgctcaatggaggccactgtctggcccagccggctgcagagcccggcctgagagccgtggtccggaacctcaaagtgagtggcccatgcgggcccccctcctgcagctgcagagctgaatggctgactcggctctgcctccctggctcagcctgcctttctctcccctcatccaggtcagtggctatctcaacctgcttgccaacaccatagacaacttcactcatgggctggctgtggctgccagcttccttgtgagcaaaaaggtaagggatgggacctctggcatttctggtgggaatgacatcgatgtctaccggtcagatcaatctccgaaacagtctctacttcttgcttttattaacagtacctttgtgaagcctagtctctattcctctcctggatgctgccttagtctctaaactgtctcccttcacctttattgttctcaaagaattctttttgtttgcatgtttgtgctggtgccacgtgtgtgtgtgcgcgcttgcgcttttggaggatcctcaagctggatttggatcccctggagccgtagctacaggcaagttgtgagccacctagtgtgggtgctgggaactgaacttgggtcctttggaacagcactaagaactctctgatccccctacctccactgcaccctttgtcccaagctactattgttgccagcagtctctgtttggatgcctctatcaagctcctatacttggccttgcccaccagtagacgcttctcccttcacctcccactgccttctgtgctctggtcccagcattttgtttacccctaacactggccattcactgtgccctctgcccggaatgttcttcctcccactcttggagcagctgactcctcatccttctggcctcagtttaaatgcacttcaggaggtatctgctgctcgcaccctccagttgggcacccatccatactctgtcacagccctgctcaatgtggaaccgtggaggtgtttgtgttttgtaatcctgacttaccaagcatgtccaacccgcagcttggggtcgcacgtgtcccggtgtgctgtgaatgcagcccagcacatctgtagatgacatcatattaccttattaagtctgagaagcaagctttagtcactgctgtctttcctatggctacagtatcctgcccaaacttgcagactaaaagcagaatccatgtttctgagggactgggtatggggaagcctagtaacccagtaaaggtcccacagactcagactcaaatctctgcagatcgggcttctgaccaccatggccatcctcctgcatgagatcccccatgaggtaagtgcccagatccccaaggttcccatgctcaacatgggtgtgcgacctgtttggggatttggggtgggccttgcccactgaggtggtctagaggaggaggggggctcggcttcattagatactggcccgggtgaggggagacaggagggtgggtgttcctgtgatctggttcttggttgaacatctgaccctttcctcaggtgggtgactttgctatcctgctccgggctggctttgaccgatggacggcagccaagctacagttttctacagccctgggaggccttctgggggcctgctttgccatctgtacacagtcccccaaaggagtaggtacgagagtggtagacagtggtgttcaagaggtacaccagccaaaaggctcctttgccctgctgctattggggtagtgtctgcctggtgtcccgggtaggagggtggggatacatacagtgccggagctcactcccagctggccctcccctacagaggagacggtggtctggatcctgcccttcacctcgggaggctttctctatatcgccctggtgaatgtgttacctgacctcttggaagaagacgacccgtggtgagcaacctactgggatgatcgctgggcccaggaggagctgctgcctctggcagcctggcctaagtctcccctctcccaacaggcactccctgcaacaggtgctgctgctctgctccggtgttctggtgatggtgctgctttcattgtttgttgaataaccactgctcacagcccactctgcacagcgagcaatgagactccagtctgttctgtgaccaagtgtgagaggcagagggtgaatgctagagaggagcctctcactgcacagagggtgtgtggtgtgcacacgcagccagagtgggagagagaccgacactgtgacccctgggtgcagagcccagagcccaacgtagcacctgcccagacaccccactgtcacctagcagcaaggaatgacagcaccggtgccagcacaggcctcacttctcattgacaaagaaaccagcccaaggagcccagggctacagcccaaagagagggacagagcccaaagttgttcctccttggggctctagcccaagagagaaaagaaaaaaacaaaccctctgcttacacatctaggccccaagcactgtagaggcagaggcaacacagcttttccctgctgtccattttccttacccttcctacttaccccctctacagccaaagaaatgggaggtgggtgctgtgtagccccagccccgactcagcactgatgtcctacccctccccaacgctgagcaggcagctgctccaagacctctctctaggggcagccagcctggctagcacgtttccccaacaaatattccctggccacacgggcagctctcaccacctccagctgccaaacagcagcctgcaagtcagcaagtagtccaggctagccgtctctcagcacagctctccgggatgctcctgccagcacagggtccagcaggcatgcatgccccaggcagagacagtgagccttgctgccctctccagctcaggggcccttgtcctttgggttaagagtaagatgggggtggtgagggctccacattgtcagtgctcaggaatgtgaactggaagaatgctgaagccataatccccaactatttcccttggctgacacccaggtactcagctggcccaatctacagccagactccagccctgctgctcaactgtggatgttagagatgtggccactgaagagtctgactgatccacagcagttatgctgtggctcatctttatctgtaaatacttgttctgtagatataaataaatattacttagaccggctgcctcttccacatactagggctgtcaaacagctcttcctaagtgctcttgacaggtctgttacacttgctgtgcatctcaaatggtttcctattttcctgccatgtttcattgttggctttttatcccagtaatgcttgagcaccaatttgagccttcctcaccattggtgatcttatggatgtaaaaagccaaggtatttatttccctgttcccctttaacagttctcacctggggacttagagctacaaagtcatctccttttacttcagtgagattgtagttcatttaagaaagctaggtgtggtgtcagactgtaatatcagcaaccaggaatggagacagcagaggaatctggagttaaaaggccagccttcgctacttaagaccctgtctcacttgagcctccccacaccacccatttccctaacatgggctggagaagagggtctttaccaagctcccttcctctgactgcaccattatcctcacacagcagggggcactgcatctccatcggtagctgaaggagaatcctccacttttcccaaccaataaacagccttcagcagctcactggttgggacaaaccatctgtgtggtgcacagatgagcccagagtaagtaggtgggaaacagaatctgccacgcccttaactgggaatgctcagctgccagtgtcccatcagcacaacagtcaagagggagatagtcaagagggagatcttccacctaagctgacctaagataagggaccaaagcctaaaaggtccaagcccagctgtctttactgtcagcaggtgctcaatgagggctgccgctgcctgcctgtcacatgagccctgcaggaggctgataagcacaggccacccctgtccctgtccaccactttactcagcctcaagggatagagaagaggatcctgcgatgctgtgagggagaagggaaggtgagggtggtgcctacactcgcttgtttcatggccaagagtaaatcccatctggttaggaagacaggacacctacatgtaggccagagaacaaaaatcacactttagctgctgagcgcctggagcaagatggagccacaccataatcgacaggcagcacatgggtaggggaaagctagagagcgagcaaggtggcctgcagaggtatgcctgtagcttgcagtagtcatgtccgctcgggaaaggggaggggaagaagaaaggagcagtgctttttttttttttttgcctcttttgggcaataaagtggaaattttttgaggattaacaactttgaaaggcctttcaaaggttgccaaagccactggtaaaacagctggctggaaagttgaatgatgggccagacaaggtggcacacagcttaaattccagcactcttgaaactaatctcaggggccacaggccaaccttgtctacataaagttccaggctagcaagactacctgtaagaccttgtcaaaaaaaaaaaaaaaaaagtgactgatgggtttgaatccctgctgtgccctcacaacagtgcactttcagcgcagctgcccaatcgcacctgtaaaatgaggacacccaggccagggagatggagctatcgatagacacactcacagcataacctgagttctcaggatccaggtaaatacacggactctctagtcgctatcctgataaaagttatgcattaagacctatttaggggctggggaatgtatcttatagttggcagagttcgtacctaacaaatactaaatcctaggttccattccagtgccacataaaactgggaatggtgggacatgcctgtaacctcagcacttggggcagcaagaatagggctggcaagaccacagcagactgaaggctgtggggcttcatacggagcagggcagacggcagaactcagttggtgagaaaacagcgtggatcttgctaaaggttagttcgtgaaccagaaaaaatgagaaagagctaataaagtcatggaaaaatatgtggcccaaaagtctggacactaggggattattttaacaactaaaaccctaaatgttggttttacaagacaagaactagaataccaaatatgcaaggtggcctcttccttctggactcttaaggtcagagtgatggcaatgaacagtggaaagatgacataaagaggctgggggagggggcactggggaggactcaggcaacagctgtgcttgcacctcctgccatggggcctcacccagacagctggtttgggtcccatggccatctatagaatttttgaggctgtagcttctgagcaaaaggccttctccatacattccactcccacccagagtccacagaggctgagaaagactgtggcgaagaacagaaaacaccttttattatcaactttagccctcagaccagcggacagactagaggtgtcccctaggcatagtattgtaggttggctttcttcttggcctgaacctccaggatgccctccatgtagtcctcatgagtgagttccgtggctcccctgcgcaatgcgatcataccctgcagccggacagagaagacccagaatgcctccctgcacttccaacttcctaagtgtgggtccctgacctacccagggaaagagcaaggcttccaataacccacccacccacgctgaccactcaccgcctccacacacacggccttgcactgggctccattgaagtcatcagtgcaccgagccagctcttcatagttcacatcaggactggagaaacaagacaccacagagcttgattagtcacggagagggaacagcaaagggaagatgtcctactatgtacccatcgcacaataatcaacttgctttctgctagcaggcaagtctttactgacttttcttctcagtataaatgagattggacaaagctatttacaggatcactgatacaccagacttctagaaccctgcatctgagatcccaggaagaaagtttgcctgagttgggaacatggggttatacagacaaaagacagtaggattgctgatgaagccgtgcatcatccagcacgatgtggctgcccatcatctgccctcatgccaggcactgtgcctgagattcaccgtggctaattctcaagtttcaaaaacaacagactttagaggtttaggtcacgtgctggaaactggatagatctaacttcagctcatctggtcctggttagattctcctacgccatgcttgggctgtgcccatctactgggctgtgctgtgaaggcctatattcttcaatgggaggatgaggcacaggtgactttgagggtctgagccccaacaaaactctacctcaggctgtgggggagaaatggaggctatgtgcatgcacagagtggggttggagtggatcagaggctggggaacaacagtacaggagtttaaaaattgggggctcaaaaagctgttgcactgcccggtgtggtggctcacgcctttaatcccagcacttgggaggcagaggcaggtggatttctgagttcgaggccagcttggtctacaaagtgagttccaggacagccagggctacacagaggaaccctgtctcgaaaaaacaaaacaaaacaaaacaaaacaaaacaaaacaaaacaaaacagctgttgcagctgacctgacattcatcttccgtgagtggatctgcatgattctggctctggcctcctcgttgggcattggaaactcaatcttgcggtctaggcggcctgagcgcagcagggctggatccaggatgtccaccctgttagtggctgcaattacctaaggaagaggggaagcagcaacctgaacagaagagcaggccatccactcacaagcacaagttccagtaggaacagggcagccggggaatggggaaggcagagcccgagctgtcagtcctgagacagacggtgagccctgtcctcaccttcacttgagtgttgggctgaaagccgtccagctggttcagtagctccagcatggtcctctgcacctctcggtctcctgccttttcactgtcgaagctgcggtacacaggagcccgagatgccagtgacatcacggcataagcacaggctattccaacttgtccagggaaatggttgcctcaacttgaggctcccagcccagggactggtacagagaaaggttcaccaataattaactgcagcattcaaagcttgcagaggcgtctgggatcagtgctgggctagtgacaaacagtgggcagaaatagccagggccagggctctggctctgagcaatgcatgatcccagagaactttgctcagaaatacctagaatcaggaacccagacagccaaccccaaggaagggtttttgcgtttataaacaatggctggcaaacacccagtgaatggaaagagctgaaaactaatcagatactgggaggatatgtgtgtcggggagagcgagactggaagaacgggccacacaaatctagtatttatgctaaggagcaatggggtgacctaggaatggttctaaatagtgtatgacagactttgaaaacatgtgaaatgaccagatttcttttttgagagcaaggtgttagctgtgagaatttaggaagcagaaaaatagaagtgttactacccagggagagggggaaacaggatgagaaagaactagaatttagcatagcttggagttgtgctcccagctcacccctcaccccaagaaccctcaagtccctagccgtcccttaccgtttggtaccaatggcatccaattcgtctatgaaaataatagatggtgccttctccttggccagggcaaaagcatcacggaccagcttggcgccatctccaataaacatctgtaccagctgagggcctgccagcttcaagaaggtggcctgagagaagggacagatcagagcaaaggcacaagaggcccaaagagtcaagcctgtgtcatacagctgcaagtacccctacccccaccttgccccccacccccacacaccttggtctgagcagcacaggctcgggcaagcagagtcttccctgttccaggcggcccatacatcagcactccttttgggggctggatacccaagttctcaaacttctctttgtggttcataggcaagacaatggcttccaccagctgccaggaagaagtcctgagtgaggaaagtgatgccctgagggatcctacagcccaaatctagtctgcatctttcctactctaatgcaggagtcttctctcctctcacacctggtctgcactggtcccatggctcagagagtaagagtgtttgctgtgcaagcatgaagacctaagttcaaatctccagcacccatgtaaatatccaggcctataaaacacaagtccataacctgggtgctgtgggtcagagtcgggagtttgcagcctagttccaggtccagccagggaccatgtatcatagggaagagtagagtacagatcaggctatttgacattttctgtgtatgtaagcacttacacaagtacttacaccacacacacaggaaggagggagggaaggaaggaagacactggggcaaaaactgggagcctgagtggagtttttgctctggccctttatgtggacaatctccaatctctctggaatccaggcttcgagcacctgacagtctttgttttgtcttggttgttttctttttccttcccacagtaagggaatacactctggtcagttagatgaaaaagtaaaaaggctggcatggcctcccttacctcctggatctgcttgtccaggcccccgatgtcactgtattgctccgtgggccgctcgtccacctccatggccttcacccgagagtcatattcagtgggcagggtctccaggatcagataggagtctttgttcacaccctgagaacagagcatggagcttttgtgtttatcccggttctgtctaatgctccagaggacagtgatttgtagtctaaacagagagctacagcactggcaaattgcaagaatcaaagaggctgcagacagagtcgctgcagcagtggcaaggcagcttactggagaatccctgcccgggcgcaggtatcactcaccaccaggtctcctggcttcagcttttctgcatccaccaacccaatcactggcaggaagtatgtctgtaggaagagttacaggcagtcgtagctacacggaaactcccccatgctgccccctgcccaactgtgactgagccaaccttacctgtcgggtagaagttttgatcaccgcacacttgcccttcctctgagagtccaggtcaatgttggcaccatcctcctcctggtcattggggtcaacgtccagcaactaagaaagaaaacaggctcagttcccttcccaaaatccactactgtgtgtgctcaaacagttccctaaacccacaaggccacaggccttccttccctcctcagtctagccttaagcttaataaacatagatgatgtgttagggggttgacaacacctttgttgaggtgctgcttctgtttgcaaagttcatctgccccaagaaggaacaaaagaagaaaatggcagaaatctgtgacacttctaaggtctttgcagacttaaacattgctttttacactctaccctatgggccccatccctagatgtctccaagcctcctgcctcctcctcttcccacacacagacacacacctcgatgacattggagacaaggtacggcagggttttgttcactttgattttctcactgttctctttgattttgtctttcatggcttggagttcatgggtgactcgcaatacttcactcttcatgatctgggataagagaaaaccaatgttcaaccctgattcagcctgcattcattacagccctctaatagatgaggtccaggttacccgggagacccatccaaccagatctcaggctttctgaaggcccagcctgtacatgtccaaactgcagaggtcaggacaagaggccagtgggaaaacctcctgacaaagcggctgtgggacagggctaggtattttccatgggtttgagtgtgaattcatccctctctgagcctcgggttcctcatctgtaaaatggagatctgagaactccgctgcctgcaccggagccaggagcccaccttgatctcgctgtctaacagccgtgtgcgctggacaatctcttccgtggacatcttgagcacctcctccccaatgccatcttgctgttcaaataagagaagaagtacttatttactgtaactcagagctgccatcccacggtcccacagccccctcagcgcctgcttccttaacccaacagcaggatgaagtcgggacaacccaagaagctctgcaacccgtccagaccggacctggccttccagccacctcctttcccggcctccaagaacgtctaaccttatagcccaaactttgggacgcccctcaggtctcccaacactcacctcagcttcatcccacacggtcgccatcttctcctgccgagtcactggactctcgggcgccggcagcagattcatttcctgcatgaagaggccgaaactgggagtgcgcacgagcccctgagggagcccagcgcagcctttctcaacgtcttctctccacccgtggagaacttcacccgcgattcctgacgcgacagaacgggttctgtccgcgtctccgagcgaatctgccgctgggactccacgaaccaaaccgaggctacagggcccgccccgtggctcgccggttgctccggtttgtgcgggagcgagggctgggctgctattggccggcgtacaggcggggcggggcttgctgcacaaccggaagaggcgggaggcaggagaaagccgcggagtctttcgggaaatgcagtttttagcctggcggataactgaaaaggagtttgcacaggtgccggtgcaatctaagaacccaggtaaacttggaattcacggatttgcaaaatgtccagtgtggtggcgcatgcctttagtcccagaactctggaggcagaggtaggcggatctctgagtttaaggttagcctggtctagagtgagtccaggagagctaaggctacacaaagaaactcttgtctcaaaaaccaaaaacaaaagggagggaggaagaggggggggggagagggagagagagagagagagagagagagagagagagagagagagagagagagagagagagagagagagagagagagaaagagaaaggttgaaaagaaactgctaggtttgatggcacatgcctgtcatcacagacactgagccactgcaaagatgaagcagaaggattgctgcatattaaggccaccctgtgctacatagtgtatttctagctattctggtcacactgtgagtcttaaacaaaaatagcctaacaaaacccagataaaccattgcttctactaatattaatgcagatctaactgtccacatagggaagttatttttgttacaatgtactgtatatatgtttctactcttgtttaaagtattatatctacacaactcatgtgctgtaaagttctagtcctttaaaaaattttatttatttattttgatttttcgagacagggtttctctgtgtagccctggctgtcctggaactcactctatagacgaggctggcttgaattcagaaatccacctgcctctgcctctgcctctgcctctcaagttctgaaattaaaggccaccactgactggcagatttatttattattataaataagtacactgtagcgatcttcaaatgaaccagaagagggtgtcagatctcattatgggtggttgtgagtcaccatgtggttgcttgggactttcagaagagcagtcttacctactgagccatctctgcagcccaagttctagtccctgaaagctgctattacaaactgtttaggataatctgaaaggcaagttagtaattagttacccataaataatgacatttatggtcatgttagatactagtttagttaattacagaaataagctttatttagtctaaagatgttttcaaagttacacaggttgtaaatagctataaacaagcaatgcttgcctattcaacatagtctatgtcgatagatggtcttcaaacacttcagagatctatagaatatggcatttaagatgtcttaataacaaggctttttttgtgaaattgagatgcatcagctcctggcattacctaaatattatttcaaaaagataatgggcattgaagaccctccatatggagtttgattcatatgtggcaaagctagccacctggcaaaagactgtccttgcttcaattgctgacaacatgctgtctaaaccatggacagtgggacacagaggaagtcaactgccaaatgtttccaagacaaggtaggccagtccttcataattcccacttcacaaaaaagtgtgtcagatccaggacagccagggctatacagaaaaccctgtctcaaaaaacaaacaaacaaacaaacaaacaaacaaaaaagtgtgtcagacattgtggcctgtaggctgaagatagataccccaccactgcagaggaaccttgggtgaaaacaaggcagccagcagccagcagccagcggtctctgtcattgctgtagtcttggaagctgcttgctcagcacttcctgttttctcgggtctctgatgggattgaagactacatagttgcagtctcacattaagcttaagttgtgaacggtttaagaaaatgcttttaggtctaagaagatctttttaggttaatacatgcaagttatgataaaagtgaattaggtacagaactttgtactcaacaagataagataaagaaaggttactttcttcaagtttgccaaatataaatggactggacattatgaatgtaatttttgtttttgtttttttggtttttccagacagggtttctctttgtagccctggctgtcctggagctcactctgtagactaggctggcctc

SEQ ID NO: 1285 - DNA, 2279 bp, Mus musculus
actgtcccgtgtgacgtggctgcacgccgggggtggctccgggctgggggcctagtggtggggccgggcgaggcagagcggggcggggcgcgacactgcagctggatggccgggcccgcccggagcgctgcatctgctgccgctgccacctctgccactgcgcgggctggaggttcccagccagccctccggagcctgggggctgcagctgcctgtcgcctggataataaagaaagcgagtcctggggggctttgctgagtggggagcgactggacacctggatctgctccctcttgggctctctcatggttgggctcagtggggttttccccttgctggtcattcccctggagatggggaccctgttacagtcagaagccggagcctggcgactgaggcagctgctcagctttgccttaggtggactcctgggcaacgtgtttctgcacctgctgccggaggcgtgggcctacacctgtaacatcacccccggtggtgaagggcagagtctgcagcgacagcaacaactggggctatgggtcatcgctggcttcctgaccttcctggcgttggagaagatgttcctcaacagcaaggaggaccccagccaggcccccagcaaagaccccactgctgccgcgctcaatggaggccactgtctggcccagccggctgcagagcccggcctgagagccgtggtccggaacctcaaagtcagtggctatctcaacctgcttgccaacaccatagacaacttcactcatgggctggctgtggctgccagcttccttgtgagcaaaaagatcgggcttctgaccaccatggccatcctcctgcatgagatcccccatgaggtgggtgactttgctatcctgctccgggctggctttgaccgatggacggcagccaagctacagttttctacagccctgggaggccttctgggggcctgctttgccatctgtacacagtcccccaaaggagtagaggagacggtggtctggatcctgcccttcacctcgggaggctttctctatatcgccctggtgaatgtgttacctgacctcttggaagaagacgacccgtggcactccctgcaacaggtgctgctgctctgctccggtgttctggtgatggtgctgctttcattgtttgttgaataaccactgctcacagcccactctgcacagcgagcaatgagactccagtctgttctgtgaccaagtgtgagaggcagagggtgaatgctagagaggagcctctcactgcacagagggtgtgtggtgtgcacacgcagccagagtgggagagagaccgacactgtgacccctgggtgcagagcccagagcccaacgtagcacctgcccagacaccccactgtcacctagcagcaaggaatgacagcaccggtgccagcacaggcctcacttctcattgacaaagaaaccagcccaaggagcccagggctacagcccaaagagagggacagagcccaaagttgttcctccttggggctctagcccaagagagaaaagaaaaaaacaaaccctctgcttacacatctaggccccaagcactgtagaggcagaggcaacacagcttttccctgctgtccattttccttacccttcctacttaccccctctacagccaaagaaatgggaggtgggtgctgtgtagccccagccccgactcagcactgatgtcctacccctccccaacgctgagcaggcagctgctccaagacctctctctaggggcagccagcctggctagcacgtttccccaacaaatattccctggccacacgggcagctctcaccacctccagctgccaaacagcagcctgcaagtcagcaagtagtccaggctagccgtctctcagcacagctctccgggatgctcctgccagcacagggtccagcaggcatgcatgccccaggcagagacagtgagccttgctgccctctccagctcaggggcccttgtcctttgggttaagagtaagatgggggtggtgagggctccacattgtcagtgctcaggaatgtgaactggaagaatgctgaagccataatccccaactatttcccttggctgacacccaggtactcagctggcccaatctacagccagactccagccctgctgctcaactgtggatgttagagatgtggccactgaagagtctgactgatccacagcagttatgctgtggctcatctttatctgtaaatacttgttctgtagatataaataaatattacttagaccggct

SEQ ID NO: 1286 - protein, 385 aa, Mus musculus
TVPCDVAARRGWLRAGGLVVGPGEAERGGARHCSWMAGPARSAASAAAATSATARAGGSQPALRSLGAAAACRLDNKESESWGALLSGERLDTWICSLLGSLMVGLSGVFPLLVIPLEMGTLLQSEAGAWRLRQLLSFALGGLLGNVFLHLLPEAWAYTCNITPGGEGQSLQRQQQLGLWVIAGFLTFLALEKMFLNSKEDPSQAPSKDPTAAALNGGHCLAQPAAEPGLRAVVRNLKVSGYLNLLANTIDNFTHGLAVAASFLVSKKIGLLTTMAILLHEIFVGDFAILLRAGFDRWTAAKLQFSTALGGLLGACFAICTQSPKGVEETVVWILPFTSGGFLYIALVNVLPDLLEEDDPWHSLQQVLLLCSGVLVMVLLSLFVE

SEQ ID NO: 1287 - DNA, 28020 bp, Homo sapiens
  misc_feature (1)...(28020): n = A, C, G or T/U
ctgcctgggcatgcaaggggttggggaccagctgcagcggcacctccctgacatattgccttgggccaccctgccctctaagcttgttggtgtctgactttcttgggagaggggtataaccccttccagggggcctgcatggtggggctgagacactaagaaagctgcatttgagcttcctcactggctcagctccttctgaggccctggaaggggtctcagcaattttgtttttgttttttatttttttggttttttttttgatgaagtctcactctgttgcccaggctggaatgcagtgacacaatctcggctcactgcaacctctgcctcccgggttcaagtaattttgctgcctcagcctcccgagtagctgggactacaggagagcgccaccacgcctggctaattattttattttatgttttgtatttttagtagagacaggatttcaccacgttggccaggctggtctcgaactcctgacctcaggtgatccacccaccttggcctcccaaagtgttgagattacaggtgtgagccaccgcgaacggctgttttgttttgttttgttttgtttttgttttttgttttgagacagagtttagctctgtcacccagactggagtgcagtggtgcgatcatctcagctcactgcaacctctgcctcccgggttcaacgattctcctgcctcagtctcccgagtagctgggattacaggcgcccaccatcacgtccagctaatttgtgtattttagtagagacagggtttcaccatgttggccaggctggtctggaactcctgacgtcaagtgatccgcccaccttggcttcccaaggtgctgggattacaggtgtgagccactgcgcccagcctctcagcaattttgtatttgtgactttgtaatcttttccttaaagagtgcccccccaaatggttttaagcttcaggctcctgggaacctagatctgtccccagggtggggcggtggaaagcgttccaaccccctcccacttgctttttgcatgctggctctggggctttgggtgaaactccccactttgccatctatacaatggggatgaatgaggcgatgcgatgcttagaggaccctctgttcaaaactcgcccaacccacagagaccttcacaagcctgcacttggtccatcaccaacagccctgtggggaaaaccgagctcctacccccattttccagctgagataactgaggcgtgaagccccgctgccgctcgtcgctgaggctgtgagcaggctggagcctcatcccccactgctccctggggtctcctcccgggatgccaagcctgggtagcaggagggggtctccagggtgcgggggcgctctggggaggccgggggcggaggcggtgtcccgcactgtcccaccgcagggccgacctcggcccttatctgctccggcagcttccgccccccaactccatctccggcgtagccggtatccgggcccgacccctaggcccctccccgcgccgcccgcccccaggggagcgcccgagctgcccggctgcggcccagtcgagcggagagggggcccagcccccccaggtgggcagccggaagtgataaataaccgagacggggggggggggacaccattgcagtgaggcccgagttgtcccgggatactcgcccacaacccaataggagctccccaaactaagttgtcttcgccaaaaatgggagggggtctgagaaggaagaggaaaggggttccttaaggccccagggacaagaggaacagtggagtcagtttaaacagggctctgagaggcacacgacctccccccacactaacaatgccaagtggcctccctgggacaggtgtgggggggggagagagaagcggagacacctcagagaaagtgaaaaggaagtcacaactggagatgcctgcggagtgcagcggggcatagcctcaaaaatacataaggaactcttgcaaatcaaggaaaagaaaatcaagcaatccaatataaaaaaatagataacacacacgcagcgcaggcatgttagggcagagaaaacgaatttgctcaaataccatctaagggaggctcagcctcactgctgatgagggcgatgcaaattcagaccacaatgagatgctatttacaccatctgaagggcagaagggaactgtccttcagccagagctggctgaagggcagaagggaactgtccttcagccagagctggctgaagggcagaagggaactgtccttcagccagagctggcaaggaggggagcagcaggccctcctgcatgtggctagtcaggatgcggctccaaatagccccctagggagagcaatctggccttatctcacgaagtggaggtacagannnnnnnnnnnnnnnnnnnntataaaaaaatagataacacacacgcagcgcaggcatgtgagggcgagaaaacgaatttgctcaaataccatctaagggagctcagcctcactgctgatgagggcgatgcaaattcaggccagaagggaactgtccttcagccagagctggctgaagggcagaagggaactgtccttcagccagagctggcaaggaggggagcagcaggccctcctgcatgtggctagtcaggatgcggctccaaatagccccctagggagagcaatctggccttatctcacgaagtggaggtacagaggctgtcacccacacatccccccaggcagcaaatcaagataagttctctgacaagtgcgccaagagacagggacaaaaatattcacgttgtccctaatagcaaaaaaaatcctgaaataaccccagggcccactgataagagaatggataaataaattacagtagacacattcacagggtggagatcattcagcaatgcaagcaggtgacccacaggttcaccaatatcatgaaggaatctttgcaccatggtattgagtggaaaaagtcagtcccagaagatggatacttgcggctctctgtatccctgggttccacatccatggattcaaccaacctcggatggaaaatatttggagaaaaaaatggatggttgtgtctgtactaaacatgtacagactttttttcttgtcattgttccccaaacaataccatgtaacagcgattaacatagcatttacattgttttcggcaatctagagatgatttaaagtatatgggaggatgtggtaggctaaatatgcaaatatttaataccacaccattttatatcagggattgagcatctgtggattttggtatcctcagggggtcttggaaccaactcccccccatccccgccaggacgccaaaggacagctgtccttacccttctcatgaagttcaaaaccaagccaagccatatctttacaaataacaatgttccttccctgtttctaatacctttgttattaggagatggtatgattacccacataaaagactctaggctgggcatggtagcccaagcctgtgtccctagcactttgggaggccaggagttcaagaccagcctgggcaacatggcaaaaccccatctctacaaaaaataccaaaaaaaaattagccgagcatggtggtttgtgcctgtggtcccagctacttgggaggctgaagtgggaggatcatttgagcccagaaggccgaggttgtggtcagcggagattgtgctatactccagcatgggcaacggagtgagactctgtctcaaaaaaaaaaaaaaaaaaaaaaaaaaaaaaatatatatatatatatatatatatatatatccccacaaatataaaatatctagaagtaaacttggtaataattatgcagaacctataggaaaacaattgttaaattcactaaataatgtaaaaccttaaaatagttttttttttaaaaaagccaattcaaatggaatattgtctaggtatacatacatatgtcagaaaaagctttatcaaaaaaataaaagcaagagtcaggtgtggtggtgtgtgcctgtagtcctagcttcttgggagactggggccagaggaccatgtgagcccggaagcttgagaccagcctgggcaacaattttaaaaaaattttaaaattaaaattaaaatctctaattttaaaaaaagaaaggccaggcgtggtggctcacacctgtaatcccagcactttgggaggccgagaccagcgaatcacttgaggtcaggagttcaagaccagcctggccaacatggtgaaaccctgtttctactaaaaacacaaaaattagctgggcatggtgggcgcctatagtcccagcttctcgggaggctgaggcaggagaatcgcttgaacctgggaggcaggggttgtagtgagctgagattgcgccactgctctgcagcctgggtgacagagctagaatctgtctcaaaaagaaaaaaagaaagaaagaaaaataaaaagcaaaggactgatcatcacaaaattcaggtttcactgaaggaggagacagggagatgggataggggaagggtaacaagtaaggaaagatgtaaatcaacacaaaaattaaacaagagccttgcagggaccaaaagggcagtgcagaacgcacaaggatttcaccccaatttgtgcacctgagacaagagaaggggaatgggagacatgaaattgatttggataaacttttattcagagtatgggcaaaagcttgctttttctagcagcccacacctggcagggaaagaggcctgtgtatccaggggacaaggctaagggatccaaagacacaccgacatgcagagccttcagaatggacaggtcaggaaggctgcagggaggaggtggccttgtcaacaggctaggtttcaatcgactgagatggcgaaaggggaaggacatcccaggcctgccgagagtggggtgggggtgacagaacttgccacagtggagaggctggacagagagtagtgggactcagctgttcatggtggagctgctggtggcaagggaagaggggagaggccctgtggggtcactggagcattgcccagccagggcttaggattcagtggagaaaataccccaggaactcatgagggagctaaggctaccctggaaagaaggattgagaaaggattggggtcaggggtttcagaggggcagggctcctttggagaagctgaacctgtggccctgggggagctgctgtgcctctttttagctgtgaccctgcgtaatgtgattaccatcctgagccccatatgcctttcaataagagactgctatcttcctgctgacccccacgggaggaagccctgtgacaaggataaggccagatatctcactagagaccacactctggaagtatccatccccagcccaagtctctagccctcgattgccagagtggagggaaggatgtcaaagcattggccattgccaggccagccagtcttgcaggggccagagacaggaacaaggggttaaagtcagattctgggcattgcagtgaagtcagagaaatagatctgtggctccctgatcccagacacctctcagccacttagagccacgcagtacccaggcccatccagctctgctgaagtttgtccagtgcttcaacccaggaaaaccctatggcctccaaaccaactgataaatatgtcagaaaacactcatttgtggctgggtgcagtggctcacgcctgtaatcccaacactttgggaggccgaggagggcagatcacctgaggtcaagagttcaaaaccagcctggccaacatgttgaaaccccgtctctaccaaaaatacaaaaattagccgggcatggtggtgggtgcctgtagtcggggggctgaggcataagaatcacgtgaacctgggaggcggaggttacagtgagctgagatcacaccattgcactccagcctaggtgacagagcaagactccaactcaaaaacaaaaaaacaggccgggcctggtggcttacgtctgtagtcccagcactttgggaggctgaggcgggcggatcacaaggtcaggagttcaagaccagcctggccaacatagtgaaaccccgtctctactaaaaataaaaaaattagccgggagtggtggcgggagcttgtaatcccagctactcaggaggctgaggcaggagaatggcttgaacccgggaggtggaggctgcagtgagacaagatcgtgccactgcactccagactggtgacagagcaagactccgtctcaaacaacaacaacaaaacaaaaaacaaaaaacaaaacaggccgggagcggtggctcacacttgtaatcccagcactttgggaggcggaggcgggcagatcaccaggtcaggagttcgagaccaacatggtgaaaccctgtcactactaaaaatataaaaaattagctgggcgtggtggtgagtgcctatagtcccagctactcagaaggcttaagcagaagaattgcttgaacctgggaggcagaggttgcagtgagccgaaatcgcgccactgaactccagcctgggtgacgaagcaagactccatctcaaaaaacaaaacaaaacaaaacaaaaaaacactttcttatgcttagcaaggagagagggtgtccccactctgtatctttaatgtagctattctttatgttgctttaatatttttatacccatatatccatacatataaacagcattaatttctagctctatataaaacttcccatatgtcaggcatagttctaagtgctttgtctgtatttatccatttaatcttcacaacaacatctaagtctaatttcgagatgaggaaactgaggcataaggagttaagtaatttgtcccaggaagtctggcatcagaatcttactgtcttgaatgggcacagtggcacacgcctataatcccagtgctttgggaggccgaggcgagaggattgcttgagcccaggagatcgaagctgcagtgagctgtgatcacaccactgcactccagcctgggtgacagagttaaaaaaaaatttgttatattcaccttttgaattttctcttctgttcccttttatcttctttctaaacaaaacaaaacaaagaatcgtattgtcttaaccaccaagacaccaagaggtaagccagagagagagagagagagagaaagacagaggctaggtgcagtggctcacgcctataatcccagcactttgggaggctgaggcgggtggatcatttgaggtaaggagttcaagaccagcctggccaacatggtgaaaccctgtctctactacaaaaattggccgggaagtagtggcccatgcctataattccagctacttgggaggctgaggctggagaattacttgagcctgggaggcggaggttgcagtgaaccgagatcatgccactatactccagtctgggtgacagagtgagaccctgtctcaaaaaaaaaaaaaaaaaaaagagaaagagaaagagattttatatagtgagattttcatatatctgagatgagatttgatatatgtatacaattttacacattgcatacatgtgatcatatacaccttttatttatttattttgagatggagtttcgctcttgttgcccaggctggagtgcaatggcgcgatctcggctcactgcaacctctacctcccaggttcaagcgattctcctgcctcagcctcccgagtagctgggattacaggcatgcgccaccacacctggctgatcttgtatttttagtagagggggtttctccatgttggtcaggctggtcttgaactcccgaccgcaggtgatctgcccaccttggcctcccaaagtgctgggattacaggcataagccaccatgcccagccatatatggccatacacatcttttaatgtgttgttttcctttaacattttttccttccctattcacattagttcctcccaccatagaatccataatatcactttaatgtgttatctatgttttttatgtattcattatacatagacttatatatactgatacctttaatcacatacacatatacaaggtttctttttgtcattattttaaaatagtctcttaaaaaataaaaatagtggatcatattaaataaatatttctgcatctcacttttctcacacacctggaaacccctgcaattttattaatttgtaattttttttatttttttatttttgagacagggtctcgctctgttacccagactggagtgcagtggcacgatcagggctcactgcagccttgacctcccgggttcaagcaatccttccacctcagcctcctgagtagctggggctacaggtgcgcaccattacacctgactaattttaaatttttttgtagagaccagttctcagtttgttacccaggctggtctggaactcctgggctcaaaagatcttccttcctaggcctcccaaagtgctgggattacagatgtgagccaccgggccttaggtatccgatgggaattccaggccaggtgggaggaaagggtagtgcattggcaccaagtaacgtttctggctgggtcttgcccatccccttgttgggtggccaggagcgctcagcctccagaggcaggaatgctgactgtgttattgtgaaatcatttgcatattgtgaagtgctttgcataagatggagcgcttttgcatacagggaggggggcattttagaagtcctagggcaggatccctgagtagcttttctttgccaagaaactaacccagggattccattttggaactcagggagggaacagaacgtcctggcagttgtatgggcccggtggggtgagatggacagaaagcttcagaagacaagctgggccaccagggagaagttggcggtctaaggaaggccaacagtgcaacatgaagtgggacaggcaccagaggcagccctgagagctgagtgtgctctcaagagccccagcagaggggaaagtgacagagtaaatggttggagctgccatgggaggctgatgagggtcagagacttaagagacctgtactcagtcgctatctctgcccaagtgagtacccacatgccccttcctgaatcttctcctgtactggctgatttccagagaagaatacaaactcgaaacgccaagccagactcccactgctgttcaggacctagacgtgagaagtggtatcacatactctggcttcaggacacccaggtttgaatcctggctctgccatctgtgccactgtgtgaccctgggctaacagtacccaccacaatgggataatatgaggattcagtgagatagtgcgagtaaagtgaatagcacatagtaggtggtcagtaaattgcggttataagaactgctatccagtgtttgctgccttagtctaaccaaagaggtcaggtctagcttcctccaggtgagggaagcacagagccctcgcctcccaggtttggagttcccatcagcagggtccagccaccatgcattggaccccaaagggttacaagccctggagacagtggcctgaggttcccagtgaaaaaccaaagcataaaaataattcgatgagtaagaataaaattccctcttctgaggttcccggggccaggcccctccctgcggcaggcacttcccctttcccttgctcatggaggagccaggccgggctgactcagagcaggagcgcacagtagtcctcccagcccgacctgggcggcgtggtctggcggccgggcgcgcccccgtgcggccacgggcagactgcggccctggacgggaagcggcggccagatccgcaagccccgcagcctggtcgatcgcggtcccccaggaggcgccgcttccgtccctgcccagcctggctgagcgcggtggttgtggctctctcacttccgaccgaccctcccctccggcccgcagccctgcccaaacggaagtgcgccctctacccgggtcccccaccgccgcgatgcggaagcgccctcccgccgccactccccccgaccccgcgcacgcggcgcctcgggttccggacaggccccttgtgacgtggccgcgcgccgggggcgccccgagccgggggccggggcgggcggccgggcggggcagagcctgggcggggcgcggcaccgcagctggatggctggggccgcccggatcgccgccgccgccgccgcacggtgagtgccagcaggaccctcggggcccggccccgggcgtgatggacccggccgatccctcgccccgtccgactggtcctcatcagacctgggccggctcccaggacccgggagtcaggctcgcccgcttcggcctcctctcccccatcgctccgcgccccacgccccatccctccctcgctgtcctctccgcgtcccacccgcctctctctagctctctcactctctactttcctctccccttggactctccgtgtattccctcccgctagcctgtggtcccctcacctctgcgtgaccgcctcgtcctggcccagtcttgcctgtggtccccagtggagccccgctggcttcatcagtgcccctgattagttaaggcctggaggtcctagacatgggcatctctgccaccacccagaggcagctgctttcttcccctcccatctccatcagaaggtgaggaaactgaggcagggacatcaccagctcaaggtcacagccagcctgaggcagagcagaccacatttaaacctcatgcccgagtttccagatggaacttctcgcttggttgactcacgtccacatcctgtgatcggccggctgggcacattcctgctgcagggagccccaggccttccctggcacaggcagggcctctgcgcctcctcatgccgggtacatccacctgcactttcaggcttatctcgtcctcacagctgaggcaggtgatattgatccctgtcctgcagatgagggcactgaggctcagagggggggcttcagagatttgcccagagttagacagctcaaagtgcagcatagaattcaccgtgggggctctaaagcctgcgctatacaagagagaggcatcccctggctaaaggctccttcctcatcagccccatctcctgttgccctcagtgccctggggacattggtctcatgtcctaggaagaagcgtggatggtcttgccctggctcatctgctcagtttccccacgtatgtctctctgaatccaccccatccccttagaaggggtgcctcagtctctggggtgtcgcgggcggcagggcctcccctggcagccagagacacccagctgggccgggccgtgccgccggtggctgaggagagccagccagcgcctcaccctgtcattagggaaagtttagcctcaggcggaggtgctgacacagtctggagctgctcagaaggaaaaaatacgcagtgctcaggagtagggtgtggagacacagggccccattgctgtgcacccagcatttggatgctcagacgctctggcaaggacagcaggagggtggatgccagggtcccttgcggggaggagggaggcgccacgtttcctaagcaggtgtgcggccaaggctgtagctcatataggtggccttttgtgtttttcagtacgtggcatgcctggatgtccctgccctggctgtggcatggcgggcccaaggctcctcttcctcactgcccttgccctggagctcttggaaagggctgggggttcccagccggccctccggagccgggggactgcgacggcctgtcgcctggacaacaaggaaagcgagtcctggggggctctgctgagcggagagcggctggacacctggatctgctccctcctgggttccctcatggtggggctcagtggggtcttcccgttgcttgtcattcccctagagatggggaccatgctgcgctcagaaggtaggtgactctccggtggcgcccagggctggccagggtgtgggaagcatgctgctgctcttcttaggagaccccaggtcacagagtgtctgagatggagggagaggatagaatagaacttctccccttggtcctgtaggagctatctagccaggggcggctggctctggcttccccaggaagctatgagcacctggtagcagggcctgcccctggggagggggtctaggagatggggatgtgggcacgggtgggagctttgtcctgactacccttttgtaccatgagcatgtactgcccgttcacaaataacatgttgtaacaaaacacgcaggagagctctagggagctgctaagaatgcacgtgcctatcccccacctaagaggggtggaccaaggccctgggaatctgttagaaacgagcatcccaggggctggtgctgccagctggatgctcaggaaccattcacttaccagatggttacccagcagctctgtgccaggcactgggctgagggcggtgccacagctgtgaatagagccctgcttgggccatggtcaggcctgtgctcaaccctcagagcagccctgcggggtcagtgcagggagcacctggattattagttccattttacaagtggggatgcacaggcacagagaggttctttgaccagtccaaggtcacccagccaggaaatagcagtttcccctgggatcccaccccaaacccagctgcctctgtcctctaggcctcagtttctctatcaagccaaagggttggacatggctttcaggcaggcgacttccaaccctggatgctgcaagtccccaaatctctgccacttttctgagagtgacagcagctgagaagagaaaaattcccacgtaatgagcacttgctgtacatattgtcatttaattcccataagagcccataaaaggctcacagctgtaatctcagcagtttgggaggctgaggtgggcagatcacctgaggtcaggagttcgagaccagcctggccaacatgatgaaaccccgtctctaccaaaaatacaaaaattagccggatgtggtggcacacacctgtaatcccagctactcaggaggctgaggcaggagagtcgcttgaacctgggagatggaggttgcagtgaaccaagatcacgccactgcactccagcctgggcaacagagcgagactccatctcaaaacaaaacaagataaaataataattcccataagacccaatttacagatggagaaaccgagtctccaaagtcatctgccaaggtcaccagctagtgggttgggagctgggacctgtcagctcttcaccatgacatggtggtggccctgtgggcatttggcagggtgtggtgtttctgctgtgaggtgggggacccaggaagagcagccacccatatccagccttgcaggcccagaaagagcccagtgagtggggtgggatgaaggtcaggccaggagctccagccagtcagcccccagaccccgcatctctcccttgtagctggggcctggcgcctgaagcagctgctcagcttcgccctggggggactcttgggcaatgtgtttctgcatctgctgcccgaagcctgggcctacacgtgcagcgccagccctggtaagtgaggccacacgccaggggcaagacagtgccaggagtgggggcctggtgcccacgcccagggatggccaggatgaccaggagagggattctgggtttctggcaggagcttgcctgggagggagggagggtcattgtcctggtctctgggccctggtcccagtgggagttctgggccccagctgcccaacccacccttgtcactgccctggtgccctggatgagatcccattccaaatggccccctcctatggccctggcttggcttggcctggcctggcctggcattgccgccccctgcaggtggtgaggggcagagcctgcagcagcagcaacagctggggctgtgggtcattgctggcatcctgaccttcctggcgttggagaagatgttcctggacagcaaggaggaggggaccagccaggtgggccccacactcaagggcctggatatatcagcctctgttctgtggtagtgcccggggcctggaggcccagggtctgagttgagccctgaaaagaggggtctcctggccctctcctgggagctgcgggaggttgggccaccttctttgggactgacaccattagcccctgatgtagcttgttctggtagcctgatggtgacagcagttggggagggtttgttgagtttgggggcacccaactgatatagcagcagaggattctagctagaaaaaacaggggttcctatctttttttttttttttttttttgagacggagtctcgctctgtcacccaggctgaagtgcagtggcacgatcgtggctcacggcaacctctgcctcccgggttcaagcgattctcctgcctcagcctcccgagtagctgggaccacaggtgcgcgccaccatgcccagctaacttttgtatttttagtggagacggggtttcaccatgttgtccaggatggtctcgatctcttgacttcttgatccacccacctcagcctcccaattattattattatttttttgagaagagtctcgctctgtcacccaggctggagtgcagtggcgcgatctcggctcactacagctttcacctcccaggttcaagcaattcttctgcctcagcctcccaagtagctgggaccacgcccagctaatttttgtatttttagtagaggtggggtttcaccatgttggccaggctggtctcgaactcctgacctcaggtgatccatctgccttgggctcccaaagtgctgggattacaggcatgagccactgcacccagcccccgtctctctttctccatctctctccccttctgtctgccctggctgagtggggggcatctaatgtcacctctccctccttctcctggccctaggcccccaacaaagaccccactgctgctgccgccgcgctcaatggaggccactgtctggcccagccggctgcagagcccggcctcggtgccgtggtccggagcatcaaagtgagtggcctgctcagggcccctgcagccgtactgccctgagtggccagccccactcagccctgcctcctgccttccctccttcccaggtcagcggctacctcaacctgctggccaacaccatcgataacttcacccacgggctggctgtggctgccagcttccttgtgagcaagaaggtgaggggcttggggccagtggggctctggcgattccagtggcagccatgtggattccacctgtgtctggagtctctgcttcttgcccctccattgccagcgccctcatctaaggctctcatcccccatcctccctgctgctgtcctggccgccactgttctctgatcctgagcccctggtctgttcctgttcccagtactccttgttgggtgcctctgtcaagctgctaggcgtggcccctgcctgctcctagatgcttcttcctctacctcctccctctggcctctggcctctggcccagaggcagcctactctgcagctggccgagatctttcccacctcacactgttccccctgcctggaatgttctcccgcccacgcttcgagcggctgacgactcatccttggggcctcgacttacatggactcctccaccaggcctttgctgacctcctcatctaaatttggttcctgggcctgctcccctgggcactctatccatcctttccttcccagcgcctgtgagtgtgtgagtgagtcctgtctctcccctctataccgctagcttcgtgaaggcaggttccttgtcccctttagtcactgctgtatttccagtggccaacacagtgcccacccagagccagctcagagcagagtaaacctctgtggaatgagtgggcgagtggggtgctcagccctcaacacagaccccgcagccacggctcccctccctgcagatcgggctcctgacaaccatggccatcctcctgcatgagatcccccatgaggtgagcgcttgtagggcagcccccaggggcccaggcccccacagtgcccatgatcagcatgggtgtggagctcaggagggtgtggggctgggcctgtccagcatggcactctggggctgggctgtgagggctggagctcctcaccccagcagcctgcagctgccatctctgccatactcaggatgggggtcccaggggaagggtggggaagggcagggggctcagtgtgtatatcgtacctgagcactcagggcatcaggccccgctggggcgcagggtgaacctctggacctcccttcaggtgggcgactttgccatcctgctccgggccggctttgaccgatggagcgcagccaagctgcaactctcaacagcgctggggggcctactgggcgctggcttcgccatctgtacccagtcccccaagggagtaggtacgggcgtggcgggtggttgtggcgggtggcatcagcagaggggcaccagccaaagggtgtggctaccgcactgctggtccccaggcccgggaggtggggagcacacacagtgccttgggtacccagttgggtgttctcccgctgcagaggagacggcagcctgggtcctgcccttcacctctggcggctttctctacatcgccttggtgaacgtgctccctgacctcttggaagaagaggacccgtggtgagtgacctgttggaggaagaggactgccactcacagggcccttaggggctcaggagggaagggctcctggccgctgcctgctccccctgcccatgcctccaccgtgagccgttccctccccacaggcgctccctgcagcagctgcttctgctctgtgcgggcatcgtggtaatggtgctgttctcgctcttcgtggattaactttccctgatgccgacgcccctgccccctgcagcaataagatgctcggattcactctgtgaccgcatatgtgagaggcagagagggcgagtggctgcgagagagaatgagcctcccgccagacaggagggaggtgcgtgtggatgtatgtggtgtgcacatgtggccagaggtgtgtgcgcgagaccgacactgtgatccctgtgctgggtccggggcccagtgtagcgcctgtccccagccatgctgtggttacctctccttgccgccctgtcaccttcacctcccggagtaagcagcgaggaagagcagcactggtcccaagcagaggccttgccctgctgggaccccgggagtgagagcagcccaaggatcccagggtgcagggaactccagagctgcccacctcccactgccccctcagcacacacacagtccccaggcggcctaggggccaaggctggggcggctttggtcccttttcctggcccttccttccccacttctaagccaaagaaaggagaggcaggtgctcctgtaccccagccccactcagcactgacagtccccagctcctagtagtgagctgggaggcgcttcctaagaccctttcctcagggctgccctgggagctcattcctggccaacacgccctggcagcaccagcagctcttgccacctccagctgccaaacagcagcctgccgggcagggagcagccccaggccagagaggcctcccggtccagctcagggatgctcctgccagcacaggggccagggactcctggagcaggcacatagtgagcccgggcagccctgcccagctcaggcccctttccttccccattgaggttggggtaggtgggggcggtgagggctccacgttgtcagcgctcaggaatgtgctccggcagagtgctgaagccataatccccaaccatttcccttggctgacgcccaggtactcagctggcccactccacagccaggcctggccctgcccttcaccgtggatgttttcagaagtggccatcgagaggtctggatggttttatagcaactttgctgtgattccgtttgtatctgtaaatatttgttctatagataagatacaaataaatattatccacatactggctgccttggttctgcacggccttccatggccaggcagggccttccttactgccactgccaggcccttgtctctgaactgtcaccccagtgcatctctgaacgttccatgtcttcctggcttaactttttattccaatgactgagcacctatatgagcctggccgtatgccattttagcccctcaccaccacaaactccaggacgctgtccttatcttttttttttttttgagacagagtctcactctgtcacccacactggagtgcagtggtgcggtcttggctcactgcaacctccgcctcctgggttcaagcaattctcctgcctcaacctcccaagtagctgggatttacaggtgtgtgccaccacgcctggcttttttttaaaagtagagatagggttttgccatattggccaggctggtcttgaactcctgaccttgtgatctgcccgcctcagcctcccaaagtgctgggcttacaggtgtgagccaccgcacccagttagtgctgtccttatagacctgaaagctggagcattttccccacctgccccccattccaccttgactgaaaatgttatcagggaagggagctccagccacaaagtcatctctaggtttggcctcagtgaaattaagctctcattcgcttaaaaaagaaaggccggatgtggtggctcacgcctgtaatgccagaactttgggaggccaaggtagggggatcgcgaggtcagcagttcgagaccagcctggccaataaggtgaaaccctgtctctactaaagatacaaaaattagccaggcgcggtggcacgtgcctgtaatctcacctactcaggaagctgaggcagaattgcttgaacccagaggcggaggctgtagtgagctgagatcacaccactgcactccagcccgggtgacagagcaagactccatctcaaaaataaataaataaaaaagaaagagaaaagaagaaaaaagaatatgggacccttattcaaaaccacacaccctcccttctgaatgtgtggagtataagaacaccaggcgcagggcgccccttccccagtcctgtcaagagaatgggggtgggggtgtccagtccacctcttccctcccaggaccaccgtcaatagcccactggctgggatctgcagtctgggcagtgtcatggagcgtgggagaggtgggtgtgaaaccccagtgatgtccttagctgggagtgcttggctgtcagtatttctatcagcaaaacattttaaaacaacatagtatttgcttcacctagctgcaacacatcccgtaagataactgtctcaaggacccattgactcctggcctcagatccaaggaatgagccatggccgtcccagccggctgcccccctcacctatgcaggtgctcagggctgctagctggggtgccaagccctgctggatggcagacagtgcgtgcaagcatcacagcccactggaagaggccgggggccccattttagagatgaggaacccaaagcagggtgggtgtggtccctgtgggggaacttgggtgtcatggtcaggagcaaatgccctgtccggttagaagagagaacaggaatggaggactggggcggccaagtccagggcaggggacagaaacagaagcacttcaggggttgtgctgctggactcctgaggcaggggctggggagtcagtgggaagccaagcagggccacccagggaaggcaaggggccagctggagtgaagagatggcagaattgggggaggggagcacagcgtgacagaccagtcctagaggggctcccagtggatcctgttcaggctcagtttttggccaaagatagggagagaaagagctaagggggtatctggagaaaaggggacccaagggccaggaaacaagggaggatgctgaaagcctaaacccaagcctggctttaccaggaggcaaggactagtgccagacaccaaaatgccgaaagtgaaagggtggcttctatccaggtcctctgtgcaggaactgcagggccatgagcctctgaaagctcagagcagagtggtgctcggggagagagggctctgaggggcctgaaggcccaggcagcagctgcagcaccacacacagccccagaaagcctcatcctgaccagtggtatggggcccacggctgtctccgggtttccaggcgtcagcacctggggaaggtgcctcccacacacgcccccactcctccagccagagcccagggaaggcagacaagcagcggcagggaccctaaaccatcttttattgcgcacttcagccgtgagactggggctggcctgtgtgccctaggcgtagtattgtaggttggctttcttcttggcctgcacctccaggatgccttccatgtagtcctcgtgggtgagctccgtggcacccctgcgcagtgcgatcatgccctacagccgggacaaacagagtctaggtctgaacgcctgaatgccttccctggctccctgaggctcaggcctcttccctcagccgtctccaccagccaaatgcccccatcctgtccagggagggggcaagaaggcacaaagcaacgcacccaccccagctgaccactcaccgcctccacacacacagccttgcactgggccccattgaagtcatctgtgcagcgggccagctcctcgtagttcacgtcaggactggggacaggacagataccacaggctcagtggcttatgcggaatgggcagaggggccaaatatcctcccctggccccgtcaagcaacaaagtcaagttgccctgtgatcagaggcaagtcccttactcaatgcgccttgttttcttctcagtacaagatgtgggggatgaagggaggaagttaatgcaggttataacaggttatttctagggtctcttgagctctggccttctagaaatctgcatctgggactccagggactgactgtcctcatcctgtgcccagcactgcgcttgacactgtcacatctaatccttaccacgaccctgtgaaatcagtgctatcatccccaagtcccaaataagaaaagtgaggctgaggccgggcgtggtggctcatgcctataatcccagcactttgggaggccaaggtgggcggatcacaaggtcaggaaatcgagaccattctggctaacaaggtgaaacctcgtctctactaaaaatacaaaaaattagccgggtatggtggcgggcgcctgtagtcccagctactcgggaggctgaggcaggagaatggcgtgaacccaggaggcggagcttgcagtgagccgagatcgcgccactgtactccagcctgggcgacagagcgagacactgtctccaaaaattaaaaaaaaaaaaaaaagtaaggctgagagagggcatgccacctgctgagagtcatacatatctgaactcaagtccatctggtcccggccattcctggcgtgtgttaatgggctgaggtgtgaggccaggaaactaagtgcctccagcctctgtgccttcagatgaggggtggagtctaaggagcagagcacccagaattacgacatgggccctggcaagacgctacatcacacaactgaggagaaacggaggctggcgtgtggaacggtgctgtgtgtgcctggggcctgggaggtggtggtcgtggaggctggggaagatcagtacagagaagcatggcagagacatcctcctgcgcctgttcaggtctctgtgccctgcccgtgctcctgctcacctgacattcatctttcgggagtggatctgcatgattctggcccgggcctcctcattgggcatcgggaactctatcttgcggtcaaggcggcccgagcggaggagggcggggtccaggatgtccaccctgtttgtggctgcaattacctgaggaagagaagccacaacttgaaaggagcaaggtgttcacagatgggcagacacggtcaaaaaaggcagagaggcagcccccagagtgcaggtgagacacatgggatgttaaagacagatcccaattctcattccagctccaccactggctagctgggggcctgacagctcctgacctctgagcctcatcatctttgcctgggagtgctaatactcaccttaacttgggtgttgggctggaagccatccagctggttcagaagctccagcattgtcctctgcacctcccggtccccagccttctcactgtcaaagctagggcacaggaagcccgagatgctggtgagggcacagcttaggcagagccctcccctcctctaccccctggaagcctaacctaacccgtccagggcagggaaatggctcactcaacttggggcccccagcccagggactggcacataaaaagtgtcattaattgttgaccacattcagagactgaagagactcctagaatcaggtgctgggctgaggataaaacagtgagcaaggctgggtgtggtggctcatgcctgtaatcccagcactttgggaggccaaggtgggcctatcacctgaggtcaggagttcgagaccagcctggccaaccaggtgagatggtgaaaccccatctctactaaaaatacaaaaattagccaggcgtggtggcagccacctgtaatctcagctactcgggacactgaggcagaattacttgaacccgggaggtggaggttgcagtgagccgagatcacgccactgcactccagcctggacgacagagcgagactccatctcaaaaaaaaaaaaaaaaaaaaaaaaaagcaaaaccaaccactgcttgggctgttaactgtgatgaatgtacacttgcaaactgagctaacgcttaaaaacacaggtatctggcccagccttggacggtgctgtacaggagagcccaggcaggcatcccccgggaagtatccctgaggctgagatctgaaggttgaaagcacaccagctaggcaaccaaccagtggagaacagggtaagagccacggcgggcctgaaacgcaggaagcaccgtggcaggagtccagagcaggggaggctggggacaggcatgagatgagggtgaaggcgcaaaaaggcagcacacgttgagccttgtaattccagcatttatcccagggagcaacagggaggcccaggaaagtttgattttttttttttttttgaaacagaggctcactctgtcatccaggccggagcacagtggcacaatctcagcccactgcaacctccgcctcccaagttcaagtgattctcctgcctcagcctcccaagtagctggaattacaggcgcacaccaccacacccggctaatttttctatttttagtagagatgtgtttcaccatgttggccaggctggtctcgaattcctgacctcaagtgatctgcccacctcagccttccaaagtgtagggaatacaggagtgagccactgcacccagccagggtttttaacaggattggtttatgtcagggaccactgtgggttcatgtgagcgaggtggccagattcctgctttggctttttttgttttgttttctttttttttttttgagacagagtctcactctttcaccaggctggagtgcagtggcgcaatcttggctcactccaatctctgcctcccaggttcaagtgattcttgtgcctcagcctcccaggcatctgggactacaggcgcctgctaccacgcccagctaattttttgtatttttagtagagacagggtttcaccatgttagccaggatggtctcgatctcctgacctcgtgatccgcctgcctcggcctcccaaagtgctgggattacaggcgtgagccaccgtgcccggcccagattcctgttttgaaaggaacatgctggcagctgtgggaatgaatggctggggaaacagggaggctattgatcaggagttaggaattggaatctcaagagttgaggagccaccatccaggggcaggaggggatacagggtgggaaggaaccacaatttagcacaactgagagtcaacccgcttccccttaccgccacagagatcgctagggacccttggccctcccttaccgcttggtgccgatggcatccaactcatcaatgaagatgatagagggcgctttctccttggccagggcaaaggcatcccggactagcttggcaccatctccaatgaacatctgcaccagctgggggccagccagctttaggaaggtggcctggcaggaaaaggtggtagagtcaggtcaaaggcagaccctttgagcccatctggtagagtttctgctcctgcccacttcccccgcatccctcccaaagtactcaccttagtctgtgcggcacaggcccgggccaggagggtcttccccgtccctgggggcccatacatcagcaccccttttggaggttggatccccaagttctcaaacttctccttgtggttcattggcaagacaatggcctccaccagctgccaggaggaagtcctgggtgaggagatgaagccctgagggcttctacagcccaacccttcatggctccaaccccaatctgcatccctcctactctaactcagggacacgcccatttctttccccatatcaagaggacacaaggctgggcgcggtggctcacgcctgtaatcctagcactttgggaggctgaggcgggcggatcacaaggtcaggagatcgagaccatcctggctaacacggtgaaactccgtctctactaaaaatacaaaaacattagccgggcggggtggtcgggtgcctgtagtcccagctactcaggaggctgaggcaggagaatggcatgaacccgggacgcggagctcgtagtgagccaagatcacgccactgcacaccagccagcctgagcggcagagcaagactccgtcacaaaaaaaaaaaaaagaggacacagaacactcatccccacccaggctggctatggactctccaggaacgggagtatatggcagaaaagacaccgggccaggggctgggagcagtggctcatgcctgtaatcccagcactttgggaggccaaggcacgcggatcacctgaggttgggagttcgagaccagcctgaccaacatggagaaaccccgtctctactaaaaatactccgctaaaattagccaggcttggtgtcgcatgcctgtaatcccagctactcgagaggctgaggcagaattgcttgaacccgggaggcagaggttgcggtgagccgagatcgtgccattgcactccagcatgggcagtaaaagcaaaactccatctcggaaaaaaaaaaaaaaggacactgggccaagaaccaggagcctgggctccagtcctggctctggtctctctgtgatcctgggcaaggcatttaaactctctgggcttcagtctcctcacctgtcacatggcacccctcccttcctccctaggttgctatgaggatgaaagacacattagggagatgagctgcatcaatggcgtggagaaactaaaaggctgacaaggctgctggcagctgccgtgcctccctcacctcctggatctgcttgtccaaacccccaatgtcactgtattgctccgtgggcctctcgtctacctccatggccttcacccgcgagtcatactctgtgggcagcgtctccaggatcagataggagtctttgttcacaccctaaggacacagcacagggccttcagatttggcccagctcaagggctacccaactgactgggtgacaggtgtctgcagagggaaagacacaggactgggcaatacaagaatcaaacagcaagtagacagaatcccagactctcggagctgttctgccaagattcagagccaacagtgacctggggcgggtacaggggctcagctagtcaccagaaaagcactgcctgggctcaggccccactcaccaccaggtctcctggctttagcttttcagcatccaccaacccaatcacaggaaggaagtacgtctgtggacaagttacaggggcagtctcagttagtgtcctcagggaaggctccctagtcctgtcccacatccgctcctcaccctcctccagtctctcattgctgagccacgctcacctgtcgtgtagaggttttgatcacagcacacttgcccttcctctgggagtccaggtcaatattggcaccatcctcctcttggtcattaggatcaacatccaggagctgggaaggaaaaaatactcagctccttgaactccccaaggcccagtgcttcctaagacagttcctaatacctgcagggctggccatccttacctccctcctccaatagccctgagcccaccaaacgtgggtgcccctgctaagcccagggattgatctctgtgtaggtgctgctcctctgcacagggctcatctaccccggaggagacataaccaacagaaaaggagacacgtgagacctcccaggactttgcaggccccgtcttccccatgaaagtgccccaggaggtgtagctctgacatgcagtttggcctcaatacctccacccactctttccctagtggccccaccccaggctgtccccattccctgctgactccctctcttcccctccacatacacacacacctcgatgacgttggagacaaggtacggcagggtcttgttcactttgattttctcactgttctcttttatcttgtccttcatggcttggagctcatgggtgactctcaacacttcactcttcatgatctgagatcaggaggggaggagaagcaaatataaaccctggcacagcttatgctagagccctgtaactagtgaggtccagggtgcccaggggaccctcccgcatccattcatccagctctgaggctctctgaaggcagagtctgactgtgtccacatcctgcagaagtcaaaagaggaggccagtttggaaacctcctggtgaaatagtggtagtattggaataaaagcaggcctccgagagaggcaaacataggttttaggttctgcctcatagtaagaactgggtgctttatcgcagtacaaacctctctgggcctgtctcctcatctgtaaaataggcattttactaaaagaaggattcttgagaggattattcccagttctcactgggaaaggcaatctgataacttctcatctcagcccaggcctcccaccaccccctacctgtcttcttgtcccttttaaggcttagttttctttcctctcttcctgatatgagggggaagcccgagccccatgtctcccccagggtgcccgattaggaagtacgagaggcgactcggatcgccggggcctgtcctgtgggggctccatcgcccgcacaggagctgtgcgcccaccttgatctcactgtccagcagccgtgtgcgctggatgatctcctccgtggacatcttgagcacctcctccccaattccatcttgctgtaaaaaattatttgtttatttatatatttacttttactcaggacaagcatccctcgttctccgaacccactcacagcctcagtttccacgcccataaaaccaggatggagtcaggacccctgcccacatcccaaacaaccccgtccccgggatcgggccagaccttgacccccagccacctccttccctcttgtcaatggcgtctccctgcgggccccggttcccggaccgccagctcgcccggtgcccacctcggcctcatcccacacggtcgccatcttctcctgccgagtcactggactctcaatattcggcagcagattcatttcctggaggagcgggcagaagatgggaccaggcgggagccgcaacgggagattaataccgtctttcttaaagccttctcttgaccagtggaaaacctctccccacaaatcccgactcttgacccgaccagctccggccgtgctgcggagcagcgaatctgcctctccgattccaaagaccaacccctggccacaggccccgcccccgcggaccccga

SEQ ID NO: 1288 - DNA, 1594 bp, Homo sapiens
ctccccccgaccccgcgcacgcggcgcctcgggttccggacaggccccttgtgacgtggccgcgcgccgggggcgccccgagccgggggccggggcgggcggccgggcggggcagagcctgggcggggcgcggcaccgcagctggatggctggggccgcccggatcgccgccgccgccgccgcacgtacgtggcatgcctggatgtccctgccctggctgtggcatggcgggcccaaggctcctcttcctcactgcccttgccctggagctcttggaaagggctgggggttcccagccggccctccggagccgggggactgcgacggcctgtcgcctggacaacaaggaaagcgagtcctggggggctctgctgagcggagagcggctggacacctggatctgctccctcctgggttccctcatggtggggctcagtggggtcttcccgttgcttgtcattcccctagagatggggaccatgctgcgctcagaagctggggcctggcgcctgaagcagctgctcagcttcgccctggggggactcttgggcaatgtgtttctgcatctgctgcccgaagcctgggcctacacgtgcagcgccagccctggtggtgaggggcagagcctgcagcagcagcaacagctggggctgtgggtcattgctggcatcctgaccttcctggcgttggagaagatgttcctggacagcaaggaggaggggaccagccaggcccccaacaaagaccccactgctgctgccgccgcgctcaatggaggccactgtctggcccagccggctgcagagcccggcctcggtgccgtggtccggagcatcaaagtcagcggctacctcaacctgctggccaacaccatcgataacttcacccacgggctggctgtggctgccagcttccttgtgagcaagaagatcgggctcctgacaaccatggccatcctcctgcatgagatcccccatgaggtgggcgactttgccatcctgctccgggccggctttgaccgatggagcgcagccaagctgcaactctcaacagcgctggggggcctactgggcgctggcttcgccatctgtacccagtcccccaagggagtagaggagacggcagcctgggtcctgcccttcacctctggcggctttctctacatcgccttggtgaacgtgctccctgacctcttggaagaagaggacccgtggcgctccctgcagcagctgcttctgctctgtgcgggcatcgtggtaatggtgctgttctcgctcttcgtggattaactttccctgatgccgacgcccctgccccctgcagcaataagatgctcggattcactctgtgaccgcatatgtgagaggcagagagggcgagtggctgcgagagagaatgagcctcccgccagacaggagggaggtactcagctggcccactccacagccaggcctggccctgcccttcaccgtggatgttttcagaagtggccatcgagaggtctggatggttttatagcaactttgctgtgattccgtttgtatctgtaaatatttgttctatagataagatacaaataaatattatccacata

SEQ ID NO: 1289 - protein, 358 aa, Homo sapiens
MPGCPCPGCGMAGPRLLFLTALELLERAGGSQPALRSRGTATACRLDNKESESWGALLSGERLDTWICSLLGSLMVGLSGVFPLLVIPLEMGTMLRSEAGAWRLKQLLSFALGGLLGNVFLHLLPEAWAYTCSDGGEGQSLQQQQQLGLWVIAGILTFLALEKMFLDSKEEGTSQAPNKDPTAAAAALNGGHCLAQPAAEPGLGAVVRSIKVSGYLNLLANTIDNFTHGLAVAASFLVSKKIGLLTTMAILLHEIFVGDFAILLRAGFDRWSAAKLQLSTALGGLLGAGFAICTQSPKGVEETAAWVLPFTSGGFLYIALVNVLPDLLEEEDPWRSLQQLLLLCAGIVVMVLFSLFVD

SEQ ID NO: 1290 - DNA, 2423 bp, Homo sapiens
ctccccccgaccccgcgcacgcggcgcctcgggttccggacaggccccttgtgacgtggccgcgcgccgggggcgccccgagccgggggccggggcgggcggccgggcggggcagagcctgggcggggcgcggcaccgcagctggatggctggggccgcccggatcgccgccgccgccgccgcacgtacgtggcatgcctggatgtccctgccctggctgtggcatggcgggcccaaggctcctcttcctcactgcccttgccctggagctcttggaaagggctgggggttcccagccggccctccggagccgggggactgcgacggcctgtcgcctggacaacaaggaaagcgagtcctggggggctctgctgagcggagagcggctggacacctggatctgctccctcctgggttccctcatggtggggctcagtggggtcttcccgttgcttgtcattcccctagagatggggaccatgctgcgctcagaagctggggcctggcgcctgaagcagctgctcagcttcgccctggggggactcttgggcaatgtgtttctgcatctgctgcccgaagcctgggcctacacgtgcagcgccagccctggtggtgaggggcagagcctgcagcagcagcaacagctggggctgtgggtcattgctggcatcctgaccttcctggcgttggagaagatgttcctggacagcaaggaggaggggaccagccaggcccccaacaaagaccccactgctgctgccgccgcgctcaatggaggccactgtctggcccagccggctgcagagcccggcctcggtgccgtggtccggagcatcaaagtcagcggctacctcaacctgctggccaacaccatcgataacttcacccacgggctggctgtggctgccagcttccttgtgagcaagaagatcgggctcctgacaaccatggccatcctcctgcatgagatcccccatgaggtgggcgactttgccatcctgctccgggccggctttgaccgatggagcgcagccaagctgcaactctcaacagcgctggggggcctactgggcgctggcttcgccatctgtacccagtcccccaagggagtagaggagacggcagcctgggtcctgcccttcacctctggcggctttctctacatcgccttggtgaacgtgctccctgacctcttggaagaagaggacccgtggcgctccctgcagcagctgcttctgctctgtgcgggcatcgtggtaatggtgctgttctcgctcttcgtggattaactttccctgatgccgacgcccctgccccctgcagcaataagatgctcggattcactctgtgaccgcatatgtgagaggcagagagggcgagtggctgcgagagagaatgagcctcccgccagacaggagggaggtgcgtgtggatgtatgtggtgtgcacatgtggccagaggtgtgtgcgcgagaccgacactgtgatccctgtgctgggtccggggcccagtgtagcgcctgtccccagccatgctgtggttacctctccttgccgccctgtcaccttcacctcccggagtaagcagcgaggaagagcagcactggtcccaagcagaggccttgccctgctgggaccccgggagtgagagcagcccaaggatcccagggtgcagggaactccagagctgcccacctcccactgccccctcagcacacacacagtccccaggcggcctaggggccaaggctggggcggctttggtcccttttcctggcccttccttccccacttctaagccaaagaaaggagaggcaggtgctcctgtaccccagccccactcagcactgacagtccccagctcctagtagtgagctgggaggcgcttcctaagaccctttcctcagggctgccctgggagctcattcctggccaacacgccctggcagcaccagcagctcttgccacctccagctgccaaacagcagcctgccgggcagggagcagccccaggccagagaggcctcccggtccagctcagggatgctcctgccagcacaggggccagggactcctggagcaggcacatagtgagcccgggcagccctgcccagctcaggcccctttccttccccattgaggttggggtaggtgggggcggtgagggctccacgttgtcagcgctcaggaatgtgctccggcagagtgctgaagccataatccccaaccatttcccttggctgacgcccaggtactcagctggcccactccacagccaggcctggccctgcccttcaccgtggatgttttcagaagtggccatcgagaggtctggatggttttatagcaactttgctgtgattccgtttgtatctgtaaatatttgttctatagataagatacaaataaatattatccacata

SEQ ID NO: 1291 - protein, 358 aa, Homo sapiens; identical to SEQ ID NO: 1289

SEQ ID NO: 1292 - DNA, 2444 bp, Homo sapiens
ctccccccgaccccgcgcacgcggcgcctcgggttccggacaggccccttgtgacgtggccgcgcgccgggggcgccccgagccgggggccggggcgggcggccgggcggggcagagcctgggcggggcgcggcaccgcagctggatggctggggccgcccggatcgccgccgccgccgccgcacgtacgtggcatgcctggatgtccctgccctggctgtggcatggcgggcccaaggctcctcttcctcactgcccttgccctggagctcttggaaagggctgggggttcccagccggccctccggagccgggggactgcgacggcctgtcgcctggacaacaaggaaagcgagtcctggggggctctgctgagcggagagcggctggacacctggatctgctccctcctgggttccctcatggtggggctcagtggggtcttcccgttgcttgtcattcccctagagatggggaccatgctgcgctcagaagctggggcctggcgcctgaagcagctgctcagcttcgccctggggggactcttgggcaatgtgtttctgcatctgctgcccgaagcctgggcctacacgtgcagcgccagccctggtggtgaggggcagagcctgcagcagcagcaacagctggggctgtgggtcattgctggcatcctgaccttcctggcgttggagaagatgttcctggacagcaaggaggaggggaccagccaggcccccaacaaagaccccactgctgctgccgccgcgctcaatggaggccactgtctggcccagccggctgcagagcccggcctcggtgccgtggtccggagcatcaaagtcagcggctacctcaacctgctggccaacaccatcgataacttcacccacgggctggctgtggctgccagcttccttgtgagcaagaagatcgggctcctgacaaccatggccatcctcctgcatgagatcccccatgaggtgggcgactttgccatcctgctccgggccggctttgaccgatggagcgcagccaagctgcaactctcaacagcgctggggggcctactgggcgctggcttcgccatctgtacccagtcccccaagggagtagttgggtgttctcccgctgcagaggagacggcagcctgggtcctgcccttcacctctggcggctttctctacatcgccttggtgaacgtgctccctgacctcttggaagaagaggacccgtggcgctccctgcagcagctgcttctgctctgtgcgggcatcgtggtaatggtgctgttctcgctcttcgtggattaactttccctgatgccgacgcccctgccccctgcagcaataagatgctcggattcactctgtgaccgcatatgtgagaggcagagagggcgagtggctgcgagagagaatgagcctcccgccagacaggagggaggtgcgtgtggatgtatgtggtgtgcacatgtggccagaggtgtgtgcgcgagaccgacactgtgatccctgtgctgggtccggggcccagtgtagcgcctgtccccagccatgctgtggttacctctccttgccgccctgtcaccttcacctcccggagtaagcagcgaggaagagcagcactggtcccaagcagaggccttgccctgctgggaccccgggagtgagagcagcccaaggatcccagggtgcagggaactccagagctgcccacctcccactgccccctcagcacacacacagtccccaggcggcctaggggccaaggctggggcggctttggtcccttttcctggcccttccttccccacttctaagccaaagaaaggagaggcaggtgctcctgtaccccagccccactcagcactgacagtccccagctcctagtagtgagctgggaggcgcttcctaagaccctttcctcagggctgccctgggagctcattcctggccaacacgccctggcagcaccagcagctcttgccacctccagctgccaaacagcagcctgccgggcagggagcagccccaggccagagaggcctcccggtccagctcagggatgctcctgccagcacaggggccagggactcctggagcaggcacatagtgagcccgggcagccctgcccagctcaggcccctttccttccccattgaggttggggtaggtgggggcggtgagggctccacgttgtcagcgctcaggaatgtgctccggcagagtgctgaagccataatccccaaccatttcccttggctgacgcccaggtactcagctggcccactccacagccaggcctggccctgcccttcaccgtggatgttttcagaagtggccatcgagaggtctggatggttttatagcaactttgctgtgattccgtttgtatctgtaaatatttgttctatagataagatacaaataaatattatccacata

SEQ ID NO: 1293 - protein, 365 aa, Homo sapiens
MPGCPCPGCGMAGPRLLFLTALELLERAGGSQPALRSRGTATACRLDNKESESWGALLSGERLDTWICSLLGSLMVGLSGVFPLLVIPLEMGTMLRSEAGAWRLKQLLSFALGGLLGNVFLHLLPEAWAYTCSDGGEGQSLQQQQQLGLWVIAGILTFLALEKMFLDSKEEGTSQAPNKDPTAAAAALNGGHCLAQPAAEPGLGAVVRSIKVSGYLNLLANTIDNFTHGLAVAASFLVSKKIGLLTTMAILLHEIFVGDFAILLRAGFDRWSAAKLQLSTALGGLLGAGFAICTQSPKGVVGCSPAAEETAAWVLPFTSGGFLYIALVNVLPDLLEEEDPWRSLQQLLLLCAGIVVMVLFSLFVD

SEQ ID NO: 1294 - DNA, 1462 bp, Homo sapiens
ggccgcccggatcgccgccgccgccgccgcacggtggccttttgtgtttttcagtacgtggcatgcctggatgtccctgccctggctgtggcatggcgggcccaaggctcctcttcctcactgcccttgccctggagctcttggaaagggctgggggttcccagccggccctccggagccgggggactgcgacggcctgtcgcctggacaacaaggaaagcgagtcctggggggctctgctgagcggagagcggctggacacctggatctgctccctcctgggttccctcatggtggggctcagtggggtcttcccgttgcttgtcattcccctagagatggggaccatgctgcgctcagaagctggggcctggcgcctgaagcagctgctcagcttcgccctggggggactcttgggcaatgtgtttctgcatctgctgcccgaagcctgggcctacacgtgcagcgccagccctggtggtgaggggcagagcctgcagcagcagcaacagctggggctgtgggtcattgctggcatcctgaccttcctggcgttggagaagatgttcctggacagcaaggaggaggggaccagccaggcccccaacaaagaccccactgctgctgccgccgcgctcaatggaggccactgtctggcccagccggctgcagagcccggcctcggtgccgtggtccggagcatcaaagtcagcggctacctcaacctgctggccaacaccatcgataacttcacccacgggctggctgtggctgccagcttccttgtgagcaagaagatcgggctcctgacaaccatggccatcctcctgcatgagatcccccatgaggtgggcgactttgccatcctgctccgggccggctttgaccgatggagcgcagccaagctgcaactctcaacagcgctggggggcctactgggcgctggcttcgccatctgtacccagtcccccaagggagtagaggagacggcagcctgggtcctgcccttcacctctggcggctttctctacatcgccttggtgaacgtgctccctgacctcttggaagaagaggacccgtggcgctccctgcagcagctgcttctgctctgtgcgggcatcgtggtaatggtgctgttctcgctcttcgtggattaactttccctgatgccgacgcccctgccccctgcagcaataagatgctcggattcactctgtgaccgcatatgtgagaggcagagagggcgagtggctgcgagagagaatgagcctcccgccagacaggagggaggtactcagctggcccactccacagccaggcctggccctgcccttcaccgtggatgttttcagaagtggccatcgagaggtctggatggttttatagcaactttgctgtgattccgtttgtatctgtaaatatttgttctatagataagatacaaataaatattatccacata

SEQ ID NO: 1295 - protein, 358 aa, Homo sapiens; identical to SEQ ID NO: 1289

SEQ ID NO: 1296 - DNA, 1615 bp, Homo sapiens
ctccccccgaccccgcgcacgcggcgcctcgggttccggacaggccccttgtgacgtggccgcgcgccgggggcgccccgagccgggggccggggcgggcggccgggcggggcagagcctgggcggggcgcggcaccgcagctggatggctggggccgcccggatcgccgccgccgccgccgcacgtacgtggcatgcctggatgtccctgccctggctgtggcatggcgggcccaaggctcctcttcctcactgcccttgccctggagctcttggaaagggctgggggttcccagccggccctccggagccgggggactgcgacggcctgtcgcctggacaacaaggaaagcgagtcctggggggctctgctgagcggagagcggctggacacctggatctgctccctcctgggttccctcatggtggggctcagtggggtcttcccgttgcttgtcattcccctagagatggggaccatgctgcgctcagaagctggggcctggcgcctgaagcagctgctcagcttcgccctggggggactcttgggcaatgtgtttctgcatctgctgcccgaagcctgggcctacacgtgcagcgccagccctggtggtgaggggcagagcctgcagcagcagcaacagctggggctgtgggtcattgctggcatcctgaccttcctggcgttggagaagatgttcctggacagcaaggaggaggggaccagccaggcccccaacaaagaccccactgctgctgccgccgcgctcaatggaggccactgtctggcccagccggctgcagagcccggcctcggtgccgtggtccggagcatcaaagtcagcggctacctcaacctgctggccaacaccatcgataacttcacccacgggctggctgtggctgccagcttccttgtgagcaagaagatcgggctcctgacaaccatggccatcctcctgcatgagatcccccatgaggtgggcgactttgccatcctgctccgggccggctttgaccgatggagcgcagccaagctgcaactctcaacagcgctggggggcctactgggcgctggcttcgccatctgtacccagtcccccaagggagtagttgggtgttctcccgctgcagaggagacggcagcctgggtcctgcccttcacctctggcggctttctctacatcgccttggtgaacgtgctccctgacctcttggaagaagaggacccgtggcgctccctgcagcagctgcttctgctctgtgcgggcatcgtggtaatggtgctgttctcgctcttcgtggattaactttccctgatgccgacgcccctgccccctgcagcaataagatgctcggattcactctgtgaccgcatatgtgagaggcagagagggcgagtggctgcgagagagaatgagcctcccgccagacaggagggaggtactcagctggcccactccacagccaggcctggccctgcccttcaccgtggatgttttcagaagtggccatcgagaggtctggatggttttatagcaactttgctgtgattccgtttgtatctgtaaatatttgttctatagataagatacaaataaatattatccacata

SEQ ID NO: 1297 - protein, 365 aa, Homo sapiens; identical to SEQ ID NO: 1293

SEQ ID NO: 1298 - DNA, 58522 bp, Mus musculus
  misc_feature (1)...(58522): n = A, C, G or T/U
tacttgatatgggtactgggaaacagaactcagatcctccggaagagcagtaagggctcttacctgttggagtatctctccgacttttatgaataactcaccctaattcattagcaactctaaaggcaccaatgacccagtggatctgggcaaagcacccatcttgggttccatcaaacaaatgctccagacttctcgtttgttggttgacttctcaattaattaaaacatgtggggttatgttgtgttgggttttttttttttcattaactattttattgattctctttacatcctaatcacggtccccctcctcccagtccctcctcactcagtcccccttccccttctcctctgagaaggggaggaccccttgggtatcaccccaccctggcacatcaagtcactgcaggactaggctcatcctctcactgaggccagacaaggcagccagttatgggaacccgatccacagaccctgttgtctaacagatttagggacagtccctgctctagaagaccaagttgtatatctgctatatatggaggggagggctaggtccagctcaggtatgctttttggttgatagttcagtctctgggagcccccaaatgtccaggttaattgactctgttgatctttccatggagttcctgtcccctctgggtccctccatcctttccccaactcttccacgagactcccagagctccttctgatgtttggctgtaggtctttgcatttgtttcagtcggctgctgggtggaacctctctgaggacagttattctagactcctgtctgcaagcattacagagtatcattaacagtgagtgtcaggggttgcttcttgcccataggatgggtctcaagttaggccagtcatcagctggccagtccctcagtctctgctccatctttgtccctgcatgtcttgtaagcaggattttgggtccaaggttttgtgggtagtttggtgtcctcatcctttggggtcctgcctgactacaggaggtggctacttcaggttccatatccaccactgctaggagtctcagctagagtcacccccacagactcccggcagtctcccccatcccaggtctctgggtcctagagataatctcctccctgctcagttcccacctccatctgcctccaatgactgtttcatttcccttctgggtgaaatccaggcatccttgctttggcctgccttgttatttcagtatcctgtacttaaaagctagtatccacttatcagtgagtgcaaaccatgcatgtccttggatgatatttgctagttacatctatttgtctgaaaatttcatgctgtcctagttttttaatagctgagtatttcattgtgtaaatgtaccacattgtctgtatctgttcttcagttaaaggacatctgggttgttaacagtttttggctattacaaaggaagccgctatgaacatagtggagcatgtatccctgtggtatggtggggcatcttttgggtatatgcccatgagtggtatacctaggtattcaggtagaaatatttccaattttctgagaaactgccagattgacttccataggggttgtacaagtaaaacatgtgttttgataatgatatcaacagatattaaaaggtctggatatgaaatcagctatccctaggtaggtgagagacaggggtaaggggagaaaggtgatgtcaattagagtgtgggctgtgggctatgagcatcatcgaacagactgaggcatcgggtggggccatagccatgtggagctaggactaagctagaaagccggaccagtggaggccagttctgggaagcgatgctgttcacttccacaatgctgggatccaaaagatcttgtgcatttgtttgtaaggcttcccctggtcagtaagaaaaataatcaaaggcattaatcatgcaacttaaagactctgctctgggttacttaacaatacagagtattcggagctggagagatggctcagtggttatagcaccggctactcttgcagaggacccaggtttggtgtcctgcatccccatagtttctcacagctgccttattccaggggttctgatgccctcttctgacctctacagggaccaggcacacaagtggcaaacagacatacagaaagtaaaataaaagatacacaatttttaaaaagggagggggtgtgttgcctgtcttaacatgaacccaagaatgataggatatcaatcatctctttgtttatgtcagttagctcttggtatgtaacatatactcccaaactgaacagcttattacttaatggaactctgagttctgcgggtggcacttggctgggctcagtggggaggttcctctagcctctgcttggctcagtcatgtgttgatgtgtgtgaccagtcacccacccaggcagctttgcttcaggggtgggcctgctgcagttggggtcataggaataagcagctcgcttgaactgtcattgtcctttgagatctactgggcttcttcactggggtaggattcagtgatggactgtggaagctcccagggtgccttgggaactacatttaagttaataagagatgttaaagatgaaaaggaaattaatttgaaatttctagaggctgtgccagagctaaatcctgagaaatgtaattttcaattccttcctctcactttgccttccctgaccatacctcttcctctttgtctttagcagaagatgctagctagcagtctattccaggacaagctttgcagctgtgaaacacctcctgcccccacaccctgctgtgcgggtatggaatagggatggttacttgtagtgacagttttaggagtttgatttcttaaaacacacacacagagagagagaaatgttataagaatatgttttcattctaatcccaggtgtggaatatggggctgcttcagactgtccacagcaggtgagtgtgatttgcctcatgctctagcaggggtgtgattttgccagaagcaggtagtttctgtgattgtgtgacatggagatttctgggaacttttcagagggtatatgaatggcagggctcctagaggtggggtggggtgttgcttgtggcttgtttgctgttggttgtggtttgttaaatagtcacacacagagaagaaacaagaagaaattagatatcctgaatgtgaagatcaaacttgccccaaggaactcaactcctctaagccacaggaagtggtttaaggataatgtcgccccctgtcctctctatcttttcttctctcctgtctagggttagggggttgaaagggtgggagaaaggagtggagaaagaaagaagagtccacaaagtagcctgagacagcttcagttactccccagggtcggcttgacaaacctccctgtgagacattcagcctttgtttcatctcaaagcactgaaaccttccatcttcccaagacactccgatttactgatgtcacgtcatgtgtgttaatgatcactgtttgcatgatcatttttatgggtcacttttgtgtctaagacattgtgagacaagattctacctttaaaataaactgatgactgagcaacaaaatctgtggacactgcagcttacgtttttaatttattgtgcactagcattactgttcttggcatgtgtaatttaagattgtgtgtgtgtgtgtgtgcgcgcgcgcattcataagtatacatgcatgcatgaacgtgtatgcatgtatgtttgtgtatgtgcatgcatgcatgtgaatgtaagcattttgagtataattttgacttctaaccatttttgaaaaacagtgttttcaaggtccttattttctcaagcctaagttaaatacaactctgaaaatttagatctaatttatcttaaaggtcattataaaactaaactgctagcctatacttgcctgcttcaagcttacagattttttttaaaaatgtcatatttacaaatgatactggtgtctcttatattacatcttaaatattatttaaatcccctcttccttgtaagcacacttgcaacaataattaatctctgagccttcagccttgaagaggaataaactaatgtaaatagatacccattaaattattaaactgataacccaaatgtaaaggaaatggtaaactgggaggagacagaaatgtccaactttaaaccagcattttggttgcattctgccctgaatgagaagtcattgctttgagcaaaggtggtttctaaatgcccattataccaagacttcaatggtaaaagggttatctgttctaagatgacacagaaatgtgccatgtttcatgctgtacttataactgccagatattgaatacatgatgtccgtgttttctgctttttaaatattgctttccttgatttttatggaactataattattttaggaaaatatttctaaagtttataagggaaaatttcaaggaaccatcagagggagagagagagagagagagagagagagagagagacaaagagagagagagagagagagagagagagagagagagagagagagattgaaaatatattttgctaaaaagaaactgaaagtgataatatactatgctgtcatctgtattcttctctaacatgagtttctattcacttccccaaaatgaatctgatgtaaccaaaataatagaacaaatgaaattgttagtcacaaagaggaattacaatggtttaggtattgaagactaatctttcctaaaactaaaactagcacttctcgtaaagttataattctaccatcaaacgttaaacttttttgtttttagtacaaggagctgtagatgcagagagaaacgtgtgattaatctagtttaaaatatggcttttggttgtttaaaaagcctgtttccctcatccctttatatcttcatcccatactgtgttcttgattgtttttttctgtgggtataatactagtatacatcacatgtaagcgttatgtcagttacagaaaaggggaggatggaggggaggagtggaggatggacaggatgggaggggaaggaagaaaggaggaaagaccagatctgagtcataatggctgttaaaatttgatgtggtccaggcatctcttccttagtggcttttcccactaattctccctcttcccctcctcctccccttcccctctctctgggaccaccttcctgctggcannnnnnnnnnnnnnnnnnnnnnnnnnnnnnnnnnnnnnnnnnnnnnnnnnnnnnnnnnnnnnnnnnnnnnnnnnnnnnnnnnnnnnnnnnnacacacacacacacacacacacacacacacacacacacacacacacacaatatttggcctcatgcaaatgagacgcttggtcagctgggggcgctgtggaccaaagttcccagaaaacaaaaaaacaaaattcaaaccaaaccaaaccaaaccaaaccaaaccaaaccaaaccaaaccaaaccaaaccaaaccaaaccaaaccaagctgttgcaccagctgtctgcactgcagattgactaactaggacttttaagctgttgcgggcccagaggcaattatctttcctaacagtcatgtgtgtggcccactactgggtctgacctgacattctgggactatctggtataaatcctttgggatgtatcaacaatccactagcttctagcaactcgaaagctgagcacaccatcagatggcatctggagcctgtaccaaagagtgtggtctgagttacttttctgttgctgggataaaataccatgatcaaaagcaactaagtaagcctttattttggcttacgggttttagagggttagagtccgtaactccagggaaggcatagtgtggcagagccggaagctggatggtcacatttcatctgcacaccacaggaaactggacagtcacgtctcatccacacaccagaagcagaaggatcagaacaggaagtggggcaagactataaacctcaaagccagtctcagtgaaatacttcctccaataagaccctaccttggggactaaatgttcaaatatgtgagcccatggaagccatttctcattcaaaccaccacacctgctttgctaaaacctacaaagctgctggttccactgaggaaaagtctaagtgacttgactattttgttctgttaccattttttttttaaatcatgaaatagttaccacattttgagggcaacctgaatccgtgttcctgggccatggtcactcatatttgactctttacactgtcatgtgttttattacagggagagtgtggtcaatgagatgcagcacatttgattttggctccataagatgagaatggtgctaacctggtgtggccgtgatgcagtcctcacttgtctatggccatgctcctgtcttagaacacttgtctaaggacagcccttagagagccttgcgagaacagacatactataccatgggttatagaaaatcacagggcatagagttgtgttcatgacaatacttggtcaaagcaacgagccactatcactggttcatgtatttactgcacttactattataagcattttctaatgcattccttataataattttaaaaattactactgtgaaacaatgatactggatgcagcctctgtgcagcctccagtcatggcttcccgtaactgcatacaggggaccagggaggttggctgatctatgtgttctggtctttgtaattgcatcctatgatgagattgtggcttgaagaattctcagaagctaccccatggtgtatttgaattttttttttctccaggatgaaagcctttctggatcttagagactgggagtgactcttccttattagactagagtgactatttaaacatccacacatatatcaagataacaatgaaggcatttcatccagaggttggggagcagcccatagagagccttcttctgcttaaaatgcctgccccccccaccatcttgctcttgtctgaccttggaagcctggcagccagaatattcccaattatccaccagcctcttcactgtctcatccattcttccaggatgactctgtcaaccacttttatcagaccacatgatttcatttgtcaaagaaacccagccatgccttttcattaaagaccatttctcagatatcagtcacaggaagtgtaagttatccctttgatggtgtgtgtgaggcctgtctggttggctagcaaaggcatcccagcatcctgacaacccctggggttcatctgtcttggactccactcttggctctctaataggttcattgcatatgaaagagatgagaagtaaactcttcttcctaggctgggggccactgcagctgctagcatcccagtaaccatagcaacaatggaccacatggcaggtgtctgatgtccatcagacattttctggtgttaagtgctcttcctcctccttccatccatgtcttcagtagattctattctgactggtggcattaagagtctcccaggggagcagctcaggcctgggagacctgcagccagctgccttaattaagcctctcgtctctccagaatgtttagcaatgccaagctcaggagccaaaagaacctcccagggaggttctgatgagagaggctgctaaatagaacgcaggagatgggggtagggtgggtgttcaagaagtacagttcatagttgtaaacaaatggagcttaataggaaattattcctggtgtaatgtagagcaagcacacaagtaataactgtgggaaagtcaatgtaataaaatggaggtgatctcgaaaatggaactccctgcaagctgccagaacccctagggagatgatcacgtgggttacttaacaattattgagtgcctgctgtgtgcagtcatgagtaacatgcagcctctaatttttgaataaatgaatgaatctgcagcctactagggatgcctgaagagaagcaggaccaaccttgtggcagtgtttgcatctgagttgctcctggggtccatccacggagaacctttgagagtttatgtctgtgacagtcagggtccaatgcaggcttcagaaacatccgttctggtagatgttgaaagaattagaaaaacaagcatattactttgagcaaagaaatgatttttctcctgtacccatcccttaggagaactggcagtcggggttttcttcctcttcgaagctggctgccatgctgggagatgctcgggccacagagagacgccatgcagaggagaaccaagggtgcctgctgaggtttcagagtgcttcctgtggtggcccagcaccagctgctgccattgagtgctccattgcacagcccaaaccagctggacccctggataactgcagtcccagaagactgctaagcagaaaccacctcgctgagcccagacaacctacagaatcacgctgtgtagaaaaacaaccgttctaaggcacgaagtgctgggtggggctctgtgcggtgggtaagtgataaattagtgggaggagaagggggacccagacaatgatcacacctgagcagagacagacaagagctgctggaatcatcagctgcctggaagccgaggattaaatcctgccgagccccttctcagaagtgcccagcaccccgagagcccacaaacaacatctagtcctcagtggaggaaaccttcctcataatgaaaaacaccaaacagctcagtttcctagagctaagacagtcaccttcctggacaaattctcattttccctccctcacaagcatacacgctctccttgttgtgagcctcgtgccctagcagcaacctctgctgtcgttggtccctggaagacaggacttggaatcagcaaacacggagtgtggcctcaggaggctggcaaggtttttagtgtccttgtgtcctcagctatgtaggaggtaaggtctctgctgatcagatcaggtaatcaatgtgagctgtaaatacaacccaccagaacataggaccccacaccagaagccacagtacatcagccagcccctgccataccccaggttcccccatctctctccttgttccccccacattccttttcccagtctctgtctttgtccttagtgggacgtcactgtgagcctagaaaatgagacagctctagtcctgtgtgagtgtttgcaaggcttagggcttccactttacagccttcttaccagctctggggaagggggaagggtgccgtggcaagcaaagggttactaatctgatgaggtgaccagctacccagagtgagttccaggtctgggttgaagccctggttgattgaccctgtgaccttagtaagctccagtccttcttaggtccaactgcctgtgtgtgtacacatgtgcacagagcattaagaatgtctccagacaacactaaaattacccacttgcatgtgtctttgtgaatgtgtgcatatgtgtgtgtgtctatacataaagcactaggaatcaaccctgaggttatcacatgccaatgtgtgtgtgtgtccatacatgtacgtgttgcatctgcgtgtctttgtgtgcatacatgtgtgtacacagagttctaagaattgctccaaataaccccgagattatcacctgagagagaggaagagagaatgagagaatgtggaatgaccccacacaaccctgagactatcacctaccaatgtgtgtttgtgcgtgtgtatacatgtgtgtgcttgtgtacatagaacacacaaacctgaggctatcacctacctgctcctgctctcctggcaatagggggcgggtcacatggtggcgaggagggggtagcggttgacgcgcctctgggtcagcctccgcctctgacgtccttacagccatccttcctcccagctggctgcgtccccgccctcggagtctagagagcggctggagccaggcgggagcgcgaggtgcaggaggccggcgggaggcgggcgagccgcgggaagcaggcaccatggtgctgtcggtgcctgtgatcgcgctgggcgccacgctgggcactgccaccagcatccttgcgctgtgcggggtcacttgcctgtgccgacacatgcaccccaagaaggggttgctgccgcgggaccgtgagcccgacccggagaaggcaaggcccggtgtgcttcaggcggcccaacaggtgagtgaaggccaggtgggatagccgggccaccctatgttttgccaggctgggaaggaactgcagacctgcagcaggggtcgcagtggccccgaggaatgggggaaggacatgaaggagaatgggagggaggagggaatgagggcttcagagggctgggaaaggaatgaggttgggggacagtgtgcagggaggagaggtggtgagcctttggaaggatgggggagctgcagggttagaagacccttcgggggacgcctgcagaaataggggacaagggtagtggggtcttccagaggaaagagggagactgcaggagaaacaaatttttttgaaaaataaccagaaaggaggaggtgacgcctcctcccagctggacagcaggagtgggggggggggggggagacggctctagaggcagccagcgaggaggagcctgcaagaccctccactcctagcagctgagcctcagcttccccgtgggtctccggagattcagagggcttttatccccctgcatctgtggccccacttgagctggaaatggactgtgcatcccaggcaggaatggaagcagggaggtctgggagaannnnnnnnnnnnnnnnnnnnnnnnnnnnnnnnnnnnnnnnnnnnnnnnnnnnnnnnnnnnnnnnnnnnnnnnnnnnnnnnnnnnnnnnnnnnnnnnnnnnnnnnnnnnnnnnnnnnnnnnnnnnnnnnnnnnnnnnnnnnnnnnnnnnnnnnnnnnnnnnnnnnnnnnnnnnnnnnnnnnnnnnnnnnnnnnnnnnnnnnnnnnnnnnnnnnnnnnnnnnnnnnnnnnnnnnnnnnnnnnnnnnnnnnnnnnnnnnnnnnnnnnnnnnnnnnnnnnnnnnnnnnnnnnnnnnnnnnnnnnnnnnnnnnnnnnnnnnnnnnnnnnnnnnnnnnnnnnnnnnnnnnnnnnnnnnnnnnnnnnnnnnnnnnnnnnnnnnnnnnnnnnnnnnnnnnnnnnnnnnnnnnnnnnnnnnnnnnnnnnnnnnnnnnnnnnnnnnnnnnnnnnnnnnnnnnnnnnnnnnnnnnnnnnnnnnnnnnnnnnnnnnnnnnnnnnnnnnnnnnnnnnnnnnnnnnnnnnnnnnnnnnnnnnnnnnnnnnnnnnnnnnnnnnnnnnnnnnnnnnnnnnnnnnnnnnnnnnnnnnnnnnnnnnnnnnnnnnnnnnnnnnnnnnnnnnnnnnnnnnnnnnnnnnnnnnnnnnnnnnnnnnnnnnnnnnnnnnnnnnnnnnnnnnnnnnnnnnnnnnnnnnnnnnnnnnnnnnnnnnnnnnnnnnnnnnnnnnnnnnnnnnnnnnnnnnnnnnnnnnnnnnnnnnnnnnnnnnnnnnnnnnnnnnnnnnnnnnnnnnnnnnnnnnnnnnnnnnnnnnnnnnnnnnnnnnnnnnnnnnnnnnnnnnnnnnnnnnnnnnnnnnnnnnnnnnnnnnnnnnnnnnnnnnnnnnnnnnnnnnnnnnnnnnnnnnnnnnnnnnnnnnnnnnnnnnnnnnnnnnnnnnnnnnnnnnnnnnnnnnnnnnnnnnnnnnnnnnnnnnnnnnnntccctctccctctccttcccctctccctctccctcttcctcctcctccttctcttcttcttcctccccattcattttccatacagatggcctcagcctttctatctcttcctgttatcatccgagggaggattttacttactagcccgtgaaacaaccacccttatgaccgttgtcccatatcatcccttcaaatgccctttacagcgctcccaacgttggcggccattcatatcatccacctgcattgcactcattcctacctagaaaatggcatttgtgcaataagaaaccactgacaaacaaaggcactcagccttctgttccaagggatatgggtgcaggggctgcggctctgcagcccagggccagttctacggaggcccagtgatgtctgcccatgaatatctgttgataagtaatgctcacccatctacatttcttctcctcgttccctggtgccagggaacttggcaacagaggctcaataggtgtgaaaatgatggcctgagagctcaaggtgtgtcttggtggccactgtgctctgattcagccactgacccagataaagtaacaacaaagacagcgcacttgatttcaaggaagccaaggaggcaggcgcagggtgggaggtgactgaggacagtcagcagggctcactgaagatgacgttcagagagaggactcagtactggaggaggaaggtgattctcagtttctggccccagcagcttgcagctgttgtgtccccctgaggactggggtgtttgtagggtgcagcatccctgcctcatgtttccagatttcattggctgtgttgctgggaaatgtctttggttttatagggcaggctgctaatctgatttatgccccaaatggataaacaaaattgaagtttgtactgaaaaaaagagcctggaggtcttcccaggggttcaaaatctgccaggagtctgcagatggagtttatgggggtcagggtctggagtgggggagaaatgatcatggttttatcaccagtaactccaactgaaacttggcattttctataagtggggctataaacaagaaagcaggggcgtgttcctgatccctgcaacttcgttgcagaaaatcgtagctcatctgaaccatgctgcagcgctggctgaagcttccccgtagtcgtttatccccctcccctcccattttaagttatggcatttattaaagttcctgctctgtcctgtgatttactacattaataaaggaccacgcatgtagcttttcctggacatatgctattgactattccttcacagcctatatgttttaccttcagatttttaagcaccctggagggaaggggtcaggacacagcacgggtgatcaggagctcctgctgagggccaggtagcagagggtgggagctctctgcagtatcctctctgcagaccatgccctgctgtcacaggtcacaggtcacagtgctcttgctccccctcactgtgcccagcctttggggaagatgcagacaattcagtctcttacacaggacattcctgggttgctggaatcactaggaacaccaggaagtcccggttacagctgacctgtgatttgaagaagaaatagtcagggaggtgctctgagggctgtgtcctctccatcacaactgtctctgaatttatgtgaaagccgccttcagattccctgccttcattctctgggattttctcttcccaggtttcaggtccccactgtcccttttggcattcctgggtgagcagagaggatactctcccccttgatcatcctgaagtcaagaggctttcattttagggtccttatacccctatgtgacatttgcttgactgtgaccataagtgccattggtggatcttttcaaataacttttaggttcccaggggacctggtattgtctgtcctctcaaaggcaacatgtagccagagactttagtgaacttgcttggcctttatctgtactcgcccaactctcccacccacatcccagctccccactgccacacccaaccctcccatcatacccctgatccccactttcacacccaactcccccacccacaccccagctccccactgccacacccaacctatccataccagcacccagatcactcagctctttccttccatcagagctgaaacatgatggcttacaacagaagctgagttccaagttttcatgggatgaataaatgctggatttgtgtcaaataatatatgaatagtcaagtcctttcccccaaagtccaaagtatgtccttcacttttcccatgtccctgacaatgtctgctgggaagcagggcatgtgatccgcctggatgtgtatattgaatgaaaggttttatatacaacatggacttggggggacaaaccacaaagtaggtcatacaggcaaacgcctatttacagaaaacctgaagccaggcttgagacatgcacggtgacaccctgcaaggccagtaagggacaggctgcataaagcatgggtagcctctggactttgatctctgctctgcctcttgatgtaagtgctgggtacatggtttatttcctttaaaatgtacctagccttattgtttgttttcctgtaagaagttatgtaccaacatggttcctattaagccatctcatcgtgacatagtgtttgtgaacattatgaaggctaggccagtagtctaatgatacgggcttttaggcctgtgatcctcctgtacacggtctctcacaagctgcctcttgacactacccatttgcactatttctccacctgcaacataaaagtcttgctctagggactggggccacaatgccatcaatggggctctaggacacccctaattgtccttcttatggcctcagagcagcacctctaagctgcttgttttcattacacccatgagtgagacaggccaagcacagcagtggtaccacacattaatcgtgtcatccattaaaggttaatgagtgcatccgaagcacagtatatggtaaaaggcggacatactgctgctgaggagacagaaggtacagccagcaattgctacagagcgtgtaattttgctccatgagaggtaacactcagggaactatgggaaatcctgaggagggacaatgccagccacaatccaaagtacatctttctccagatctgaaaggccactctctggacatcctttttgatgactcttattggaggtcctgtgaattgctaaccccacttctggaactgattggactctggctgctctaagagctgacctccataggttctcagcctttttctcatttgttattgatgttgatagctgttggtgggggcaggggaggcttgacccttcctacatgctaagtacacatgttactactaagaccaccccaggccagttctcacctctttaaaggattcaactgccagctttctgtagtaaatcccctgactagtaactcttctgtctttatgaacaacaataaaagacccatttccacagagtagcaaatatcaggtctggcactgccatctacataagttctttctatgtaccagacaattgcactttaccagtgagaaatgtgagagcgtaacattcatacgcagagctgggacatgaagtctggctctagaaccaaatatttgatcacttagctagagcttaataagaaaaagctagtcaacattttgctcagggcactgtttccccagacaggtgaacaggtgtctgcgtctttgcaggccagtttccaaaatatcccctgatgcttgggtttttctctgcattgtacatctgtcggctccaggcactgggtacagctcagggccctccagagagattttacacagtaaacatgtttgggctggttgcttagcaacaacaaagacagtatgaatttttcatcacaagattagcatatattatttcagggagatgagcacacagccgcaggaagtgctaagcccttcaaagcaatcgaatagggtatctctgtacttggacctaccagtcccttcccaacagcaggtcctgacccatcacattactggtttttcccccagtttctctttttggtatggcttatagattagttagtgtaatgattgatgttgattattaacttaacagaacttagaatcactcaggagacaggcttctgggcatacctagggattattttgattatgttaaccaaggtgggaagacctgtccactgtgggtggcaccatcccctggatgaaatccaggactaaatacatggtgaaagggagctgaagagcagtgtgccttcactgccctctgctttcctgttacgattgtgatgtgatcagctactccaagctcctgctgccttgatctccctgctctcccttgagccaaaggacagcctttccccttgtctactaggcatgttatcacagcaacaggaaaattagccaagagtcaggtttgtgacttatttcctagtagatcccatacagaaaacactgttgcaccctgcctagggttttagatgctgaccatgtaatcggcaactaagaatgcaggagaaagactcagtaggggaaatagccaaagcagcaagcagtggttaaggcaaagagagaagggaaagaagagaccagcaagaggactcagaagggcaagaggatacctgagtcaagatccagaaacaatcagaataaacagacacgagctcgttcctgggtacctgccacactacagggatactgaggccgaggctctctcttgcctaccctgagtacagggtctctacacattcctctactaaagggcatcagttcaaaccccaccccgaccttagtgcctctgtgttcacaaccaacacagactattccttgctagctctggggaaacctggtctgaagatgaagaaaatagcttcacagaagcaagtgttcttgtgtgtgtgtgtgtgtgtgtgtgtgtgtgtgtgtgtgtgtgtgtacatgagcactatgtgcatgcatgcacagaagtttctgcaaaagtcagaagagggcattgtttggattacctggaactggtacaagcagttgtgagccaccatgtgggtggtggaaaccaaacccaagtcctctgcaagagcaacaagagctcttaaccacggatctagctctccagtcccagtagagctgaattttaataactaaggaattctttgtatgggcatcagaaccaacacattggagcacacaaaatacctcataaccaaaatgtagaaactaacgtgtcagcagaggggagaagaaaacagaagcatccctccctcctgccctctctccccttcactgtgtttatactcacttttcctcctcttcctcctccttcccctcctccccttcccctccttctctcttattctttaagttgagcatttcaagcagcgtctcactgttctaactatgtagaccaagctagcctggaacttggagatcctcctgccttgcccctcaagtgctgggattaaagttttgtgccaccatacctgaccctctattcctttctttacccctgtaatgacatttattgagcacatactgtgtgccaggctcagtacgcggggatgggtacacagtagtgactgctccctcctccgtgacacagtgacccattctctagcctcatgaagcatacagtgctgtgggcaggaccagagtcaacagaaaggccagggtgtgtgaagtgaagagcatgaggtcaggcttgagggtcagtgaagctgaggcaagcatcccattgcagcccctggtcaggccatcctcatgcatgctccatatgttctaatgcctctgtggactgagtacggcttctatttagttcccatgggtttttgtattaaggtgaaatccacacaaaacccgaccactttaaagtgcatgaatcatgaatcagtgccatttagtacattcgagttgttaaccaactaccactgtacctagttccagaataattcataaccttggcagaaaacctgcactgctgagtgagagcctcttgtccttcttccccaggctctggtaaacactgctgctggtctccttggacatttcgtataaatagaaacatttagcaagtgaccttctgtgtctggtgtcttagagttagcataatgactgtttttgcaaaactttgttttattttcagttttgtgtgtgtgtgtgtgaatctgagcgtatgtgtgcaggtacacttggatgcggatacaggaggctgtccgagtgcctggatgggaagttacagatggctgtgagctgtctgctatgggaagaagtgtgtgaaccctgctttggtcatctgcaaaacagcagatgttggtacctgctgcaccagctctctagtcccaccactcagagcattgctaaggtttgtcccattgttcacacaccccgcctgctttcctttccctagtcctcctccctggacatcacagcctgttggtttgtgttccttcaggacatgatacacatgggagttgaattccagatcatatggaaattctgcatgtaacttctgggggatcagccaaactgccttccatggatactctgccattttctattctcccaacaatattcaagaagccaaattctgaaactctttttacattctgatttccttccttccttccttcctccctccctcccttccttccttccttccttcttcctcttcctctttcctttgagatagcccccttgaaactgtgtgaagctgtgctttggatgtaagctatgccctgcccccaccccacctaggcttgctgtgttctaacctctggcctccagccggtggcgatgttttggaaggctgaggaagtggagtcttgccaagagaagtgggccactagggttgggccttggggttttacagcctggccccacaacctgtctgatctgtttcccgattgcagaagcaatctgatcaactgcctcaccctctggcttcctgcctctctcaccatgatggcctggtatcccctaaaactgtgagccagaatcggctctccttcctgtaagttccttcttgtcaggtttggtcacagcagcaggagacgaaactaaaacacacacgcatctcacttcagaatctcctaagcctttcctggaaacattttaaaatgattcttgtgcatttatcctgatttacgtttctaagtacactggaagttcattgaagtgaacccaggtacgtctgcatgcatctgagacacttgtgtcccagaagcagtcggcgtgacagttgagaagtctgtacctgccattctgtaccttaaatcagttgtacgctgtcttggccctcatccttagctcccaccccaccaacctttagcttgggtttggagctgaggaccctgctgcttcacccagacactcgagtgtcctctaagctcaactccattttgtatataatgcccatatgtcttgaggctgacaggccagaacagtgccaggaggagctctgacaatgtccccaatggagctgctgtgtggcctgtacccaagccttcccatcggaactttcactaagtgctaactccttggctaaaaggctttcatgcctttacactaaagtaaaggaaaggcttagatgattttcacactgcattgaagggtgattacaagatatttcgagaggtgggttgaggctttagggtgacaaggaacactttatgagtttttccattataatgacaagagtgtcgcttgcctactaaagcttgctctatgggaacaagttgggactgtgccatgaggggcatttacacatgagtatgaatgaacaaaagcagggaagggtcctgagggaattctgtgtgattgagtccacctggcaaagacccagggcaggttgatagatttcattgatctcctttgccctcacttccgctcattaaagccagggtgtgcttagctttcttagaaactggcacagggcttggaggaaggctaagagggtgaatggattggaagctgcacgggggctggctggggagtgggtgagcaagctgcctgcagccacagcatgctcacagcataggcatggggttgcaggggtgctgcaggttttgagcaatctctgcacttgccttgtggcgtgtgggcagtctcacttctgattggtttccctccctttaggccttggttcacttggttagcttaggacaaagtaaaaacttcacccgtgggcgcagggagctgtctcaatctgccaagtgctgactgtgcaagcatggaggtctcttcaaatcagtggcaccagtctaaaagcctggcatagtggtgagtgcttataattccagcaccagggagtctataggaccaggtatctacctctgatctccatgtgtacatacacacaagtgcaagtgtatctacacacacacctaagtcttcacctgtgaggaccaggctccaacacctgggaagttcatactgtgcctgacaaagggtccaaactgcttaaggtggctatgctgctgaggtatcatggagaggtagtagcaagcaggagagaggtgtgtggtgtgtgtgtgtgtgcatgcatgtgcacatgtgtatatgcaggttcatacatgagagcacttgtgcatgtatgtgtacttgtatctgtctgtgagggtgtggttgtgtgttttcgtgaatgtatgcatatatgtatgcatgtccatatgcgtgtctgggttcatatgtgtttgtgtgtgtgcaagtgtgtatttgcatgcatatatgtgtgtttgtgcacatatgtttatgtgtgtattcacacatctatgtttgtgtgtgctatgcatatatgtataacaggaaagtagaaggaggactatgatgtgggaggaagatttccaaagatcaggagaaccaaagaagggcatgaggatgggaagaaagacatatcttcagactggaatgtgacttagtgatgaaacacttgcctagcatatccttgattcagtccccagcatgtcacaaaaggaggaaaaagaagacaacacaactggaagatgacacaactgactatgacaaactgtcttctctcctacaccaagtagattcccatatacatataaaagcagaggaagtgttgggagggaagaggggacagaaaattggatgagagtggggagaagctatttggaagggtgaggtacgagagtgagacataggcatgaaaatgctataatggagttcaactaacataacttaaaaagtaaggcatggtggtgcatgcttgtaacacagggaggttgaggcaggggagtcaagagtttaaggtcatccctgagtacatagcaagttcaagactggcctgggctacatgaggcccagtctcaaagaatccaaaatagtgatgactaaaatgtttaaagaggaatgttctggagaggattcagagtaggggagagcactggagggaacagcagagggtctgatggaggcaggcccaggccctgcctctcctggtttcataccttcccttccctcagagcccttcagcagtccggcttccatttccaatacaccttcctttgtctaaaaggaaggacgagctgacagacagaggctcatcagtggtgttatttcaagacaaaacccagcctgacctgcaggctttctggtagctgtgcaagtgtgtcctttgaagacctcatctcctactgtaggagtagcagatgctcaaagcagcacacgatggggcctttgtgcaaaacacttacggacaagaagagcaagagagtgtgaggagtggctgactcacagccagagttttgccatgttggcatcaggatagggatagggaaccaggggatctttgctttccacaacaaacactcttggaacaatagattacagaacccaatagggaagcctggctgtgaagacagacagaggctctgtggaccagaggcaggagagctcagcctgcaggtggcatgagaggaagctgggggtggaggtcactgtgtctcagggtgccctgagagggtcatgctcaccagagtctgaatggacaaagcatccttcagatccctataaggcaagtagggccttagtgggggacgtggggcacaactgagatatttgcagtccatacaaaggagctgctagcatcagaggaagcaaatgcctgccagtcctgcccggtggggtttcttgactcttccttcattttaggaaagctccagaatccttggctgtgtagctgccaatgccctgggagagtctcacagtgactccctgtgtctgcctatacctgggccttgaagtctggaatcatgggctgaggctcctgccagggatccaaacagcactgcagattgtccctgggggaggcgccatagggccacggcctcctcaggagcacagagcctgtggctgaggttgactaagccaggagaaaccctgcctgggggactcagacaggccgccttgggaggctgcgctaattgcaacagtaaacggaatggtaattaggctaataaatagtataaataattaagctgccttcaaaggcccttctcagagtgattttgctatatagtctttgagtgagtgaagtcttgaggcatctgagtagatccaccttctctctgctttgacatcagccagtgacctatgccttccgcacctgccttggttacctgctgtttcctcattactgaatcatcatggagattaggtagcatgctgtggtggttagagtaaattgtcaaccttacagaacctagaatcactaaggaagcaagcccccctcccccccccccccgggggccggcctgtgggaatgatcaaaattaggttaattgaggtgacaagacccatcttggccataggtgagaccattcaggttgggggtgtctcagacaaattaaaatggagaagactagcaaaacactagaatttatctccctgctttctgactgcagatacaatataaccaaccatagaaccaacctcctcaagggcctgcggccatacctttcctaccaggatgcactgcaccttcaaactgtgagccaaaacacacaaagcatagtgcccagaatgcagtaagtgctgggttagaaactgccccttgtttctccaaggcctctctctgagtcctcctggcccagctccaatcttatcccacccccaccttttccctgagcgaccctgattttctgtccttttatgctctggccctagaggctccttcctgtcagctacattgctagaacactgtgtgttagcccaagaggaccctgaaggagacctccccttgattcctccctgccaggttgctgaaggtggcttgctgtatccatgactgaagggctcagcactttccaggggaatgtcttcagtcatccaactgccctggggcttgtgacctcccctcctctgaaccccaatgatcctgctgggcctgagatatccaccattcatgtttcacgctgaggccttgaccctccactagtgtaaatgtttaatgaaaggtcccccatccagcctccccccccaccccccgcagcatcctgacatccagtgcaaatgtaccccatgttccggcccaaatctaacaatgggtgctcagtcagtgttagccaccatcacagaccctgagagtcagccaggagaatgagactgggaaggtggggcccaacagggaagatgcttctagtcacacaaggtctcaacctataacactggctttcattttccgttttattcaacatccagacagtaggatctgtgaatctcatggcctttaatacctgttgccaatcaacacctgggagcagggcactttagggtggttctcatttcagggagcttgtaaggacctgaggagaaacaccccaagtttatagtaaccagaagccagctgttctgatattactgacctcctatggtccaatcatattcttgtacatttttcagacctgttgcaggatgtggggtgagcgatgcaagaggtttgtatctggtttagaaggaagaataactctgtcaaaatggcagcttgaagggagatgttcgacctggctctgctgtggttggggacagacatctctctgtattttctcaagggagaggattaagttagagagacagactgtgtaaactgaagagttttgtctacttgctggcttgtgtttgttattgttgttttagcaaagctaagcaaagcagatactccaaagagaaactgcaaagggccgccttgaagggaacaagctgcccagtgggttctgcgttgtgcatttgaaagaaacttctataactctggatctggtaggcaacacattcatgggctagggtaagcaagccatttcactcccaaatcatggtagaccagatctcccttttaggtcatttcttcccatgatcctataaaaaaaaagtcacaagggtacagaagtcaaaaccacaatgtaagtgatgtatattataaagccagagtctttaacagcacacacacacacacacacacacacacacacacacacaccattcattagcacatatctggaaattgggtgagcgctctaatttctgatctagtggcaacaacctaactgtgaccccaaaggggcattcagaccatgaagaaatatagctgcccaacatgtcaatatccttggctatcttcaactccttgcctacccagtgtttgccctttaaagggatcgtctcttcttgactagataggaaggtcaaggaaggaactagtctgccctctaagccctgctgtaggtagttatgcagcaccttccgttagagttccctctgggcagcttacaaacctggaagtagaagaagaaaacaaaattcctcctgggttcagctctctaacacacacccctccccctcaaaccgggttccaccctaagcagtccattgttcttggagatgtctcatccgatgctccttttctcggcttggttcttggtgcccctgattcctccctcctggacatctcccacccctccatctctctttctcctcccacctctcatgtctctctgtctgtctgtctgtctgtctgtctgtctgtctgtcactgtccttgcatgcactgctgctgtgacttacctgaatctattttgttgaggccattctccctcacagactctccaaagctctcgctgttaaaatagaattccaaaccttttgttcaaggcccttgatggcctggcctcacattcttttccagtctcaccttggtgacttcaccatgccaagggtgtgtagccctctgggtccagattactgccatcttccttgagatgcctttgtctctttcaccattcatcagcctcaagttctaggctgaagccctcctcctctgatcacaccgatggcgaggagctgttttttgggcctttggtagtgcacagccccaaacactggaccttttaagaccacactcagggaactggagagacaggaacacttgctggcctttcagacgacctgagttcagttcccactactttcatcaggtggctcacactaactgcctatggctgcagatccagatgctagccttcccaggcacctgtgagtggcacacactcacacagacatatgcacataaataaaaataaccctcacttttaaaaggccatattcggcaggctgggggagtagctcagttgtaatgggtttggtcacacacatgaggctgcgtgggttccgtcctcagaactgtccaaaatgaaaggctgctgctcacctttctatacagatgtacccggggcagccaatacctttcatcttgtatatcagtccttacccattgatacagcacgaggatgcctgagctgagcaagaacgaaccctctgatagattagctatgtctgccatgagttcagtctcaggaatttgatggattagctgtgtctgccatgagttcagtctcaggagttggggcataagcacttccttgctcctgagtatggagtctctcatccaacccctcagtaaactctctgggagtagaacatcatgtttgctgcagaggctgggtgagtacacaggaaatggatgtgggatgacttatcagatcctaacccaacgaggagaatctaggcttaagccccacatctaaggagaatgcacacctgttcgctagcacactacctccccggctgtactcatatctccagggtagagactgctgtgccttccacatgactgagcacagagcacagctgttcccggagacctgcacctctctgcactttttccaccctgtgtcacccttgatggatgatttatatgcttgccaggctcagcaaatgtacttcctcctctaatgtggagaaaagcttcggggatgcggatgtgaacagcaggcgttgttagaagggtaatcttgagtgcaccccttatttcatgggtaaacacaatcctgttccagtagcttatgattttcaataagttggcatcataacaggggtgaaactgttgtcctggcccatggcttcatcaactatgcaaggatcatagaatcaacaatttctctggctgctctggaagaagagtctagattccgtgtctagaaaagtgagcagggcccatgtaataaaagccaggcaaggttacacttgtaacccaatgagtggtgaggagccagacacaggcttgctggccagcccgggctacttggagagtcctaggacagtgagagactctgtctcagaagagctaagtagacgtgtcacctaagaaacaactaaggtatgtcctctgacctccacatgcctgcacacacatgggtatttgagtgaccacacaaacacaccaaacaatcatggccaccacagataagaaatggaagtaaaagtgtctaaggggttaaactggatcagaggctgtatgaagcccgtatactgctgtcttacagaagccactgataggctgagctgagctcctggcccttagtctctatttaacagagagactttcggcccctgcagatggagggaccagtgctgagggaggggctcacacggaaactttggaggtcaaaggctgatggagagacagctctggggtcgaaagtcactgaagcacacaaagaatgtcaaactcagatttgaacaagagtatagtaaagtgggcaatgttcaaacatccagaccattcattcaaaaccaacagacacctcactggtctggagaagaggcccacaggacacggtgtccaggtaggcaacaccaaagggaaagtcaagaagccttggggacatccatcctcaactgtttccgtagatatccagacctgggagccacacatgttctgagcagaactggctttggattctaatcctgtctgagctgcccacccactttgaggccttgaacaagcttcagtttttatgataccccattttctcctggtagagaaaagagctatgctgatttgatttttacttggtttttaaattttatttaatttttatatgtgagtgtttcacctgtctaccactttcatgcagttggtggaggtcagaagagggtgtcggatctcctagaactagagttactaatggtaccaccatgtgggtgctgagaagtgagcccagatcctctaagagtggcaagtccatgctcagctctgttctatctcttttctgaatggctgggtctagcccacctcatcctctggtgccttactgtcaatcacctacagactcactgctctttggatgaaaatgttcagccactgctttgtcccagaatgctcctttctaatgtctctgcctgtcaagctgccgattatgctttggggtgctcagtccaaagtcagggtctctgagcatcttcttgcatggctcccctctctacactgccttctctggatgctgtgtgattcaagccacaaaatctgtgcgattccagccacccattctagctgggtttttattaggctcagcatagcagtttcccttataacatctgtaactatgtatcaatctcacataatttcctctacagagacttagaaagctcgggaatttgcatgggcagtgtagggaggacacagacagacatggggtgggaaaggctgcaagcctgagtttaaatgagagaagcagagatcttcctcagactgggaaaaaaaatctgctttcgaattgcttagccactgacctggggggtggagggtgaggggtagagggggtgggcagaggatgctgttacaaagcacgtagtcttctctggccaaattaagttccaagaggagtaaggccattctgactacagatttagcctgtaggaggtcagcttccactggggacagtgatctccctcagctagctggcttaacttaatagacccacacacctctctcccctccgcatgcgtgcagaccgtgtgtgagggtaaagaccagaggctgccatggcttcgttcacagaacatgcccttgatggtgaatgatgtctgaccagatgaatgagtgaaggtaccgcctagaaacacagagatggaacgttctctcctcaagcctcttcccacatctttccttacaccttcccacagccttgggaaatccactgccagcaaagaagcacaggctagcctacagactctatagtcacatgcctggatccaaaccctaacttggtatctcattaatcacatgacttcagacttactcctctgtgcctctgtttcctcttctgaaaagcaggcagaatatagacactttcctcatgaggtagtaagctttaaacacatccttctggtgcaatatatagacctatgaatgacatctgattgatacacagaattatttatttatttattgatttatttattcattcatgtttgcttgtttctttaattattgtctttttgagacagggttttttagtataacagccctggctgtcctggaattcactttgtagaccaggctggcttcaaattcatagagatccacctgcctctgtctcctgagtgctaggatcaaagtcgtgagccatacaattttcacacacacacaagtgtgtgtgtgtgtgtatatatatatatgtgtgtgtgtgtgtctagagtctagactgcccttagacatactatatagccaaggatatagccttgaactcctgatcctcctatctccacctcccaagtgttaggatcacaagtgtgtgccatctctggtttatggagtgttgagggttgaacccggggctttgtaaatattagacaaaactctacctactgagccacatccccagtcctcaaaactagcctttttaggtttaaaaataacctccaagggaaaacagagtaggaagaggtgagtcccgatagaaggggatttgggacacaggcttggaatacacaggagaggaggtggtgcaggctgcaggattgccatggaaacgctgcttggcgccaggaccggaagaccagctgtttctttaaaatgaagctcagctcagcagtttggaatacacacctttttttttactgggaccctgtggactcgcccctgagcagccaagctgatctaccatacttgtgtctctggggtctctgtcaacctgggatgggcccaagaatgatgcaggtaccagtcacaccagtagcaccacgggaggcttcttagacatgcagaatccacctgaggcccgggcctggaatctgggttgtctggctctctctgtgaatgatgtctgccagctagctcctccaatatgcctgctccccatcccccacccttggacggaaggctgtgtggggcagtagaggacatcaggataaaattctagagtttagcctagattgaaaggaaacccccactgttctccgtggtgcggaggaagctgtttgttatagagcacacagttttccatggcaaaattaggttccaaagaaagtcaggccaatctgaactgcaaacttagcctgtagaaggtagtcttcccctggggagatggtgattatatgtgtgcacttttgtgtattcacacgtgcatgtgcacgtgtgtgtgtgtgtgtgtgtgtgtgtgtgtgtgtgtgtgtgtgtgtgtgtgtgtgtgtgtgtaactgtgtacatgtgaatgtggaggccagagatcaaccttgggtgcctcccttcttatttttcagtcaaggcttctctgagtttggagtccactgatgtaaataaaccatctagctactgagctcagagaatctgtgtctccaccccctggatgccagggtcaccagtgtgtgccatcataccctgctatttatgtgggcactgggaatctgaactcaggttctcatgcttgcgtactaaccctttcctgtctaagccatctctccagctccctgaaacatccgttactttaagaaggatgtcccagcacaaaacatcaaattaataaccagggtcaaagaaacctcaggtcagctgagtcttcacagaccgctagctctgtaattaacttctgctttcccaacataaacctcacttgggagggcatctgtctcttccctcctggagccttcacgctcaggtgaggcctggcctgaggtgaggctccatcaatatttgctcattagatgaagtccaggtcctcctgccctgcccccaagccatctgtcagcctgcaagagctgatgtagacagagcccaaggaagcctgagccaggaaggtggggtgaggctgggaggaagggcacaaggcgagcagcagcctccacttagccccagagtgactgctggggctgcaggagtcaccttcatcccccaagttctaaagacttggggaaaacaaagaaaaggaaaaaccgaaattcagttaggctccctgcacagaggcaagttctccccagagctattggcttttcacaagctttttccaaaataaaataaaataagataaaataaaataaaataaattatttttttatagatgttgtttgcagaaggatcttactatataggcctggttggctttcaacttgtgatcctcctgcctctacctcctgagtgctagagttacaggtgtgaatcactatgccacctttatgtatgtatgtgtgtatgtatgtatatatgtatgtatgtgttatatatgtgtatatgtttgtgtgtatatatatatatatgtgtgtgtttgtatatgtatgtatatgaatatgtatgttttatatgtgtatataggtgtgtctatgtatgtgtgcttatatatgtatgcatatatgtgtgttatatgtatgtacatgtatgtgaatacatacatgcatgtaacacatctgtgtgttgtatgtatatatatgtatgcatatgcttgtgtgtttataaatgtttgtgtatgtatgtatatgtgtattatattgtgtgcatgtgtgcctgtattggggtttttgaaacagtttctcagtacatagccctgcctgcctggcctggaactcattaatgtagaccaagctgacctcaaactcatgccactcttcccagatctgcctcccaacagtgattacaggcacatagggaacgctcatgcctgaccaacacatcaggcttactatgctctgttgtactaaatacacatggcatgaaatctgcttagtgtggctgttaaataagctcacaatgctgggtagtgacccagaatctccacagcatgtggattttgtaagactgcaactctgtcccttttcaacagtacctccctccctccccactatgcctcgataccacccttgtgcatcctacctatggtgtctgactacccaaggtctctcaggtttgccctgtagccagcatcttccagttgcagtgttgtcctctaggtttgcgcacatggcagcgtgtcaggactcctctcttaaggatgaatagcatttcaatgcctgtactgccaatttctttctttttctctcctctgtctctctgttcctcaggcaggaacctggaggcaggaactgaagcggagaccatggaggaacactgcttactggcttgttccccatggtttgctcatcttgctttcttagatagcccagaactacctgctcaggggtgggaccacccacagtggtctggccactcccacatctatcattaatcaagaaaatttccttacacttgcctacagaccagtcttatgaaggcagtttctttttgaagttccctctgcccagatgacccagcttgtgtcaagcacagagaaactacccagcgtatcttgcttaggtggtaattgtgtttcctctttggagaatgaccacagaagtcctttgcctgcttttgggtggagtagtttggatttttttaactctgacttttccccatgggcttttagtgctctgcactccctggttggttttgactggctgattcagtcctgcagcaggaggcaggctggatgtgaccgggcatgtctcaggcactgtcgtacactcctcccccccccagccccccgccccgactgaaccttgtatctgcagagttggccgtgctgcagggaatcagaggctaatagtctaggattcagataaggctgggaagccaaggggctcctctgagggttctgttctgaacacatgtctcttctgcttggctctgatagacagacattcctgattgtagtccctctgaacacctttcctgatgcattggtacctactgtctcagatccctgtcctgggctacagggacagggagaccagaagtcctggccacttctccacctccacttgggtacaagtgtgcctgcagggcctgccccttaacatcctctttctcccagacattgttattccccaaacccctctcccaagctctctctgccctcagcctcttttctatgacttgagtagtgaggtttcagttatttgacatgcaatgaaaagatgacattttttcacatttatgtatgtatgtatgtatgtaggttggtaggtaggtaggaagcacacatgttgtccatggtgtatgtatggtcagaagactgcccacaggagtcagttcttctttccatcatgtaggttctgagtattgaactcaggttgtcagacttggcagaaacatccttacccagtgaaccaactcaatgaccccgaaacagggttctgaaatgagaaacaagatgtgtgactggtgcttttgtgccttgaggatgtgagttactgaccgcagctctgctcccagagcttggaccattaatcattcttgcaaaaggccactgctgtttgccctcaggataaggatcgataccaagtgtggaagccatagactgggcatacagaagattgcagggatatgaagtcctgcccaaggctgagtggacagaggctgatgaaccctgtctgcggtgctgggcatccgtttggcatgctttgggttacaaggcagagctccaacagtaagaatatcatcactgtgagcattcaaggtcccagggtggatggacctggtggccaaatgatatttcttacacgcgttcacgaccggccaggaagaacacaacaaaccagaatcttctgcggcaaaactttattgcttacatcttcaggagccagagagcaagagagcaagagctctattgcttacatcttcaggagcaagaagcaagagagcaagagctctattgcttacatctttaggagccagagcgcaagagcgctagagtgcaagagccagagcaagagagagaatggcgaaaccccgtcccctttaaggagaattattctccgcctaggacgtattactccctgattggctgcagcccatcggccgagttgtcgtcacggggaaggcagagcacatggggtggaaaactacccttggcacatgcgcagattatttgtttaccacttagaacacaggatgtcagcgccatcttgtaacggcgaatgtgagggcggctccccacaatattaatatcagagaaacagactctgtgtccctctacccgcagtgcatggtgttggctttgtcctaactctgactcatcttgcagtcacaagacaggggcatgtggtttctgcctagtggggacacattctgtctggagaacatgcctaacatagcatctggactggcttctctaggaatgaacaggaaaatctaccaaagtaatgccatggatagagcgagcaatcacagcctgggggtgaagatggccccagacaaccaggtgacagtgtgtgggaaagcagacagaagggagtcaggatgtgtctttctgcttcaggataggcaggaaagcatcccctggctctgggggaggtccccatggagaactccatccattccaggagccagtgatgtgtccccccaccaaaaccacaagttcagccaaccaagactcaaacccaagagccaaatccagccctctatcaaacgattaaggtggaataaaatcaaatgtagacaagggtgtgctcccaaggctactcagacagcctcacttctggtcccaatatgtggcaggcaagctgactctgagtcaagggtggctgagacccagcagtatctaggaactccttggggccgaggaacaaggtagagcacctgaggcaggaccaggtgcttcaattgccatttggtccactagcaatggccaaatgacagtcgatgccaaccgataaatggtatgaagacacatcagagtctctaggggctcagtatggccccaagtgttcctgagtctcattttccccactgcgaaatagtaaaacagatttaacccacacttaggtgagatgcaggacatggctctggactactacgtgtcagggacatggtccttctgccttctgcacacctccctccttcaaggtcaaagccaaacctgacttccagactctctaattgcctgtggatcacatgcagtcctgcccttgacctttggtccactgacgctctatctcctaaacagttagatgggctagttcttcccttctgttgtctgggacatcttcccaaaggacaatgtcacctgtctttgcaacctgaagcaacagctcagaggtgtcatttaagccaacagcccagagaagcaaaatgacccagccaaagtgccccagttctggtgctagggtcaggagtggggctagacctaggtgctgtgctcatgggtcacaccaccaacagctaaaacattactgggggaggtcagtactgtgagccaaagaccagttgtggtgaggagaggttggaatagtccagatgggtgatgggtgggtcagagatggcctttggggccttagaaaggaggtggacaggtttgggaagtgccagaggccagtgggtcaggcaaggcaggctgttacaggagtctggattttgtggtagatgtggtggggaccactggcccagctcagccattggaaagggacataaagaacagagaataagagacagacagacaggcagacagacagatagacaagagacagagagactgacagagagacagagaggaaggccttaaaggggggtgcatagaaatatgactttacccagatatggttgaggggagggtgaataatggattatggcccactccatttacacatatactcttagaagtgacattttcccttcccaggctagttcttggggcagactggaagcagagctcccaccctccctccttcaggaagtcatgcccacttctccttcttggggtgaacatggttcctaccacctccttctgttcgcaccaactaaccagttctattcccatccatagttcaacattaaaaagtccacggagcctgtccagccccgacctctccttaagttcccggacatctatggtccccggccagccgtgacggccccagaagtcatcaactacgcagactacaccttggagaccacagaggagtctgctgcacctgccagcccccaggcccagagtgacagtcgcctcaagaggcaggtcacagaggagctgtccatccgtcctcagaacggtagggttccctgcgcctggtgggccgcatgaggtcagggagggtcttgcctgtatcttcggatacagtgtgtgaccccctgaagctgtctagagccccggtgtggtaggctccgatgtttggcatccagctttcctgtgagaaacgaagagtctgtttcagatcctactgtgcaattacataagggataaaaaaaaatcaaggttaaaaacagacttctgggttgtgtctaattctctgcctttttatatgcttgctgtgtggcatagacatacactaagcctctctgggacttcatcttcatcgatggagtagaaccatattatcacctacctgtgaaagtcactgttaaatgtatatcaataatgactaaaataaatgcttgaaccagggcttagtacaaagcatggaaccatatggctattgtcactgtccctattcttcctatgagcaccaggcttcggaaggcagtactcacaggtgggcagcatggtgcagccagggctatagcaggggagctgagatgcaggccttaactcacaggaatacagaagcttttaagagagacaatcctaagagtaagaaggtagccagtcctgtggtccagatttgctgcatgtggtagtgaggaagcagcagctttgacagtgacctgggttcatgtgtattcctgttggccagtggacagatggcctaattcagggttcagcagtgatccctggcctggcttttcagaaaccacttggatctgtgctgcaagtgggccagtcctcttggctgtcagcagtcaggcttccctgcccacatttcacatagattcaaaatcgaagacgggagaattaagtcaggcaagattgatgggtgtgagtactcatggggacgatccccactgccagagcctctctcaggagccctggattactcaatgcttggatggatccaggatggaactcgccatggctccagagaatccagcacacagagactccttgtcttcatttccttcccattgcaaagggcagcatcctggttctgacccacagacagctaccagcattggccaattcagccagcatcccatgatgcactgagtgtttttgactccctcccacccccagctccactcctcccctcactcaaggataacacagctgcagagggagctttgcagatgctgctcctgggcagaagcccagccaggggaggcaatgccggatggatggggatttgcatcctcagtctgaggctgcttgagctccaagacctctaggtaccaataagccccttgttacccagtccactgcggcatcctcaggatggctctgggagccaagagcatcctgcacatatacgtgtcttgatctcaccacagtcaatcttctccttagaggatactttgtagcaagagtctaataatgagtccttggggacattaatggccccctagagtcctgccctctgattcattctgaggagcagcagctcagttctggttgcattaagtgtcatctgcggtatccactgtggcttcttaattctcctttcaggcttgactcacgagaatctttcacacattaggctccagctcgagtgaggggtgaaaccagcaacattggtagttttattggtggttttaggagcttcttgattaaagataaggttctccgttcactcagcaaatgttgaatggacataaaatcaaaatcaaagccaccatccttgccagtggcatcaactctgggctcggttttgctgttgtctccacctgttcttttctgtgagatttgcccataattctaccccctaccagaccatgtgaccacgtgacagctttccttgtggaaggcacactatagaccaggccagagcggagagcatcatctataaaaaacacacaactactatgtggcaacttaagggcaatatcagaacctacatattgaccactgaaccataacggtcccttaaggtgcaattccatagccccctttagggacagtttttgggcttgggtggcaaagatagcatattatgatcagcatgatagccatggtcaccctatctgtctcccaggtgtagttgaggatgtctgtgtcatggagacctggaacccagagaaggctgccagctggaaccaggcccccaaactccacttccgcctggactatgaccagaagaaggctgagttatttgtgacaagcctggaaggtactgctttgtgtgattggcaggccctgcaggtgggatggaagggtctgcagctagaaagagcaagggttagcgctctggcagtctctcatgcacagtgctcagacacagagattcttcccccctccctcctatagccgtgcacaccaggaattcctagctgacagacatctttcttccgcatggtgactcaaggaccagtcccttccacctgtagttctctacacttctcagacctcctgctaggtgcttctagctgataagatgagaattagaagaggtcacagccatttcataatagccttaatggatggagcgtgagtcacttcttctcatatccattggttggaaccttctcacttggccacactttgttgcagggcattttaggaaaggtgacctggcaggctgcctaccaggatgggagataagtgatggacaagcagctagtggcctttgccagcaatgcctttgacattgaacagggctctgtgccagacaaagacagtctttcaaaggtcagaaacatttctgagaacttatcctggattcgggtaatctgtctgataggatattctggggagtactcctctgacagtactccccgccaccaacaaagttcagacttctacaaagaaacccgagctggagacagtggtgtgtcagctgtgctgtttctcttcctaatgacttctgtttctgtgttaaccaactttccatcactgtggcaaaatacctgaggagggaagattggttctggcccacagttccagaagtttccctcagtctacagggggccctgttgaccttgggtctgtggtgagcagaacaccatggcagagagcaaagccactcaccttacagtgacaaggaagcagggggtggccagagttccatgatgctcttcaagaatatgcccagtgactggtttccttcccctgggtcccacctccctagagcaccgtcagccagggccaagcctccagcctgctgcctttgcaggacgtgtgaaggtccaaaccctcattagtgacttatctatctgctttgataaaatatcctgacaaaagcaatttaaagggaaaggattcattctggcccacagttggagaatacacgtccattgtgtaccatggctgccagggattgaggcagccggggattgaggcagccggggactgaggcagccgaccacaatgtctacagaccagaaacacagagtgatgaactctgaggctcagttactttttcagcttaggctctcagaaggcaccattggtgggtctttgggatctaaaagctccctcatgaccacgcccacaggttggtcctctagatgattctagatcttatcaagttgacaaagctaactgtcacttgtaccacatcagtcttgtattgaacttgaccttggagatggaaaccagggcttcaagcctgctgagtaagttccccacccctgagcttcacccccctccccccacagcccctagtttccttatctgagtgagaatttttccctttgttctgttgcttaaaatgtttaagcactcccatgtacacctctggtcctcaggtaactacaattttatagattaggaaacagttctagcctctcctcccagggctccaggttactctgataatgagtgatggagccaggaacaaacagccacttgaagctcagaaggaagcaccaggtcctcaggcctcattgatggagaatgggctcattcaacctctctctctctctctctctctctctctctctctctctctctctctttctcatatcagctcccacagtgaagggatcatcatcagagtcttaggagggtatgcaggacacatccacgccatgacactttagaagcacactggtcagcagggatggacacagtgacacattagtgacacagagcagggcgctgagtgggagacccaggtccctttcctggtgaggttaaagaccgaagcccatcagagtggccaaatgctatagcttagatcctaactgtccccagaagtgcatgcagctaacacttgctccccaatccactgatctgtttctctcacactcatttgttccctggctatgatgtaattgttctgctgggtcatgtgattccaccatgacatgctgcctaacaaagcaatgtaaccgatggtcccatgggctagcatttctgaaactatgaaaccaagtaaacctttttactctctaagctggtactctaaggtgtttgttacagtgtcagaaaactgactaacacaatccacagtgggatgcatccaaaccatcaaggtcgagagtcggaagcaacattcatgaggcagcagccgggtgactcagatcgcaagtggctgtgtggtaaatatttaaaatacagaaatccatgagtcacacacagcgttggtagctatcctaaccaaagctcgtcagggaccttggcaccaatggggacgtctctgaatcttgaggtcggaaggaacctggaaagtgcctcctcttatccttactatccaaggaaccctcccccgcccagttccatgatgtcccaatttgaaatgcttcttccccacaagactgttacatagtgatggaatgctgtggcaaccccgtggtcctgcagacaccccaggtcacctgtgttctatagccccatctggagacctatctccccaaagcccgggaagtcccaggtctgtcttgttttgttcctgcctgcagctgtcaccagtgaccatgaaggaggctgtgactgttacatccaaggcagcgtggctgtcaagaccggctctgtggaggcacagacagctctgaagaagcggcagctgcacacaacctgggaggagggcctggccctgcccctgggtgaggaagagctccccacagctaccctgacactcaccctgcgcacctgtgaccgcttctcccgccatagtgtgattggggaactccgcctgggcctggatggagcatctgtacccctgggggcagcacagtggggtgagctgaagaccacagcaaaggtagggagctttcagaccagaggcctagagctggctggtagagcttcagaggagaaggttgagatgatgaaacaagactctagagacactctcagctcagagcaaaggcagcttgggctcccggtcagaggccgtaggtagcagattcgtagcccagaacttggggttcctggcacctgtttgaggacagaccagccaccaggggcagcatcatggtgagggtggcatcagctttcatgctatgacagcctccctcatctaaatacagctttgattcttatgttcctctccagctagccctgcagaggtgagcagaggaaggaagcacagagcccctctgatctcagagcatgcagacctggggacaaactgatacagatagctgctgacagctgatctgagacaggatttagatcctgggatgtctaagaagagcctgtatgtgctctgatggaatgttctggaaggtctgttaggaaggggtgctaatactgaatgagctgtctgggctctgtgaagagcagagtacaatcagtggtctgcacagatgctggtctgggatagtgtccactgtggaggctgctgagaccttgggctccttggggaatcaagccatgtcccctaccaaccaggacaataatggcgtcaaggcaggtcagggatggtgtgtcagtcagaatcaatccacgagcctgccactgagcaaccttcagggaacttctgataatgatagcttgtctgtcagtttgctgttttccatcactaagatgtgtccaaccttttgacactgggatatgatgttgtcattcgcctgtcatgatttaccatcaagaaccgtgtatatgtatataaatatcacaaaacaatctcaaaatgctttacgtgagtttatggttttgcattgggtggcatttatagaaatccttatgtcacgaggcttcctacaacccatgggtcacaggctggaccagtctggaccagcttgaaagacccacaaagttgcaagcctttcccattacctttctggataaagcaagttgccaatctgcccattgggacactatttctgtgtgccccatctaagtggcttggcttaggaagtcatctatctgaatagtagtaatagtatcagcagtagtagtagtagtcatggttgtcaccaccaccaccaccaccaccatcatcatcatcacttccaaaccagacaggtaagggcaacactgttaccaccctctctgcacacataggggaactgaggctgacctgattagaaatccacacagcatcagcagaccagcggggcagatagctcagcctcgacggcatgtcctttctcatcctgggtgctttttcaaactgccctgcacatgccagaggaggtgatggacaggcgtcttttctattcaagcctggactgtaggaggcagagcagattcctctcctctccggcttctctttggctcatcgtttctcctgagccctgtttctctgtcttttctccgcttggaaaattgagaggaaaaaccacagccaccctttgagacctgatgtctcaaagcccactttctaatgactatgtggtatgtggagtcacacacagggtccctggtgggagagaagacatgtgggcttcttaaactaataagcttatcctctctggagcttagaaggtccccctaccaggcttgggtgcttttggaatgaccccagaagggctgaaatccacctcactgagacagaatcctgagtatcttgcctgttgctgtctatcccctggaagacaataatcgctcattcctaagcacctcgcccaacccctgctgtgtcccaggcagtaagccacagctgcagctggagccctgtcctcaggctcatccatcttactgtcatcacttgctgcagctgtcactactccagagctagccaggagcatctctttccctccgggtagtggtgtgcaggagccattcagctcctggccaggtcaggaaccccacccagatgcagactgagagctgatttaaagctggtaagagagtctgcagtctctgcaaaccagatgtttttgtttagttttgttcctttttgggcttgaatgggttaacagaggcggcagcaatgccccaattcctgccggaagacatttagccaaaagtggcatgtgcgtcatttgggacaacagagcaccccactctgagggcagcctggagtgattcactgagcatctaagagaaaaggcggtagcgtgagacaggaagagggagggggggaagcctcgttttttttttttttttcctttgtggtgctttgagactagggccaggtgtggctgcagttctcttgtgtgatgacatccacatggctggtcctggttttcactctcacgtgcgtcaagagtgcagacctgctgaggggtggagggcagagggctcaggcctggtcatttttaacagtggcccaggacagctgtgtcactctgataggtgaccttgacggctctgctgctcccaggctatgtgtttgtcacctatccccagacctcactgcctccactgtgacatgagaacaagaggacattcacctaggaagctggagcagtgactgggacttagagcagattccacgggagtctcagatttgctgtgtcatagcttcagatttgctgtgtcatagctgctgacccaggaggtagctcccacctggttctcccaaggagaatgagaacttcagttcccttcccaaggtcacggccaagattaagagagatgtctgcaaaatttctggcaaacatgtattttgtatccagtgcatgcccagtgccagggctgtggaatgaacctgcagtctgcggggacaggcaacacaattgggtggagcagagtgttcgtgtttaatagaccatggctgtctgctctcttgtcacaccaagagtccccggcactcccagatcaatttgtcatgtgactagctatctatatctaattaaacttctactgaaatctcaaggccaaggccttcctctgggcatctcaacagaccgggatagaccacaagctgcctcaagggtccaattagcatggacaggaatggaggcagagcaggaaagcttgtttccccactgcttaagaaagctgtctgccttcctgtcctgaagtagccctgagatggcagaggcaggataattgtgggcacaaaggtgtgggtgaggttatctcacttctctataggggtattgctactgctttgggggttcagttcccatcatgaggtaatggcctgcaggttccccaattcttaaaattagaaacagaagaggagaaaaattagaggagcagaagggaagcaattagggtagagacctggatcctccctcaagggcataggatagtttctaaaggatcccctgggaagaatgagctgttggggtcatggtagagacatttgtcctggatgacaggcatgctctgaggcagagggtgtgctcagagcacacagcagggctccactatccacagctgggctcctgccagtttgactgaaggaggtaaagggctctgtgaccacttaccagtgacctcagtgtttgggtaggggatgggctccctgtgtcctctcactgagcccgaaaaaaaaggacaaaatctggggcctaaaagctgtgccacaggtcagggagggcttcattcaaaagacttggcaacagctcacactacctgaaggaagttgatggggggcactgtnnnnnnnnnnnnnnnnnnnnnnnnnnnnnnnnnnnnnnnnnnnnnnnnnnnnnnnnnnnnnnnnnnnnnnnnnnnnnnnnnnnnnnnnnnnnnnnnnnnnnnnnnnnnnnnnnnnnnnnnnnnnnnnnnnnnnnnnnnnnnnnnnnnnnnnnnnnnnnnnnnnnnnnnnnnnnnnnnnnnnnnggcttggggtgctgggggtggggcttgagggcactgggagtggggcttgggggcgcttgggggtggggcttgggagcgctgggggtggacagagacagagtgtctcaagcctattctgactatgacatgccactcagctgttcttgatgcccagccttgtgctgatgttgctggctcctgttggtaaatccagtccctcttaagcattaggacatgccacttcattggtgatactagcctgcaaagctggagttgtctcttcaaacaaagacatggacaacttgggtgggcctaaagaaacggctcagtaccgggcgttgggaggcagaggcaggcggatttctgagttcggggccagcctggtctacagagcgagctccaggacagccaggactacacagagaaaccctgtcgcaaaaaacaaaacaaaacaaaacaaaaacaaacaaacaaacaaaaaaacaaaaataaaaaaaagaaaaaaaagaaaagaaaagaaatggctcagtgatggagagctccaaccactccgaaagaggacacatgtgccagcatacatgtttggtgactaacagccacctgtaagtcctgtttcaagggatctgatgtcacctggtctctgagggcacctgcattcacacatgcacaccccagcacacaaatacacataatttaaaataaagaaaaacaaagggagaaaagcaataaccctaccccccccaggcgcctggtgggtccatgatatgactctcaaactgggtttcctaggaccctagacatctaccaaggtatgtcctgagtctaggcaaagggtgcaaaaggaaagagtccccctgctttctgccctcaatgtagcatgagaggggactattttctgcttataagttggatttagagagagaatgtgtgccagggcatggcggctcatgcctaatcttagcacctaagaggcagaggcaggtgaatcctttacatttgaggccagcctgatctacataatgagttctggtccagctagggctacatagtgagaacctgtttcaaataaatacacatagagtgatgacatatggtagaccaagttctcctgttgacatgcatgtcagcctcctcctctgggccctgctgccttgtacagtggtaaataaacgaaccttcggtgagtgaaccctgggatgtcaacggggtatgagggcagtgtgactctagccttggcttcagttgatggatcagaaggcaagcacaaatgcaatctctacctttctgtgttcaggagccatctgcaggggccggggaggtccttctgtcaatcagctacctcccagctgccaatcgcctcctggtggtgctgattaaagctaagaacctccactccaaccaatccaaggagctgctgggcaagggtaagtgagggtgcaaggagacaggcaggatgtcttgtctgggatacaagcagaaggcagtggtccctggtgtaaatggagatgggtgaaccgggatgtgataggagtcccatagtgaactcaccctcagtgtctgttgctagttctgatggacacactcgtgtctttaagttctctcacctctctgctagtgatttcacaccttccccctctcttctccattccaagccttggccaaacgccccccctcccatatatacctgctgaactcggctcacagcaggtgatgtgtggctatgaaggtaaaggctgaggtttaaggaatctgtgatatagatgcccacataaacctattcataaaaggcttaagggtgccttctgatacctgggcacaggtccctagttgtgaggacggagcaagatctcctagaaaagcagaaaagcagcaaggataggttgggacctacctacacagggaacggactgctcactgcaagatatcaataatacagaaatcatctttatgtattaaagttaaaaaatacaggttcacctgtgcattcctaacaagtcttgggtaaatgaaatcagaagggctggtgttgctatagtcctgagccacaggtcagaggctgatgcctggcttcatcccttccagtcaattctgtcttgctttttttttttttttttttttttaatagctcccatcaggaccattacagaagagcactttgtgtctgaaatatctctgtagaaataacaaactaaccacccaggggcgataacgatagcaataaatacaaagtaacaattattctcacattagcttgggcaaccttgactaatgaaaacaaacggtcctaaactgtggaagcttgcctgctgacttgtgaatttcctggggacctgaggccagggagcctgcctccaccctctctatagtaaatccaggtcctcaggtaaaacttaggaaagagacgtatgaacaaaactcagccagccaggaccatcttaacgataaacacataggcttgactggacaatggagaagctaaaggtggagagagcttttgtctggtctgatttgatagcaaactagaggacatttaagcccttgcccctgacttggtttgtcaagtcacttagaaagggctatggtcaaagtggttccccagaggccatctgacatgctcaggtctgagccacccactgacctcatatgttctgtgacaggctaatgtaatctctaacgtgaaaatctaataaatgccaacttctggaatctcctgaccactagtggagaactctactccatgaacacttggttttatgttgtataaaagtatctttaggctgggtgtgtaagaggcacacgaaagcataggggtgcaggcctggaatcccagcttctgtgaaggcaggaagaactcaagaccagggttgcctgggctgcagaggaagtttgtgaccaactgtagtgacttggtataaccctgtcaccaaagaaaaagagaaaagaagactggagatttggctcagggctagaatgcttgcttagtatatgtaaagtccgaggttcaaggcaaaaatgaatattaaatgaatgttatgcttacacttgagacccaattccaatttgcataatatatgcaaatatcccctagtctgtaaaacacaccaaatctgaaatgtttatggttccaaaccttacagagataggtattcatcctgtatggccagtcttccacattctaatgcaagggttagacacgcatctttgtctgttttgctatctctagaccggttcctgacatctggtagatacttaatactgttgagagaatgcacggtccagtggagatgtaggaaaccccaagaagaagcagctcacttgctcccctacaactttcttttctctgtacccctccctagatgtgtctgtcaaggtgaccttgaaacaccaggctcagaagctgaagaagaaacagacaaaacgggccaagcacaagatcaaccccgtgtggaacgagatgatcatgtttgagctaccggatgacttgctgcgggcatccagtgtggagctggaggtgctgggccagggcgaggaggggccgagctgcgagctgggccactgcagcctaggcctgcatgcctcgggctctgagcgcagccactgggaggagatgctaaaaaacccacgccggcagatcgccatgtggcaccaactgcacctgtagtcggccacctgccaccggccactgaccgtctttcttggacacagtcatcttccaggctcagctgtcagtcatccctcgtgctctgtccacatgcctatacccaaagacagatgcagacgtgttggctgaggccaagacctcattcctctcttactgtattcccaatactaaaaagtgagcggtggcgccaggacagtgagtgggactggcactcagaagactgtatcatgctcatctgtgttatggaaaaagatgtgtgccaggtaccctcagtcggcagcccctgctcacattgagctgaagcagtggttcttaacctgtgtatcacaaccctctatctccaaaaaatatttacattatgattcataacagtagcaaaattacagttacaaagtagcaatgagaacaattctgtggttggagatcaccaaaacacaagaaactttcttatagggtcacagcactaggaaggttgagaatcactggctggccagcaggtctctgggccactggggggtcatgccacactgatgttccggtggaatacacaagcctctgtccttagctagcacaggggttctggagcagagcaggaggggctgcgcttgataagatcccttctcccctatccaggcagcctttcctcttgatctccgggggcccagcaccaggacagtgtgaaggcaggaactctctgcttactttatttcttcttttttatatttctgctgttcatattccactctcgagctacattgtgtgttttgactgttttatttaagggattggagtgggttgtgtttgttttttttttatcacacgtagagtgcccgttccctggcaggcctaggttgccactcctctggagtgtctgcggcattctgaggacagctgtcatgtcacccccccccacccccaagctgactccatgtgacagacctgttcttctcagtatgcctgtacttcaggacgaagtagctctgagcttggcttgttccatctggctatgtaaatgaggaggtagatgaactttaaagagaaaacgtggtctcttgataacatgcctccctccagtttgggggacatgtcctttaacttggaaataacaaaaagctaggtttgattgcccctgttgatatttccaatagatgccccactaggaatcaaataagtagctagctgcaggggtagatacttgtgagccggaattcgagttgtcattacttccttgctccacagcgcctcagtgtggccacctatagcacagcaccaatgtcatgggagcttgccagtccagcttcaggaggtaagcaagaggcatcttagcgggcatcaattgttactggtcagttggtggcacttcctggctcctccgttggctgtgcttcttctccaaaacctcctctgtaaattgctcagagatgttagactgggaaccaaaaactttcagtcaccttttacatcggcttaatctgtttccagccattcctgtaagtcacctccgaatcagcttgggaaggaacctctctatgtctttgccagggagtgatttctggaaagaggtggaaataaagtgagaggccattccaggctgggctactgctgggaggttaggagttcaccccagtcctctgtgaatcctctccccaggacaactaggcatctatttgttgagtgtttgtccaccaagaccgtgcatgtgtctgtccattctgattagagaaggctctgggggcgagtgagtagcttatcaccttaacggaaacatcagataagaggagtccgggactgctgttcaggcgggcagctctcagatgtaaaggggccccgggggaaggggcagtgtctggcctgaactgaggtgggaatctttggaggagaaagttggtcctgtgcagtgtttctacccttgctgtttcctgttgttagatgctgcgtgtttgtgatgccattccacataaaagcacaaaaagtcgcatgagacatcgtggtcacatgtctggttacactttggagcacaaaatcttacagtggtaaataaatcgttttccaatcgggttggcagcccagtgtttctctttgttcctttacattaatattttagatgtataaaattcagaaaaaaaatctcgtgtatcaaacacccatgaacctctgccaacttcaataaaccttgacgaccacagttgaattttcttcttgtgccctatactgagaagaccaggatcttacattctgatttgttattctgagccttcctttatatttttactaaatgatcatttgatccctgagcactagtgagtatttgtgtgtttccaagttttacttcaattcttaaattgcatcacacattttttttcaacattaaaaatttaagctttatgcagacatgtggctctaactaacttctctttcacaactgtataatattccactgtatggatctgccacagcccattctattgatgtacatttaaaactctctctctctctctctctctctctctctccctctctctctctgccgttgtttcccatgtacatgtatcgtctcttgggggaaatgtcgaaaagtgagtggagctgctaggaaaaatagaaagaagcgtgtgcatgtgtgtgtctgtgtgtggggaaatgtttgtgagtgtaggtgtgtgggtgtgggtgtttgtgggggagtgtgtttgtgtgtgtgtgtgtttgtgtgtgtgtgtgtgtgtgttttggagctttgacttcattcctggtaaggaatatccagtgggttcttgagactcttcaagactccccccagcaccccatcagtggaggatcgaggaaacagaggacagacagaggcaatggcctcctggaattctgccaccctaagctacccaggtgacccatctcagatctggcctctgaaggaggtgtcttgagagtaagaaaaggatatttgatttttatttgaagggttcactttatcttatttctgagacagggtctttctctatattcctggctgtcctggaaaactctgtgtagaccagaccggccttaaaaatcacagctatttgcccacttctccccgagtgttgtgattaaagagatgtgtcatcatggccgatcaaattggaaggttcttaaccaggaaagacatcctgtcagtcatatgatattttcacattcagtcctcacttttatacttcctattcccattattacgtcttaatggcaactgggggcatttgtatttctgtaataagatgggctaagtggactttattctacacagccaaatagtattcactataattcacaggtaactgaagacagctcactggagccccaaactaatgtttgctatggctatctataaaagagaaacggtgggggttactgaatcaagggctttccagtgaagtgacctcaacaacaaatcatgctcacctcagcctggagctgagtcagagccatgaccatgtaacactatgtggtaactgtccctggccactattagatccccaagctaggtaactgcctctgcacctaagcgctcatatctatacaattattttggactaaatgacctgcaagccccttccagctttaacatttttgtatttctgcttcttagggccattgctatgatgaaacaacatgaccaaaagcaacttagggagaaaagggtttatatttggcttacatatcgcacacatcacagtccattgagggaagccaaggcaggaattcaaacagggcaggaacctggaggcaggagctgatgagaaggccatggaggggtattacttactggcttcgtccccatggcttgctcaccctgctttctcatagaaagaagggctagtgtcaggagtggcacctctcacgatggcctggccatctcccatcaatcactaagagagaaaattccctacaggcagccttgcagactgatctcatggagtcgttgttctcaactgaggtttcctcctctcagatagatgccttttagctgtgccaaattggcataaaactagccagcacagcctggtaacaatttggttctcacagatctttagtttactgtctcctgtagaaattaaaggaaacctgctctctctgcccagcactggataaagctttggcatctgctacagttcctctgaaggctactgatgctcccctgagcatggcacctgaggctctgagaactgagtctcatctgtgtctgactgctgctgggcacttgtatttttgcacccaagagttcttacattttagagctagttggatgccaccatttgggcaataccctttggagcacatccatctccctccagagcagacatctgccgggaatataatcaagagatggaaaggttgggtgctaactttgtgctgaagaatgttcctccccacccccacccctgaatgccccttgcaagtgagtcagcacaaatggtacctgatactggggaactgtgtaactaacttatttttttttttaaagatttattttattattatatctaagtacactgtagctgtcttcagacacaccagaagagggcatcagatcttattaaggatggttgtgagccaccatgtggttgctgggatttgaactcatgacctttggaagagcagtcagtgctcttacccgctgagccatctctccagccctgtaactaacttataatcaccagatgtaattgtcatctaggaggcttactgttgaataagttcaccctttctagttctttctgagctctggtttgctggttcaactcagatgttctggctcaaaatgcctctccaagctggctgattcaaactggcttctctcagcttctcgctgaattgttctgcttgggaaacctgcctctaaactccatgaactgaacagacgtgaacaaaactcaactggactgccctccattctcaactgccctgcttttaggtagctcactttcctgtctgtcctcatgagagttgggtgcatcctatccctgactcattctgtcagatctttctctgattcgtcacttcgtctgcctctcaattagatgtcattttcaaacatggctgctttcctacaaaccaaccttacctttattgttagggatcaaagatgtgtactaacggtgtgtctgtattccagccagatcacactgtgatccagagcctgtctgcattccagtcagatcacatagacctagaaggtctttggatacgatcccttgccaggacacccatgttgctggattaaaattcatctactggaaacagatgttgtcatggcaactagtctagtggtgaccactgtgatgagagtttagctcccaaggagtgtggctttggctgggcgttgtcgtttgtcagagatgtctccaatttcctgacgctctttccagaaattttgagacagcttgttggcaaatgtgggtggcaaaagtcctacttcagaaacttggatgccatccagggacaaacaaggaaaacctgcttttccagcccaaagtaataaatccaatttctcttcagctcctcttgcttggtgggtcaggtgagataaacagatgtgagctgagaaaaaaaaccccagttgaagcaactctagccagccagggtgtggcaaacatggcttggaaggccttgccctctccccattcccctgccttgctaaaaatctttagattatattcctaaagttacccaccaaggtctattccaatatttggccatttctccctcctgaggccaactacaatgtctaactatcaaagtactgaagtccagcaatcaaaaacacttgttggctcacctaattaacatgcccaattaaaattaaacacctcaggctggagagatggctcagcagttaagaacactgactgctcttccagaggtcctgagttcaattcctagcaaccacacggtggctcataaccatctgtaatgggatccaatgccctctacctgtgtgtctgaagatagctacagtgtactcatatacataaaattaaattaaattaaaataaacacctcatcctaacatggggtttccccttttacctttataaactctactttcctatgagccctgtctatctcctctctatccagaggcagtcctttggccccctctggacaaatatcccttccctttctcccctattcccttcctcttcttcctcatcctctatctcctgtctttgtctctttttccctattctctgtccatatgggacaaataaacctcctttatgctgagaacttggcattggggtgtcttgttgttggtgagctgactccagcacaccaatgctctttctgaggaggagatggtggttgccactcaggataaggtatacactatccaagtgtcgggcattgccagtaattctaggagatgagaaccccaatacttcctggcatccatttcatcctgatcaaagaggatacaacggaaatagaaagataaccattcccagcagacctcagctctgtgctgagcaactgaagatgtagactgggattcatcgtttgtccaaggttgtgtgcttcttcttgttcttgttcttgttcttgttcttgttcttgttcttgttcttgttcttgttcttgttcttgttcttgttcttgttcttgttcttgttcttgttcttgttcttgttcttcttgttcttgttgttgttgttgttgttcttcttcttcttcttctttttcttcttcttcttcttcttcttcttcttctccttctccttctccttctccttctccttcttcttcttctccttgttcttctccttgttcttctccttgttcttcttcttgttcttcttgttcttgttcttctcttcctcctcctcctcctcctccttcttttttggtttttcgagacagggtttctctgtgtagctcttgctgtcctggaactcactttgtagaccaggctggcctcaaaactcagaaaatccacctgcctctgcttccccgagtactgggattaaagacgtgcttctaagagactggagaattgtaatatgctattgtttctccataaagtcaaggctcttagggtatatccagtagtcatgcatccctacttgaaggccacttagaagtataggttatagtccccaagtgttatctggaactacagagaccagacaaggctaatttacaaagatctgggaagatcttccccagggtggctaagagatgcttggtggcttggctgggattctgtccaagggcaagaaaaaagagcataggcaaattttctgacttctcactttgcagggaagggactgggtcaagaccagatgtcaccagaagtcaagttcaggatcattctgattgcacaaggaaaccaagacagataggcaatgaggaggaccccaggacttaagctggcactgggctcctctgaggagctgctaacagctctccatcctgttagcatacaccatttcctgcctacttggtaagaggcactacccaccacagagtgaaccacctctacttttcctcattggcattgcttaggaaagggaacaccacagagagagagagagagagagagagagagagaattgtataaagtggccataactggcatttgccacaacctgctgccatactgggaacagctgtctcaggcgcagggctcaaggtatcaactaagtttatcagatagataaaaaatagaaataaataagaacacaaggaaacaaacaaaatcttagcaggggttggaggacagtgtgaccactaagtacaagatgagctatggagacaggcaggggctggagcacatggggactatttccactgggaaacctatgtgactagctaagtgagcagcatggttagatctgctccaaaaagactattcttgaagctgtcacagaaacaatggaagccctgaagaactcaggacactagctagggtcctgaatattccctctgggttgacttcaacttgtcctttgatccttggaaagttgtggggaagagagaagagaatggagagagcttactacattctctaagagtcactctgtggggataactttatatgcagctttatatgcaagggtgtggggggggagggtctttccctcccttgcttcctgatgacaaaattatgtttcagaaacttctgcaaatctggggtagatctgggggcattgtgtaataatatcctcctaattgaaacttcccaccctaggaagagtctcttttacacaattcacaagtttcttgaagtccctgaaactgactagattcacagggcccctttcactcaagggtacataaacagtgggagttggctggactctgcaagttgtgcagaaagttctggggttccagttttcagaagttgccatctatgctagggtagacttatatgatgcaagttccctttgagttatccatgtttctgtaagtaagtactcacccatactcctataaggaaccgcaatcaaactttaaaaaaattttatttatttatttatttatttatttatttatttatttatttatttattatatgtaagtacactgtagctgtcttcagacactccagaagagggcattagatttcattatgaatggttgtgagccaccgtgtggttgctgggatttgaactcaggacctttggaaaagcagttggcactcttaaccactgagccatctcaccagccccctcaatcaaactctttcaccaagttggactgtcattatttggtctgtaattggttcccactctaggatgggaaaatgttcatttgactttccccaaaaatagtatcatacaacacaattggtatccatgaaagggctgacaaaaccaaagattagctggagagctgggggcaatggtggtgacttcgtggttcctgcagtagatgctaagacatacaactgaggcagtgaatgtaaaggtagaatgcctgtgagggaagtcctcaatatggggacccttcccccatggggaatggaatgttatgcctccttaatgtagtggtagatacatggtaattagatgttcaacaggataggcaacaaggctggatttatctatgactggagtgttttggaaggaaatccaagggtaccatcttcctctgtttggtatggaatgatgtctcctcaatgaatggggtccaccttatcccccctagggattggggatgcagagtcatcatgacagtagcatcattgtaggatgaggaagcagatggatcaaagggaatatttataaaccatggaaggctaaatggggcaatgtcactgtacccaattcttttctgactaaacaattgataaaaagtcatgaaatcttcttagactatattgggctttgcaaccttttattttttaatcatcccattagtttggtttagctgaccaaagctaactagaatttttttttctaggatagatggtggtgggcttttagagatcctgcaactctctgtaaagtctttgttgctaatgccaaaccttgagtgtctcatagatttataaaagagccgtagaggcaattgttgattttaacaaagacacagatatgtcatctaatgggaaggagcactcacagaagttgaaggatcattgagtagaaagctcagcatgggaaatcattggccaaggaggccatagagaggcctcagtgatatcactgttactgttgttagctgcataccagaactggataatatgaccctatggatgaagacaatgcatgatgataagacacagagaaataaggctgggactgaatttaatattctggcttgttcttataatgttggaaggtacactatagtctgctaggggacagttgtcaccaacagtcttacttggtggggaccttgcagctacactatcataatgttacgaaagatgtgactataggaacaatagtgacatgcactgtttagggttcaaccgacaactttctgattggatttaaggcccaccctacaagaaggaatt

SEQ ID NO: 1299 - DNA, 1293 bp, Mus musculus
gaagcaggcaccatggtgctgtcggtgcctgtgatcgcgctgggcgccacgctgggcactgccaccagcatccttgcgctgtgcggggtcacttgcctgtgccgacacatgcaccccaagaaggggttgctgccgcgggaccgtgagcccgacccggagaaggcaaggcccggtgtgcttcaggcggcccaacagttcaacattaaaaagtccacggagcctgtccagccccgacctctccttaagttcccggacatctatggtccccggccagccgtgacggccccagaagtcatcaactacgcagactacaccttggagaccacagaggagtctgctgcacctgccagcccccaggcccagagtgacagtcgcctcaagaggcaggtcacagaggagctgtccatccgtcctcagaacggtgtagttgaggatgtctgtgtcatggagacctggaacccagagaaggctgccagctggaaccaggcccccaaactccacttccgcctggactatgaccagaagaaggctgagttatttgtgacaagcctggaagctgtcaccagtgaccatgaaggaggctgtgactgttacatccaaggcagcgtggctgtcaagaccggctctgtggaggcacagacagctctgaagaagcggcagctgcacacaacctgggaggagggcctggccctgcccctgggtgaggaagagctccccacagctaccctgacactcaccctgcgcacctgtgaccgcttctcccgccatagtgtgattggggaactccgcctgggcctggatggagcatctgtacccctgggggcagcacagtggggtgagctgaagaccacagcaaaggagccatctgcaggggccggggaggtccttctgtcaatcagctacctcccagctgccaatcgcctcctggtggtgctgattaaagctaagaacctccactccaaccaatccaaggagctgctgggcaaggatgtgtctgtcaaggtgaccttgaaacaccaggctcagaagctgaagaagaaacagacaaaacgggccaagcacaagatcaaccccgtgtggaacgagatgatcatgtttgagctaccggatgacttgctgcgggcatccagtgtggagctggaggtgctgggccagggcgaggaggggccgagctgcgagctgggccactgcagcctaggcctgcatgcctcgggctctgagcgcagccactgggaggagatgctaaaaaacccacgccggcagatcgccatgtggcaccaactgcacctgtag

SEQ ID NO: 1300 - protein, 424 aa, Mus musculus
EAGTMVLSVPVIALGATLGTATSILALCGVTCLCRHMHPKKGLLPRDREPDPEKARPGVLQAAQQFNIKKSTEPVQPRPLLKFPDIYGPRPAVTAPEVINYADYTLETTEESAAPDQAQSDSRLKRQVTEELSIRPQNGVVEDVCVMWNPEKAASWNQAPKLHFRLDYDQKKAELFVTSLEAVTSDHEGGCDCYIQGSVAVKTGSVEAQTALKKRQLHTTWEEGLALPLGEEELPTATLTLTLRTCDRFSRHSVIGELRLGLDGASVPLGAAQWGELKTTAKEPSAGAGEVLLSISYLPAANRLLVVLIKAKNLHSNQSKELLGKDVSVKVTLKHQAQKLKKKQTKRAKHKINPVWNEMIMFELPDDLLRASSVELEVLGQGEEGPSCELGHCSLGLHASGSSHWEEMLKNPRRQIAMWHQLHL

SEQ ID NO: 1301 - DNA, 66027 bp, Homo sapiens
ctatgaactagtttagaaagtttcagaacgtcacttctaccacactctgttggccaagcaaatcaccaaggccagttcgcaccaaaagtgagggaaattgggcactgcctctccatgtaaagggagtgaaggaatccacggccatccctgaagagagtcagccacattccacatgtctctatcttgcacagaaactaagatggatgttctcacaaatgatctcagttttacactgcatctaatcagattgtttgcaaaaataaaaaatgaaaagaacttactctcactgtagctgtcaaagagagggaatgttgcctttgttcattcctgagacgtttatgttaattatgaacacttgaaagtttgaggccaagacttgaaatgtcattagtgttatgagcaataaataaataactcagtttttatgacagaactggagcaaaggatgaaggttcagattttattaatcttcaacactagacccatgggtgatccctgaatcagcctctcttgagttggggcctggaaatcagcattttgcagaccactccaagtaatgtttattcatggtgttgaatctcttcctaattagaattaacttccaggccggttgattaacataaagtgtaatgatgatatggattacaataaacatcttgtcatttatctagcacttaagcaatcttcaaagtacttctcactgattatttgattctgttttcacaataattccccaactgcctctggtatctgctccatgacaccacattggccctggctttgcctataaagttccacaaattcaccagtttgattttgggtctgagattccttctccaacatgctattaagtctttgtcaaaagtctcccaaattcctcctgctccatctggaagcccaccctgatttgagtaaggtgaaaagagctcactttccccttgggcccttcactaaccagctgagaaataaacccatgaatggcttgggaagtagcagagagcctgaagtgaaccctagacagagtcaggaggcctgggagccagctcagaaatctcctctcttgaccttggtgttctcatctgtaaaacgaggctgtagatcaccatcggtggtctcacactgctttgggggtggctctgactgtccctagaggctgatggtgtgtacagtggggaggagggctcggggatgcagtgatcccaggggattctttcccccaccttctttccatcacagcaccctgtcttttattctgaattcccacataaaactatagcggagttttcaaataacaatgaaaagtgcctctcctggactataggaccttgaggtttcctttcagccctaacccttcaaaatagtggtaataatttccaatagtacagtgccaaccacatgccaggcattgtgtgaaccacatcatgcccattgtatcacttcattctctccatttaatggatggcaaaactgagccccaccaagataaagtgcattgtcagaggccacccagctggttcctttgtggaactcgaattcactggagggtagactgatctggcttaaccacgacacagtgagagtttccagcttgcctgccactagcgcaggctatgacacaggatagagtggccaggggctctggccacggctcctcccatttcagccctggagcagtttacacagtgccaggggtttctggactctccctttgcccccccaccccaccaccacaaggtatggggagaaggggagcagtggtgtgagcttgcaaaggggctgtgtgtgaaggtgcagtgaagcctcagggtttgggttagggcccacagggcagggctgtgggtcagggacagggctcctgtctgtccacttgacatatgtattgaagtgctgtgatgtgccaggcactgctctagggctggagatacactgctagacaactcaggccctacgcctgccttcctagggcctctattccagaagaggaactcagatcatcagcaagataaattagacaggtaaggagaattagaaggaatattaaataatgacacgtgctaagggtttgaaaaagtaaggcgatggggaacagggagcgatgggacaatgggtggagagctggtaattttacataaagggcaaagaaggcctcatagggagaggtaaaggtctgggagtcatccgggcatggtggctcacgcctataatcccagcagtttgggaggccaaggtgggtggatcacctgaggtcaggagttcaaggtcaacctggccaatatggtgaaaccctgtctctactgaaaatacaaaattagctgggggtggtggcaggcgcctgtaatcccagttacttgggaggctaaggcgggaggtttgcttgaacccaggaggttgaggttgcagtgagccaagatcgtgccactgcactcactccagcctgggcaataaagccagactccgtctcaaaagaaaaaaaaaaaaaaaaaaaaaaaaaaggactgggagtcaagacctaggggaggattcatttccctccacatcctccgggtggcagcatcttccaattcgtggggcagtgctggtggttcctcctccccgccatagagtattcttgctcagtctatctaaaaatgccgtttaaaatgggggaatcctagaaacaaaacatgaagaatttgggggatgtgactattattatattttttgatctaggcgctgggtaaacagatgagttcacattttgaaaatccaccatgctatgcttatgacctatgcacttttcatctgtaggttatacttctgtaagttcaaaatgacacacactttaaacattgtattttaatctaaatcatagtttgcattagtttccccaaattttgatgattagactctgtgtcaaaacgttttaaatttctaaatacattagtacagacaaaatgctcagagccaagcctgatgtgtaggaagcacttaataaacgttagcactgttaccttgtgtgcatatccatgatgcctcatttatgatttccagtcctgcattctctgcagtagaggaagaacttggagacactttcctggcaatctgatggcagcgtccttctagaattttgtgagttgtcccaaccttttacagataacttgctcatatctattttaacagcagttctaaaagcaacttaccctaatgggtctttgcaaagcactcaccttagttctcacagaactaactttcctttatacttctatgtcattagtttacatatcagttaattaaagtctataaatcaataatgagatcaactggcataaaaagatactgagacagacacaactaactctttgagtgagtagacgactccattggagggggaaaaagagcaatgagagaagaggctgagggcatcaggcagcaagttctccagaaggagtggatagcttgggccaatctggaaagttggttgagtggaggttggttcagagaactaattttgtacccttctcaagtgttggagtctgtaagattgattcttgtacaattgttaatgagctggtgtatctattaggcattgctggaagtactggtaacactgcctttgggaaccaggaatgataatccaagccatttgttgtgcagcttccatgtgccaggccctacgcttacagaaattagcgctacgtattttcacagcaatcctgtcaaggagactatcatctccccatttgtatcagcccttgacacatagcactctaaaatttagtggcttaaaatgacttataattttaatttagctcatttttctgtgggttggctctttggctgggctcagcggggtgggttttctagttttatccggattcagtcatgagctctgattccgggaactggcttgcgttggggtcatgggaataacaagctcacttaatctctcatcctcctacaagatagtttgggcttctttacatggtggctgggcaggattctatgatggagaatggaatcttccaggatctctcaagacctaggcttagaatttggcacaatgtgacttccaccacagtcaattagccaaaacaaatcacaaggccagcccagattaagaagtggatcaatagactcaacctctttgcaaagtcacattgcaaaagggtgtggacacaggaaagggaataattgcaaccacatttccaaatcatttatcacccactttctgcaaataaatgaaagtttaatcagtttaagctaattcgtccatccagagactcccagctaataagcaatagagctagaataacacatacctgtgggacttcaatacccactattttcactaagccaagatgctttattaagaaattagagggtcaggaacaaatgagatcatttgaattttaaaattaacattaattgagaatcctgttatttgtacagcactacgctttaggccatcctcacaacatccctataaagtagagatgactgcccctattttaccaataagaaaagtaaggctccaaaatatcaaggttactttgccaatgaatcacactgcttagtacacacaaagacaaaggatttgaacccatttcttcttatttcaagtccactcttctttcaaccactctagaaacttctaatctgcggttcaaggcatcatatgatccttgaacaatttagagttacatacgaaattatatatatataacattcagacattcttctggaaaagagaattgcttttattatattcacatgagccccaccaggttaagcacctcatttctgaaaaaaaaaaaaaaaaatgctaaccttccttctcatatggcaggcaaaatccttcagacgatgtcttgtaattgttgtacactccagaagcctagaaccaactggagcctttagattagcttcagaataaatggaagggaatcaaggagccatgcccatgagcactagaacgtgtggctttatcttgtgctgagatggaattaggatttgaaagaatcctgcattgttgaaaagtccattccagggcagctgattacctagtggttaatacagtaacactttaatttgctgcaacaccagaagagtttcctgctattcaaagacttggatttctggatcaggcccccccagtctctttttcccctttctcctttgtgccttaagatacagcccagaattgctcagaatcagcaacaggagttctgggagcggacctcacacctgggtctggactgagctgcgctacttactctcctcactgtcagtatctcttttctcctgggctctgcaagacctgctgtggggctcagaatttccaccccttatcccaggcaacttcctcctgcacatctcacctttggcaagggacttgggcttggggaacacccagtcagtcatggtccagcttggagaacctgcaaagtcatcaaatgagagagctagcagcacagagatgaaaactgggggccagagaggaaaagtaacttgcccacactgtacctgccctctccttctgctgtcaacaatttcagcctgccatgaactcctcattcctgaagggaagcatggcctctctccctgggtgcccgctatgccttcctctttagtccaccagcacccactttgtcactttgttcctccccaatccttccaacactttagccagaggaatctttttttttttttttagagacagggtttccccatgttacccagggtgatactgaactcctggactcaagcaatctgcccacctcagcctcccaaagtgctgggattatagacatgagccactgcacctggccaggaatcttttaaaaacacaattctgattatatcacactcctttgcctaaaaacatgcaatggctttccactatggcctctgagccctgttgtctggtccctgtttcttccttcaggctcagtcacactctcctagttgtgtgctgaaactggctcctccaagctcacaagagccaatgggaaatattcaggaatttgttggtagctggaaatcgaccatggtggggttactttataccagaaaaatcaacaaatgctaaaaatcctattttttttttctggagagctgattggtcagtccaccgctgctccatccccactgtgctgttccatcacaggaccgctgaacatgctgttgttctgcctggcacgctctcccctctttctttgctgagttaactctattcttcaacacctcagctcaattcttacttcttccaggaagccttctgtgatatttctgaacaagtcaagtctctaacattcaccttttcttcttagcctgtatcacatttgtaatttgacacgtgtgatgaatgatgagcacccgtcttccccatgggaatataaactttccatggcaagagagaccatgcctggttttactcactctctttgctgtatcacctggcacagtacctggtcatagaaactcacatctgctgaatgagtgaataaattagagaaatatacactagacaaggctctggcttctgtggcaggagtacttttgctcacacatctccacattctcctctgcatttcccagcctctcttgctgttacatttgtcctgttaccaaattctggccagtggaatggggtgctctgtgtcctccatttccagccatgtcctctagaatgccacaagtagtcctcaagtctctttctcttccctgcatggctggaagtgaaggaatcacaagacagaagcagcccagattcctgagtcaccaactggagaagagctgaccaaatgagtcatctgaccctccttcaattgagaaaggagggagatgtacgcttttattgagttcatctctgacattttgagttatttgttactgcagcagaatccagtttaccctgacctaaaacaccatcccagttgtcattaactcctactctttgggcaagccatgatgtctctgaatctccctttccttattggtaaaataaaaggattccacaggtgatatctgaaatcgttgcaatgttaaaattcagttattccgctggtatattttcctccctcctgcatagcaccatatgtagacaccacaaatgtttgctaaataagagaacctcctatatttgaaatccttttctccagataaaagcattttagtaccttagaagttcagagtgattattcagaatatttaaacatctaacatgtacaatattgatcaaaataacaatgggaacatttcatcaagaggctggggaaccttcaaagatccatccctcagcctcgtagatgcctcctaagcatcttgctctgtctgctcttagaaatgtggcctcagcacttccaattatttgtgggtcccagcctcagactgtcttaactgatccactcagctgactcagttaactgcctttcccaataggcatactctcatttttcaaaggaacctagtgatgccttttttctgtgggttgtcattaaaggccactgtctgcatatcagtagccaagaagcaaacatcgtatctttgatgagatatatgagggtgactggttgggtagcaaaggtagcccagagtcctgatcactcaactgggctttggatcccctggggtctattcctagctctgccataggttcactgtgtgtgaaagaggcacaaggcaagctcttcttcttgggctggggtccctcttcctgttataaatgaaggccactgcagctgctgtcatcccagtaaccatagtaacaatggatcatgtgacaggtgtctgattccccatcagacattttctgatattaagtgttcttcatccttcccctttaaccccaccccagatcctgttatgagtagtggcattgatggtctcccagggcagccgtttgagcatgggagacctggagctgacagcattaattaaacctctatttccacaaaacattttgcattgccaggcccggagccaagaaaacctcccagggcagctcttatgtgagagattgctaaggctgtcaccagggactgcagtgcttcagctctacagtttgcagcaaatggggatcagtaggaaaatgtgcctggcatacagcaggcacacaataaatacttgtggaaaagtcagtttactaaaatggagctcatatcacaaatgggattccttcaaaacactggaaattctgcataagatgatcatatgaattattccacggttactgagtgcctgctatatgcacccatgggtgataacatggagactctaaagatgttagcttgttgaaggaatcccaagtccatggggtggctgaggctcaggggcacattgggaattgtgtagagaggagtctggaaggcttagcagggaccacatcacaaagggatttggataaaggttgagtctcttgggtttattcttggagaacctttgagagctgtgagtgacatgatcagctttgtattttggacacctccttttgatgtcactgaaggaaagaactagagggagactattgttttgatcaaatagtgttctagaatttctgaacccaggccttaagacaactggcagcttctgcttcattcctcttagaatccagccagcatgctgtgagcagctccagcaccatggagaggtgacatagaggacaaccaaaatgcaccagctgacagccccattgtgattccagtggcagccagcacctactgctcaccatgtgagttcaccattgcaccatctgcaatggtgtctggagagctgatgtcccagtccagctgaacccctagatgactgcagtcccagaagacaacatgttgagcaggaaaaccacccaactgagcccagccaacccatgaaatcatgacaagtaacacaataactggtctaagccagtaagtcatcggtgggtttttatgcaagtgtagatagctgaaaaactggaggacgggtgggttcccaggtggtggtcacagctacagctcagaggaaaaggtctggctggagaggctatagatttaggagacaatggctcatagaaatgtgaaagctctgttgtggatgaaatcacctacatcccttttcacacatgcccagcacacctagagcacagccaacccacagcaaatatctgctgaattaaattcaacactccatataatgaagaacactaaaaagccactgttttcttgagctaagacagtcctcatgcccggaattctaatttccccttgttctaagcatagttttatgctcaccctctctgaatcaagtgtgtactcctagctgctgcattttatcttctttatcctcctaagacaagtccgtttgagtgtggacttggaatctgcaaacataagcttgggttcagggtgatgatttttctacctgtgcacctctcttctgagcctcggcttcctcaactatatataaaggtgcgaatacctgctgattaggtaataaaggtgaactcttgggcaacccttaaggggatgcagctgtattgtccatcttcagcaggacacaggtacagcctcaacccaaacatcccatctgttccctctacctgtggcctgttcctcttccctgtaagaaccatctcccaggttggggagctgggaaatctccagctttgtgtttgaaaaagctcccggaagacccaattttacagccagcttggccagctgctggggtagaagggtgagcaaggagctagtagtctgggaaagtgactcctagagtcgcagatctggttggagcccaggtttgtcctctaacacagtgtgacctccgcaagctccagcacttcttgggcccagttgtcccctgttgtacacaaagcattaagaatggcctgaaacaaccccaaggctccttccacctggaaggctccggctcctgttggggtgggggtccggtcacgtgttggcggggagggggttgccggttgacgtggctgcgggtccagcctcctctgacgtcctcgcagccgtcctccctccctccgtccccgcccctctggcggcgggagagctgctggctcgcccggatcccgggagctgcctggaggcgggcccggcccggggaaggtgagcggctgcgggacccagcccctcgccgggagcgggcaccatggtgctgtcggtgcctgtgatcgcgctgggcgccacgctgggcacagccaccagcatcctcgcgttgtgcggggtcacctgcctgtgtcggcacatgcaccccaagaaggggctgctgccgcgggaccaggaccccgacctggagaaggcgaagcccagcttgctcgggtctgcacaacaggtgagcgggggcggcgcgcaggcccttcccgggcaaggcggggttgccgggcagctgcagagggggaactggggtgggaggcggtcgtggatctttgcgcgacaaagcttggcggggaggggacagcagacgcgttggaggacaggtcaaggagtcaaaaaggtagggggatgggggaggctaggggatgggggagacgagacctgaaggagaattagggagcggcgagcttgtggggactgagagaagaatgggggccagcagcgagacctaaagggaggggacaggaaaggggacctggataagaattagggctgggaagggtaagaggagagggaggctgggaggggaatcgccagggttagggaagaccctgagaggtaccagagaatgaggagtttgcagaattgggaagaagactggggtctgtgagagggagatgggtggtggttgtggagccagggtagggcaagtcctgccagagctgagaagaggtaatgcctgcaaagccagaggggaggtggccgcggtcccgcaggagctgggaagctagctagcggggtctagagagctgaatccgggaggaacctgaaggactcttccccaccccctagcagctctgagctccagccagtcagagggggttggtatggcctcccccaagatgtctctgcagacgtccctggagacaggagggcttttatcccatgcatttgctcatggccagagccccttcgtgcaggaaatagcccgtgctcccattgtaaagagcagcagaaggggtctggggaagcagtttggaaggatttccctgcataggctgtgacctccaggatgcatttccaaagtacagaatgcagaatgttctctggagaaccaggaggcaaagagtcctgctagagtgatttgaggaaggatggccctggggcaggggcatgacttaaaggacctcctaaaggccctctagatcccttatagactgtatggttccaggagtggcactaaaatgctgtgactccatcttcctttttccaatcaataatttaaaagctcagaggacccagttgtgtggggcctgtgtcagtcactgtacagtgagagtggaaaggaaatggctgctgtccttgaggcacttataatccaagaacagtgacattgacagtggctaaataggagccggctgcacagcagaatgtgggacttgggacgatctggaaaaggggaatagtgggctttccactggccaggtgttgggagtccttctccacaagtcgtggtcggccgcctctcaaccttctttcctgcccaacacacttgaggaacagccactcttctgcctttcagtgatgtctctccaggcaccgccccctccccttcctagagagaaccactgggaaactagttggtgtaaatgacctctagggtctcttccaactctttgtcttattgatgaccagtagcccacagaacggctgatcatctgttaaagaaaaaccaggttgtgtctctcccctgcttcaaatcctccacaacttctcactgagcttggaagaggtcatagcaaaccatgacatagcatacactgtgtgccaggcgcactgttcagagtacactaattaatgtgtttcttgacccagtgagggagccatagaatgatcctaacttaaagatgaggaaactgaggcttagagaaggtaactgacttgcctagagctgcacagctagagaagttttagagccagactctagctgagcttgtctgattctggtggccacactattagccactcctctccacccactcacctgctttaacatggaaggtgcctgcctctccagccaagctcatgccagtttctttcttcatcagcagtcttggcttccctggatttacgatcattcttttaaaacaccaagcccttttctgccccttcatttttctctggcctttcatacaaatggctccttctcatccttcaggtctttttccatttaaagtctcagggaggattttgcctactgacacataaaacaaaacaccctcttcctgttattctctcccatattgtttctaacaaatccttttatggcactctttacattaggatgcaatctttcatattcacttactggtgtataatatttattcccagcaccctctcagtgcctggaaagtagtaggtgtccaataagaaattgtagatgaataaagtcatctcaggggtcatccaatggggattatcatcttcaaatactggtgcatgcaccatgtctttgtaaccatgtgcaagctcaataggggcacaataaatatttgttgatacatgatacctgcccatccacattcccttacctggttccctcagtgacaaagatgtggacaacttggggctgaatctatgggtgtgaatgtgttgaagctgagatctcacaatgacttggttgctgttgttctcagattcattcagccactggcccagatgaagtaaatagagaaaagacaaccaattgacatttcaaagcaagtaaagagggtggcaaccattagcggtgacagatgacaggagggtgatgtacatggcacctattgacaagtaggacaagagccagggaagctctctgaggatgttccttgaggaaagaaggtatggaggctggaaaataggggtctagatgactgtaatcacaacagaggtgtccaaggcctaatagccagtgtctctgtaactcactagttttggctgctgaaaaaattctttgggtttggaggctattcctagaaatctgatttctgaccctgaatggctggatgaagttgaagtttgtagtgattttgaaaagaaatttggagttttcccaggagttttgtttattttttacataaggtctgactccatcacacaggctggagtgcagtggtgtgatcacggctcactgaagtcttgacttcctgggctcaggtgatcctcccacctcagcctcccatgtagctgggaatacaggcacgtgccaccacgcctgactaattttttttatgttttgtagagacaaagctcaccatgttgcctaggctggtctcaaactcctgggttcaagcaatttgcctgcctcagcctctcaaactgttagggttacaggcatgaaccactgtgctttgcccccaggggttcttaatctgggtccacaaacctcccaccaaagggtctgtagatagcattaaaaggtttgtggtcttggataggaaaaaaatgacatcattattttcacttacctctaactgaagcagtattttctgtaattaggaatagcaacaaaaaccatagcgtatcatccatacctgtgactttgtccccaagggaaatcacagatagcttggtagcacattacagctgttgcagatggttcacattagatttacactcatctctcattctaaattatggtacttattaaatctcctgctagactctgttatttaatgaattaataaagaagcaaacatatagctacttcacaatttggttttattagacagtgctttgcagccctttgtcttttattttctgctttttccaacaattcagaggaagtgtccctaggcagccctcggccattcattacctctcatgcttccagctgttttcaagtcacagttctttgcttttctgaaatatacactctggaccctttatcctgccttcttagacagtgcctcactcttaatgtgcagcccttccaggtatgcaaggaattcagttttactacgccgcccactcctggcctggcaggtcacctgggacctctctgtcatcagcctacctctagaagcttgattattaggcagtgacctggcagcttgagcaaggagaaagagccagggaggcaaagcgagaatgatggtttctccttcaccattacttctgaatctattagtgagcggcggccagacccatgggttcctgcctctgaatttcctcatcacccttgtctgcacaggctgccactcagcccacttctgggacctttcatagaaagtcctcctttcgcccaacctaaagaattgggagtaagaaaggagaactgctcttttccccttgccccacggctcagtcctgtacccctaccatttggcaggcacccgcctcctgttttcagaaagccttctttttcatggcctagttttctcccaacacagtgtttaccttgctgtgcacttaagtgagtcttttcaaatgccagagaggtcccctgggtgaccccagtgctgtacctttgaagctaacacatggccaaaggctttattgaaattgcttggccctcagcaggagttcccacaccaattttttttttttttttttgaggcagagtctcactctgtcgcccaggatggagtacagtggcatgatctcggctcactgcaacctccacctcctgggctcaagtgattctcctgcctcagcctcctgagtagctgagattataggtgtgcaccacaacgcctagcaatttttttgtatttttggtagaggtgaggctttgccatgttggctaggctggtctcaaattcctgagctcatgtcatcttcccacctcggcctcccaaagtgctggggttacaggtgtgagccactgcgtctggcccccaggccccttctgtccatatccccagccacccactgtcacatgtgatcaaactctacaatcccatcctctttccagcagagtcgggatcactgaagtggctttcagtggaactctagtagattagttctaaggttttacaaaataatataaataagtgctgaatttctttctttctttttttttttgagacagagtcttgctctgtcatccagaatggagtgcaatggtgcaatctcagctgactgcaacctctgcctcctgggttcaagcaattctcttgcctcagccttccaagtagctgggattacaggcacctaccaccatgcccggctaatcttttgtatttttagtagagatggggtttcaccatgttggccaggctggtctcaaactcctgacctcaggtgatccgcccatctcggtctctcaaaatgctaggattacaggcgtgagccagccctcatggcctgaatttctatcaaacaatatatgtgtagtggagccttctccttaagatcagagaatttttccttcattttccttgtattcttgacaatgtctggtatggtgctgagcacatggcagtgttttgaattaaatcattatcttgtaacctaacactgaataagagagggaagacacaaaggagtgcatactgttagggctccactgacacaggatttgaagccagcacagtttatttatggtgttaccctgggggacaggaaatgactgcagcgggtaggagagcttctgggctttgttcatgctctgcctcttgacgtgggtgctggttacagaggtgtgtttactttgtgaagatgcatccagctctacatttatgatttatgtacttttctgtctgcagttatacgtcagtaaggtttttattaaaaagtgtcatattgtgacatgtttgtgaacattaattgagtaccaggccagtatttttttattgccaggaggactttggggccatattcaagagacatgagcctcctttttgtgttttttttaataaattgcttcttcggccctgtttgctttctgctgtttctcccatggccacctcctgtgtgctgcataaaggattccccctggggattgggacgttaagaccatcagtgtggtcctattaggcctcctacctcttctcctcttccttagtcctctagagcaacgccttctctgattgtttcttttaattcacacatgtaagagtgaggatggacagatgctgcatttcattagttaaatagttcattcatcaaagattaatgagcacatgctaggccttgggatatggcaatggaaagacagacatatgcttttcttgataaatggggagacagacaataaaacaagcaattgccatgatcagggaagcacagggtgccatgggaaacccagggtgggggatattacttccgtcttcagcctaaagtagaattttctccagtgcaggttgttttttctcctgaagtctcccctgtaccttaatgatgataggacgccccatgaattgctaaccccactcctggaactgattcaactctggaaggctgtaaggtctgacctccatggattctcagacttttacaggactcattttctagcttactattagctcatctcttgcctggtgaactcacccattcatataaaccaccaccaccacaatgaagtatttccatacagtaataaataatagtgatagaatagctaacatttatcaagttctttatatgtgccaatcactgttctaagcattttaaccatattaaaatgttttttgagacagagtctcactttgccacccaggctggagtgcagtggcgtggtcatggctcactgctgcctcgatcttctgagctcaagtgatcctcccacctcagcctcccaagtagctgggaatacagtcatgtgccaccgtacctggctaatttcttttaaatttattttttgtagagagggtctcactatgttgcccaggctggtcttgcactcttgggctcaggccatcctcctgacttgtcctcctaaagtgctagaattacaggtgtgatccactgcacatggccataaccatattaattttaattatcacaatagccctatgaaatatgcataattattatttttcattttgcagaagaaaagtaaaacacagaaagcttaagtaacatattcagtgggagagctgggaatcaaatttacaaaatttggcttcagagcccacacttttgacgactaggttgaagattagcagaaaaaagtagtcaaaattttatttgagccattgtgtttccccagatatggcataaaagtgtctataaatacacatctttgtaggtcaacttcagaaacctttcccaatgctttcgattgctttgctgccgccatcacacttcaggcattgggtgcagcccagggccctccacagaaattttacacagtaaacatgtttgggctggttgcttagcaacgtggaagacagtatgaatttttcatcaagaaattagcatagattctttcagggagatgagcacatacccgctggaaatactcttcaaagcactcacatgtggacccctaagcctgtgtccctcagtcttttttccagtgacaggtctgacctgtcccatctcccttcctcccctagttccttctttgggtacagtttgtagataattcagatacatggctcttctcttcatggaattgatgattcactagcaccttttgttaattctagcagaaaacagtgctgcatcctttccagattttcagatactagtcaagttgtgaggaggtacctggggcacaggaggagggatagagaggccattggatcatgacgaaggaaacacctgaaagacaaaccagagggggcccaagcaaaggcagaaggaagagaagagaccagcaggagagggaagcatcagacccagaagacaaagaggagaaaaaataagacacaaccattccaggatcaaagacctacgagagcaatccgaatatgtggagacagtccctttgttgtccacactgacctacaatctcccaataaccagcagcagttcacctcccgcttccaccttcttcttactgtattcagtactcccagggcttatttcttgctaagaaacaaagggaaaatctgctctgaggatggaggagaatagcttcatagaagcaagttttaagaactaagagattctatacgtatgtatcagaatcaacacacgtgcacacaaagggtcccctataactaatttgataagaaataatggaactaatagagttataaaggaaaacaggtgaaaaaggtgggttcctccctctttcttccttggttgtgtttattgaataactgtgtgccaggtactgtgctaggaagtgaggatacagtggtaactaccctcttcccaatgacacagtgacccatcttcagctctcacaaagcttatggtataatggggcaaaccagagtttatagaagaagagggcaaataaatgaaaatgtgtgctggtggtaggtaacctgaacagaaggttctgttgctttgtaagtgtaagatgaagagcttttacaagagtaccttacaagatgaaagctttcctaaagagtgatggccaaactgcgagctagagttggagaagatcttaaccagggcaaaagggaaggatgttgggggctccacacagagaaatgagcctgtgcaaaggtcctgtggcaggaggaagcctaacatttacgagggcctggggaaaagccagtgtggctgaagagtagagagaaagggagatcctggtgaacaatgaggctggggaaataggaaggggcctggatgagcagggcattgtagaccatagacagatttatttattcatgcattcataaatcaaacatttattaatgtctccaggaggggcattgagctacgtactgataaggtgaaggttaccattattttcaaagctttttttattcaggtgaaattcacatgacattaatcactttaaagtgtaggatcaatgccatttagtatattcacattgttgtgcagccactacctccacctagttctaaaacattttcctcacctcagaagaaaacccctcatccattaaacagtcactattccgccctcctccaatctgttttttgtctttatggatttgcctattctggacactgcatataaataaaatcatatgatatgtggtcttttgtgactggcttctttcacttagcatcatgttttcaaggttcatccacatcatagaatgtatcagtactttattttttatggctgaaaaatattctgttgtatgggtacatggcattttgtttatccattcacccattgatggacatttggattggttctaccttttggccattgtgaatagtactgctaagtacattcctgtagaaatatttgagtaactgttttcaattctttcaagtatatacctaggagtgagattgctgggtcatatggtaattctatatttaacattttgaggaatcgctaaactgctttccacaacaactgcaccattttaatctccaccagcaatgtatgacagttcccatttctccacctccttgctagcagttggtattttaatttttatttattttatttatttatttttttttaaaaagtcatcctactgggtgcaaagtagtatctctttgcggtattttctgagcttttaatatctaaaaaaaaaccccaaattctcacttttaaaatattcatcagtagctggcaagtttttttaaaaaaatttttattataagttctgggatacatgtgcagaacgtgcaggtttgttacatagatatacatgtgccatgatggtttgctgcactcatcaacctgtcatctaccttgggtatttctcctaatgctatccctcccctagtcccccacccactgacaggtcccggtgtgtaatgttcctctctctgtgtccatgtgttctcattgttcaactctcacttatgagtgagaacatgtggtgtttggttttcagttcctgtgttagtttgctgagaatgatagtttccagcttcatccatatccctgcaaaggacatgaactcatccttttttatggctacatagtattccatggtgtatatgtgccacatattctttattcagtctatcattgctgagcattgggttggttccaagtctttgctactgtgaacagtgctgcaataaacatacatgtacacgtgtctttatagaagaatgatttacaatcctttgggtatatatccaaaaaccacagtagctggcgagttttcaacaaacatttgctgtctgtattgagcaactattaaaatgagtccacatgggcaacccgtaaaaacatttcattgttcatgagtctcgtgagaggaatggagtgtgtgtgcagtagtcctggctgccctgttcttccagcaagtttgcacctgctgctctgtctgtcaaatatgttattattgtcatctttcccattctgttcccccaagctttagcccctcatgggtcccactaaaattccccccaatacccaggccctgcaaaccccatctaattgaggcagtatttagggtctttcaatatttccttaccaggccagtgtgatgcctggaggagccttgcccctctccagggccagttgctgcccacacaatgaaccttcaggaggagttcaataagtcccaattcattagataaagggtgctgtaattgccttatgttatagaaaagtcctgggagatttttacacactgcttaagaatgttacaatgatatttggggaagttgattgtggttttggggtagacttggaatgcattataatttttcccttaaaataatggagtaccagtgcctgctttctgaaatctgctaatcaccatgtttttaggaacagatcagagtcaaataatgagggggagttgcatatatgaatatgaatgaaaacaagcgtaaaggagagaggggtcctgtgagaattctgcgaaattgagtcagtccatctggcatagaccctagaatattttgacatatttcattgattcctctccctatccccacctccactcattaagtccaagacatgctttttctgtcacagaaagttgagcaggacttagcacatggcaaagagaagtgaggagacatgttgaatgactgaatacattgatgaatggatgggtagacaaatgaggaggtagggatctgtggggctgccacctctgcttgtagccaaaatgaaaaccacaggcacagagaagcaggggagggtgctgagtccaccgaaggatctctatgcttgcctttagtgatatatcaagaaatcaagaccagcaggaagcatgtggcaacttcactttttacaggtttctctcctttcaggtctctgttcatctggctaacgttagagagagttttttaaatcttcacctgcaaggccaatgaggtaatacccagggagatgttttatttggaagagcattataaaccacacaggttggactctctggtaagaacagcacgatgtaaaggctgtaggtttattgaggcaggattgcaaagactttgcttttcaaatagaattaagaaggatgttttggaaaagatggtgtttgaagatgcagataaggttgggtaaaagcggtttggtaaggcaactggaagagttgattgaaacagctgcaagtgtagaatatcttctgttagctttaagcttattctgcatttctgaatgccccctgcaccctgcttctcagagcatatcgcggagcatcttaaaatacactttgatttccagcacagtcacttcacatagaggaaaggggaagctatcagagaggaatacagtgaaggcagtgatgtgacatgaggagaaaatattcacatgatttggagggtttctttgcacattctttgcaatgcatcatctaatgatctcgtctcttacttactaacaaatggagcagattctttaagtggcaacatgactatcaccctttgcaaaacagcctccatacaaaacacatagagacaaagaacagaaaggaatgaacgtgaggttaggtgcctagcctaatcccaccacattgtagccttgcatttgatttttgggtacccattggagttaattttaggtaacaatctttgagactactcgaaagaaaaaattaactcagaatgaaaatgttcacttttataatcaagatgctgagctaaaatgggaatcaaatgagactcaaaaacctgaatttgaattcagactccaccatctcctagccaaatcaccacagccattctgaatcccactttgctcattcatgaaacagggattctacaaggttctctaaggttatatggaagaatgaatgagatgacacgtatgaaagcacccaacggattcagcacttgcctttgatcaaaggatatttttaagaatctgttaattattttcttatttatcctttaccaaagcaatgacttgtctattcaccatgcgggaaagaaaaaattcattaacagtattccagacgtgataaatgaaacgtgtctgttagaatgaaaaggggaacatgaacattccacttctaggatgattattcattcaataaatatgtcttgcatacctgctatgtgcaaggcactgagttagtcctcgggacagtgcagtgacaaggcagaacccatccctgacctcatgtcgttaatattctagagggagagatgttcatcacacagttatacacagaatgtagtaagtgctagaagtcatctccttgtgcctccagaaccccctaaatgctcccccgtcaaccccaaacctacttcttccccaccccctgctccaagcctatccccattttctccccctccacaccctggccccagaaggcccccacctatcagctgcattgaccaactcctctgccttttggcatcaggtggagttggcccaaaggagatctgaggacaagaggagtgtgaggggccttcatcacccctgctccctccctgctaggtgcctgggggctggctacatcctcagctgaaaggctcagatcctgtcaggccactgtctcccttcggcaccctgtcctgtttccagtgacctctcctgcttcttgccccttcaggcctagggatggtaagagtgcccagctctcccagtccctacatactcgccattccttgttgctttccttaaccctccatacatttgtaaatacctgctttatgaaactctcctcaattacccagttataatgtgccatctcttcctgcaaaaacccttattgatagcatactcaaaccatgttagctattattaccaaccctaatgattaataataataaaggaagagtctgtgagtcagaggaagtgtgccaatgaaattggcaaaactcaggaccaacagtgataacaccctctatttgcacaaggttctattgtttagaagccactttcgttttcccatttgattcagcatctagcctgatgctttgtgcgtcttgaagcctttaatatctgcttgccaaacagacacacctgcaggtaggaagctctggggctgttattctcatttcaaaaagcctggagtgagctgaggaaaaatagttctcatttatagtaatttggagccaggtactctgatatcactgaccttccatgatcaaatcatattttgggacattttgtagactgtttgattgtcagcccatgtaacacagaaggaaacctattaggtttgcatctcatttaaaagaaggaacagctagatctatggatgatactgactggctttgaatctgccaaaatgtcagctggtggaagaatgttagaagcagcaccttaatggccatcccttgaaatctgcttcctgactagtcatgaaattcacacagaagaatcactttgtcgcccaaacatggcagagactgcagacatccagtgacacacaggggttctgcttttttctttctttctttctttcttgttatactttaatttctgggatacatgcgcaggacatgcaggtttgttacataggtatacacatgccacagtggtttgctgcacccatcaactcatcacctatattagatatttctcctaatgctatccctccccaaccaccccacccctgacagaccctggtgtgtgatgttcccctccctgtgtccatgtgttctcattgttcaacttccacttatgggtgagaacatgcagtgcttggttttctgttcttgtgttagtttgctgagaatgatggttcccagcttcatccatgtccctgcaaaggacatgatctcattccttttttatggctgcatagtattccatgctgtatatgtgccacatattctttattcagtctaccattcatgggcacttgggttgattccaagtctttgctattgtgaacagtgctgcaataaacatacatgtgcaggtgtcttttttggaaagggaagcctgagaagttatagttgaagtgtatttttcttgaggcagctctcactcttggattcctccctttccccagcacatggttcccccaacctgggttaccctcactgtgtctctgtgtctccaggttggttttctcacctagtttcctccacatccgtccatccctcctgtatgaacctgctggtttcatttactgaaaacactgttttgctcatgtcattctcctactcacaaactgtcaacgtttctccattgtttataagatagaattcaagatttttttgcttggcattcaaggccctttatgacctagcctcaccattcctttccaactccatttctccaaccccagccttcctctccagctgactcaccatgtcctaagcatgctcccctctggatgcacactgctgctgtcctcccaatttgagatgcctctctctctctctcattgttaatcatccttgaatgctgcattgaagcccctcgtccaggaagccttctctgatcacatcaacaatgaagagttcctccttaggtcttatgtagcctacagtccaggtatttggctttttaagactgtcttctatttttatctatcttttcataagtttgaatcaggaatagcaaatgtctttcatcttccatatcaattcctattaatggatagtagcttcctggagccctaagctgaacaaacaccctgtgtctgagctcagcaggaaagaatgcttcgatcaattagctgaatctgccttgagcacagggtaggagaattgtagcataagcacctagtatctcccctttatggaatatctcatctctaccatgggatggtaaactctctgagggtggggacttactcctgtgtctcccatggtatgtagggtgggtgaacaggtgattggcaggcaacaagtatgttctgatttctgtttgacagcaatataatgtggagcggtttgacttaaaaccaatatataaggagaatctagttaaaacagcctctgtcttggttttgaaattgcactttatatctcggctgttttttcaacttccaggttagagattgatgtgcttttcaagtgctgcatataagtggatggatgtcttagattagtggttccctgcactttttttctacactgcatcacctctaatgggtgatagtcacatgggtttgatggttttgtagatttacctcctttctcttccatgaagaaaagcttatcaaaatgcaaaagtgtgaaagaggtcttattataaggataaccttgaatatatgttaatcaatttttaaatgggtacaaactcaaatttttgtactttattatttataatatattggcacaataatggttatagcagttggcctagttaatggtttcatcaattgcctgaacaccatagaatcatgtaatcctatagcttctctgaaagaacaccctaatttcaatgccaaggaaactgacataaaaacaaacttttcagcctttaatacaaaagtgactgtcttgggaaaagaacattaaattagaaacacaaattagaaactaagaaaaaaaagtctaaaggattcaaatgaaccaatattaaacaattgtgttcctatctgacagaagttttcaattatgcagagctgagatgcttctatacacagactcagtttaacaggaaaaatgtgagcccctagtaaaccagtacagtgggacaggagagggggcagaagtggaaattttggaaagcaaactcaaattttgggagtcacagagaccatgctctgaggtgaaacacattgctgacagccttgttgtggccactggagatgggaaaataagggtagggtggctggagtgaaaaggctgtgttcaagtccagattactgaccttttaaaatacatcagtttatgagtgttgatgagattacaacatggtcttgacattgcctttgttcagggcacaaatgaaacacatttcccacacaaagaatgttttgacatctaatgatgtgacacctgccagaaaagcaaaagcaatgattcaaacttttccattttcaactgtgtagttgttatccagagacacaaccccaagaaaccacacacagtatagtatacaggttagtagcactagctttggggtggacaaaggttcaaagcccaatgttttcatatattagctatgtgaccttggatatgtttcaatctctctgagcctcagtttcctcctctgtagtaaaaataattaggttattttttatttgttaatattagggtatatagaatagagaaaatattaggcacttatctatagttgcgtgaagattaaatacaataaagtttgtgttgtgcattgcagagcatctgttacatatgaagtttacagaggtggtggccaaagggctttgtgatgtgactgctgaaataatgcaggggccacctacaagaaggaaatctctaggtaggatcttgccatcttggggtttccagtcccacggagttttttgtttgtttgtttgtttgttttgtttttttgtttgtttttttaataattgttttaaaatttagtttccgccagaaatgttgggattgcagcaacattcaccctcctcctctcattgggttttagctgtattgcacctgcggactgactgtactctggaaacagtgcaaactttccttctgccatcttggcggaatgcccctctccaatttctctacctgtcagacttcagggtgcccaacccaaagtcagcgtctctatgaaacctcctgcagctctcccttcttcccttccttctcctaccaccctccccttctccaggtaaagcttggtttgcttctacagactctgcctggtgttttactgttctccatcatagttattactctaataatccccctcctccccactccctgcaaccagcacacatacagactgtgcgtcggggtagcaatcagtgttggccatgccttttatcccataaaaggctcttaatgttgaatgatgattgatggagtgaatgagtgaatggctaggctaggagggtagagatgggacatccttcctccagccccactggcttctccttatatctactcaagacctgggaatgacaacagaccattgtgtcttcccaggaagggaaggatggggccaagctggaaagcctgtgggctccacagtcatgtgcctgggttcaattcccagttctgcatcttattaaccatgtgacttcagacttaacccttctgtgcctcagtttcttcctctaagtggggatgacagtaatgcctcctcatgaggctgtgaagtttaaatgaaaccgaatgggtaaaatgctcagacttgtatctgatacatggtaaagctgcatatgatgggttttctttttcttcaaattttagctcagggacttttccctgaccctcaaattcttagtagaaacaactcctgcgccccacccccaccccccaccactcaaccgacctcattaccatctgtcccggtctcgacagcacttattcctaagggaaatagctttttgggtcccctggcttcttgctgtctaccccactggaaatgtccactccataaggacagtgatcagacagtgttgttcgggcagttggccattgttgagaggtttaatcattgttgaatgacaaacagcagataaaacgtttgcgttagggctggctggtattcctgttgtgtctcatcctggccgggttgggaggggcagctgccagcagggcttacccaccaacaaatctccaagtcggtcacatcaagtaccggctggaggcagtgagtgccctgggccaaccacaaatgggcttttttagatttcaaaataatcacaagggaaaaggagaataggaggaggtgagctacgagggaggcggatttgagaaaggattgggggcacagactcggaacaaacaggagaggaggtgttggaagggataacaaaagatggtacaagggtaatgtcgccatggaaacactgcgccgcctggactggaagccaagcctcctcttcaaggtggatttcccctttgcagagtgaactgtgtcacctctctcccactcccagaaataactgtggatttgcctaagggcacatggcttcacaattcttcaagcaggcaagacgtagaggaccctggtgctggcagcttcctaggagatggaggcctagcaggcaaatcagtgttgccggggggagctgagcggactctgagacaggaggccgtgcctgtgagcagcttaacatgagagagggggtgtctacctctaccctacctggatgtttggggctcccccaaatcagggtgttcccaagcaaggcgtccttaggctccacctagaacccaccaagtcaaacctctggggggcctgggaatctgaactgtgcactccccaaatgaagctgatgcacgtcaaagtgtgggaattggcgctgacagtcccgtttccctgactgatgggcatgaaggggcagcatagtgggtggtgggaccaggcagcgtcctgggcatccgccttaggggcacagaaacgtggaggaatggtcaaggctcactagaaatgggaggcggtggctgaagtggcgggaaggcagcagggcctggtggttccgcaggggattctggggcgagtcagcctgggtctgaatgcaccctctaccgccccctagcgggccaagacttttggcacagaactgaactctacggactcagtgtcctcgtctgtaaaatgaggttgacaatatttgtacttcctataaggttattatgaggatttaagaagtttatgtttgaacagtgcagggcacaggtaaacaaggccacaaggtggaagaggctgggaccctaagtttgaaaataaacggcccttttcagactgtgagaaatcaacttttattgtgttcagccttgaggtttagcagttggccttccttgatgaatacaagtctgttaataagtgactggctagccatgaaggttcagttagttgtcagtatctgctaggacacaattggttgggtgtgccttcctctacagaaggaatgggcacagatcaaacctttggactggttaagagctgtgccccacattttctccaggaaaattttctctgcagttggaagtgaaattttgataaacttctaagctatcttcaaaggatagcgaggctgttcccactcagcctctaggagttggtccttctctggaggcaaaatgagcaaaatgaggatctctctcagtttcttacagcttgatgtaacggacttaatgcctgttgtccagacattaggatgtgtgtatgtgtgtgtgtgtgtgtgtgtgtgtgtgtgtgtatttgagagggagtggaaggattatggtaccagacctagaagtcataaaataaacaaaagaaacttttccttgctggtagtaatttaaaacattttaatactaaaacaatcatatggaatcaaatacaaagactcatatgaatttgtaagatagaattggagatttggagaaagatccccaattgctcctgactgcttcctcttccctagagtacgtgtcagcttctgcctctgaggctatttggaaagaaagtttgagaaatactggtttagagaccagtggatcctaaatgtaggtccacagccaagttctgggctgattgtgtgcaggaatcactcagcaaacttgctgagcatacagattcttcaaccaccccagaaagcccaattcagcatgttactcagaggtgcatgtgtgtacaagtatctatctctctctctatttttattgtgatgtaatttgcatacagtgaaatatacacatcctaagtttacagcttaatgaattttgacaaatatgtatccctcaggctgtaacccatacccctcacatgcctcttcccagtccattctccccaaaagcagtcactgttctgatgtctattaccactgatgagttccacctgtcatagaacttcatctaaatcagggtttcccaacttcagccctaatgacattttgggttgataattctttgttgtgggggaattagggaacgaatgtgtgccctcgaattcatatgttggaattctcaccccaaaggctatgatattaggaagtgggccctttgaggggtgatcaggtcatgagggtaaagccctcatgatgggattagtgcccttgaagaagacatgtgagagagatgctgtctgctctcaaccatgtgaggatgcaacaaaatggctctctgcaaaccgggaagtgggctttccccagataccagattcaccagctcattgatcttggacttccagcctctagaactgtgagaaatgaacatttgttgtcgaagctacccagtttacggtaagttttatagctatccaaactgagataggggttgatgttgtggcatgcttagcagcattcctggcctccaggaacagctcccaacccccatggtgactgtggtcaatagcagctccactgcctccagttgtggcaaccaaaaatgtctccagacactgcaaatgtcgcctgagcggccaaattgtccctggctgagatccagcactgtcagtggaatcatgcagtatgtatgcgtagacagctgtcttcttttcctcagcatgttttggtaattcttctctattgttgagtgtacctgaaactcattccttttgttggtcgaggaatattccattgtaagaatatgccccaatggacttctccattgtcctgttggtggaaggctgggctgctttcagcgtttggctaggatgagtcacgttgctctcagtagccatgtctaagtcttcttgcagattcatgttttcctttctcttggataaatacgtgggagtggataaaaactgttgagtcatagggtagatttatgtttaacttttaagaaacttccagttttccaacgtggcttgccattttcccttccaccggcactagtgaccatcccaaatgtctcacatccttgtccacactggtgttgtcagtctttttgattttagccattttagtgggtgtgtagtggtgtctacattttttttaacatcttcctgggtaattctcacaaacagctgtattagttatctattgctgtgtaacaaactaccccaaaacacaatggcttaaaacaacaatgcttattatctcagtttctgtggggtcagaaatccagtcatggcttacctaggtcctttggctcagaatctctgccaggctgtggtcaaggtgtcctctggggctgtgctcatctcagggtttgactggggcaacctctacctccaagcttgctcttgtggttgttggcaggattcagttcttcctgcggtgccctcgggtctttgcacatggggctctctataggaaagctttcaacattgcagtgtgttttatcagagggagtgggtgagagagagcaaggaaaatggaatgtcatttttttggtaatctaatcttagaagcattgtcttctcacatttgcataatctgttcattcgaagcaagtcactaggtccagcccatactcaaggacaggggattatacaagggcgtggacaccaagggacgggaccctgagaggtctcatcatagaggcacctaccatggtggctctgatgtgagaatgcttgatctagaccagagcttccccaaccatctgtgagagaggatccagtttagcttagtttagttttgttgtaatgctcacactcaatgtctatatttatcacaaatgagtaaaaaagtaacaacaacaaaaagtagttcatcaactggtccctacacacaaaccccactttttgtagcacctgactagaccctagggtcacataaatattgccgacatttgtcgagggttggctgggctagcctctgtcctaagagctctgcgtgagttatcttatctaagcctcaatccaaccccaggagatagatgctattgttagcatccccattttacagatgaagaaactgggcacagagaagttaattaatcagacccaaggtcacacagcaagtaattgacagagcccagactccaactaagctgtcttgttttagagcctgaatacctgaccagcaggatatatttcattatatacacgttagtgtgcataatcgccagtattagaggccagagcgacagactcttgcaggtccctttgccctggcctcactacccccttggcgggggcttagctatactatagaccccagcagcagcagtggcccatggttggcatcatctgaatactggatgctcaactggatgcttcttctctgccctccccttttttaaagttcaagtttaaggagcaaagatgacctctttttcagctggatctgcttcccccacctgcaacctcctgggtggtgcagtgctactgtaagagggatgtcccagcatgaaaccccaaattaataaacagccctaaggtgaaaaattaatcatgtcacaaaaggggtcacctagcatctttggtaaggttaaacgtttgtttacagatcattaactacataattaagttttggttttccaacataagccccataagggaaggacagcatctgtcctgtttactcccatattctgaacacttagtataggacctggcctgtagtggggctcagtaaatatttgttcattaatgaaggttcaggttccaccccccgtgccatctgtctctgcctggattattactggaggcagagccggaggcgtctgtgctacccttcatgaggaagcaggagccagggaatggtgggcagggcctgggaggagagaggacaagcacaggggcattactgagtcactgccacttggcatccagggtgactgctggatttccaggggtcatcttccaaaaggcgactgaaggcacttctgggaatagtgaggaggaggaaggagaattcattgcctgtcttcctgctcacagggctcgagttcctcccatggagatgtttggggttttttctctctttttttttattatggtaaaagaacataacataaaatttaccatcttcaccatttttaagtgtacagttcaatgtgtgtgtgtgtgtgtgtgtgtgtgtgtgtgtgtgtgtgtgtgtgataggatctccctctttgcccaggctggagggcaacagtgcaatctcggctcactacagccttcacctcccgggttcaagtgatcctcccacctcggccgcctgagtagctgggactacaggcgtgcactaccatacccaaataatttttgtattttttgtagaaatggggtctcactatgttgtccatgcttgtctctatctcctgggctcaagccatcctcctgcttcagcctcccaaagtactgagagtacaggcatgagccaccgcgcccagcctcagttcagtggtattaattcattcaggatgttgtacaaacatcaccaccatccatctccataacactttttgtgctgtaaaactaaaaatctatacccattgaataataacttcccattttcccctgccccagcctctggcatccaccattctactttctgtctctatgattttgaggactctaagtatttcatttgagtggaatcatacaatatgtgtctttttgtgactggttgatttcacttggcatcatgtcctcaaggatcatccatgttgtagcctgtgtcagaacattccttctttctatggcagaataatactccgttatatagatataccacattttgtttatttattcatctgttcatagatatttggattgcttcaccttttagtgattgtgaataatgctgcaatgaacatgggtgtaaatatcttcaaagaccctgctttcgaatattttgagtgtatacccagaagtggaattgctggatcatacagcaattttattcttttttttttttttttgagacaaggtcttgctctgtcacctaggctggagtgcagtggcatgatcttggctcactgcaaccttcgcctcccgggttcaagcgattctcctgcctcagcctcccaagtagctgtgatacaggtgtgcaccacaaagcccgggctgatttttgtatttttggtagagatggggttttgccatgttggccaggctggtctggaactcctgacctcaagtaagtcacctgatttggcctcccaaagtgctgggattataggcatgagtcaccgtggctggctatttttctttccttttgttttcttttctttttttttttagacggagtctcgctctacacccaggctggagtgcagtggcgcgatctcagctcactgcaacctccgccttctggggtcacgccattcttctgccttagcctcccaagtagctgggattacaggcgcctgccaccatgtccagctaatttttttgtgtgtgtgtttttagtagagacggggtttcaccgtgttagccaggatggtctcgatctcctgacctagtgatctacccgcctcagcttcccaaagtgctgggattacaggctatttttcattttttaagaaaatactatactgttttccacagcagtgatacattttacattcccaccagcagtgcacagaattccgatttcttcacatcctcaccaatgtttgttattttctgttttgttgatagtagccatcctaatgggtgtgaggtggtatctcactgtagttttaatggcatttctctggtgattagtgatgatgagcatcttttcatgtgcttattggccatttgcatatcttctttggagaagtgtctatttaaatcctttgctcattttgaatcaggttgtttgggtttttgttgctgagttcccctatggagctttaactctctgcacatctgggttgcttctgagtggacagagtgtccctggtgtctcacaactcagcaggcatggagaagtcccagggcagaaggcaagaggggcatggcttgagcccagtgtgaggacctgtgttgctgtgcccatggacagctggttggacacagtggggggagcaagcagccaaaggtcccagggacaggtgaggcggagaatctaaggaggcatttgaggggtctgatgcacatctgagggtgtgattcttctatccagatgtgcatgcaatgccaagaacagctgtgcacccatcctctaattgttgaatgcctgtctccactggaaatcttccctcattcatcctgcagatatacttcccaggctctattcctgggcttcaagggacacgtagacagagaatatctgattctaagtcctgtccctcctgcacccatggtggaaggctggagcaaggtctctctctagggccctgctaccctgagcacctccttcccccagacattcttgttcttcacctagaaccctctcccaggctccctctctcaacccctgaacctattttctgtttctctggcactgaagtttcagctatttaagtgcaaatatagatgcatttgaaagatgtgatggaaccaggtttgaaatgcaataaataagattgcacaagagaaggagataggtaatcagctgctgcttttgctccttgaaaagactcatgtagctgtcatcagactctgctcttggcctgggcaaaggctgtaagtcattcccagctaaagccagccatttgccacacaggataaagtgggataagaataaacagcaaatgaggatgccttgggctggatgcagagattcaagagggtttctttctaccctaggcccagtttctctacaccagggtcatgatctcctgtgatgcttgaaaaaggcaatgcatcagtttgggatgctcttggctgcaaggcacaaaaatcccaattcaaactggcttaaacaataagaacagtactactcacgtaacttgaaatgcagaagcaagacagattgctggattggttggctgagcagcttaatgacattgccatcaaggacacaggttctttctgtctctccactctgctgccccaaggctgactcaccttgcagtcacaaggcagggccacccgcttcctgtccagggaggaggggacttctactactgtggaatccaagtccctcccttccatctgggttggtttccccaggactggtgccaacccctgggaatcagtcaccaagataatgccaagaaatggaaggatctgacctcttcctgggagctggggatgggatggaacctagacaacctggtgttgtgtagggcgggtagatgggagagggaatggatattggtagacaaccaagaaatgcccaatcttttgctctaggggtgcattttaagctctggtaacaagctcctgaggttatcagggacatacaaattgagatccactgaggagggaggaaggcagagccagagtgtcaagacttgaggcaacacagagtgaacttcattcagagctgagcccagtgattatttcccccttgaaaatgcaaattcatccaaattgcatcaaactgggaatgaagcccagcccttttctcagacgattgaattgggatgaaaccaaatataaacacaaaaatgtttcccagaccacccaaacagtcttagttctggtcccaaccaagtgacagtagagggtgactttaagtcaggtgtgtgctgaggcccagcagcctctgggaacgcttttgtgccgatgaatgggagggagtggcagtgggtgggcccctgagatgctgtgattgccatttagaatccagtggcaagaccgacagggattttgcagggggcaagggggtggtgttgagaagcagctgcagggcaatggaaatgacaagaaatttgaagtgaaaacatctggaggctggatgatacataccacttgtcagttgtatgatcgtgagcttccctgagcctcagtttcctcattgtgaaacagtaggatgaaggtaatacagagttatatgagatattgaaggtggaggtgactttgtgtagggtagaaagacggggacattagtcatcgctctgtgtgtctcctccaaggaccctgagcatctgctgtcagaagcacagacttttactcccccaagcccggtcttcgcctctgccttccaaatccccctctctttcaatgtctcagtcatgccctggctcctccctgaaggccagctcggcctcccaggcacccctgattgtgccctgcatgtactgtgcactggccatcatgtgttatttacacatactgcctcccgtctgcttctgtattgtggtccagagtggccaaatatacttatttatttcacctgtttgtgatcatccctaactcacctatacctgaaaataaagcaatggtgtctctcatctctttgcagcctaaaaaagcaactcagaatgtggagtgggatagcctgcaaatcacttgtcacttaaggtgacggcccagagaggtgaaatgacctgcccaaagtgacccagctccagcggcagggttggtactggaagccagcctccttgatgccagtgacactctcagtgggggtggaggtgcaaaggggacctgattttgtaaatcatacatgtccctcccagggtgactggttgctgtgtgtaacaagataatgataaatgtttttgatggggactgctgtgctggggaaagatttggaggcaggaaaaatgtcgaaagccatgggggcagtgggctttgggccaggctgatctaggcttactctgctgctgccctcaccagctgcatgattccaagtgacttcactccaccgaagtcagaaatgcttttagagcctatgcgtgccaggcacattcagtggtgatcaggctagaatcaggtcctcgcttgggttaccttataatctactgtgcagtgtttctgagagaagaactgagggtttcttatctctccgagcctcagtttccttatctgtacaagaggggtaagctctaccttttagggaagttcagaagaaaacacttggaaatgcaggggcaggaagtggttgtccaagaggtccccgagagtccggcccctgcttcctgcccctttgggccctgctgcagcttcttatccacatcccctctgtttgtccaatggatgaaactaattaaggaatgcccctgtcacctaggtccggtctccttcaggaatggttggggacagagtctcaaccagggcagaatgtccaggattcatcctgggataattaaataaagagggtacaaaaattagaaacacaactttttgaaatagtgtaaactgttaactgcctctcctgccagaccacgtccactccctcccctacacagtgcaggatcactgctgccactgggtagggcagcctgagtcctgctgccagccatctgcacccactactcgcttcagccatggagatgggagggccaggagggctagcatggagggcaggaggtttcttgggagactcagtcatagacctcagtcttcagatccgcctgtcttaacctgagggcttttttatgggctgcccacccagagtgccagcagtttaagctctagacctggccttcaatcctgaggaccaggaaggctcctattgctacctgtcatacaactttgagtctctcaaataggagggaaagacagaagatccctgtcaatgtctctgtagatgctgtgtgaggagccccatatacttaagggttgacaagcaggtgggtctttttgaaaagaaagattccctttcgttccaagcgaaaagggcctagcctagagcacacaattgggcaagtggtacacaggctacattttggcttctactctgtcctcatccagagatttttgtgcagtgcacaaaccattcaatatggcagccctagtcacaggtattgattgcatgctccctgtgagctgacaccatgctaggcacaagggacacagcaacttgatgcccagtgacactcttactgggggtggaggtgcaaagggaaattgattttgcaagtcatacatgtctctcctagggtgactagttgctgtgtgtaataagatgataaatatttccgatggggactgctctgctggggaaagatttgaaggcaggacaaacattgagagccataggggcagtgggctttggaccaggctaatctaggcaggagcaagacaagacataattcctgtgctcatagatctcacatgctagtgggagagtcttaatacaaacaggccagcctatgaccaaaacaatatagggtgagattgatgctgtgaagcaaagagtgggatgtggtgatagggagggacaggcttgggggagggatttaatttagattgtaaggttagagatggactccttggttcagacttcaggtgtgagatggagccagccatgcaaaaacaggtggaggtaggggtggacagtttgggaggaaaagttaggggctggaagctggaccaaggaaagagcccaagctgtttgagaagcagggagctcagtgactggagatgagcaaaggaaggattgggggcgatatcagagagatgagcaggatcaagctaggcaagctgcaaggagtctggattttgtgtggtgggagccactggcatttctgagccattaggtggagaagaggagggaggaagggagaagggagaaggaagaggcaaggggagcagatgagagcagcagagtggggaccacctgcagcaggtccaggcaatatccatgggcgcagccataggatggatgggccgatggatggaggaggtatggatgaacaaggcccacatctcagtggattgtggatttgagtgggtttggagatgatgttagaccttcctaggttgtgctcttcagagcagaatgaaaccacaactctccctctgcatcctacaacaggtcagttcaccgtttctcccttccatggggggaaacagacaagagggctcctttgtggactaatcagagtaatttgtgtttgcagttcaatgttaaaaagtccacggaacctgttcagccccgtgccctcctcaagttcccagacatctatggacccaggccagctgtgacggctccagaggtcatcaactatgcagactattcactgaggtctacggaggagcccactgcacctgccagcccccaacccccgaatgacagtcgcctcaagaggcaggtcacagaggagctgttcatcctccctcagaatggtaggggtctcctgccccctgcacttccatgggcagcactccagtggggcttgtcaatgtctctgtagatgctgtgtgtggcctgatgaggaggccgagtgccccggcatttgacgctggccaagcagatgggcactgggcctcagaattatggtcctttcttcctgacaacatgttgccatagcacttctcccccagaccgccaactttccactggaaaatggagtccctttcaagtcatatgtgtgcaactatgagagaggataaagagccatggttaaaaccatgggcttcagagtcaagggtttaatttgctgccctttcatacacttattgtgtggcatgggtcatgctgtaactccatgaacctcggtttcttcatctataaaatgagactagactattatctgtctggtaggggagttgtaaagtgtagataaaataacacacatagaatgcttaattcagagcctggcacaaaggaggtaacaaaaaacatattgggttttttgttgtttttttgagataaggtcccaggcactttttttttgagatggggtcttgctctgtctcccaggctggagttcagtggcatgatcgtgggccactgcagcctcaatctcccaggctccagtgatcctctcacctcggcctcctgagtacctaggactacaggtgcatgccaccatgcccagataatttttgcttatttttgtagacatgagatctcactatgtggcccaggctggtctcaaattcctgggctcaagtggtcttcttgccttggcctctcgaagtgctggggttacaggcatgagccaccatgccccgtcgaaacatattgttattatttctactctccttttcatcagcatccacatcaagagtgcagcacctttaggtgtaccatgctgctgctgggcactggggaagatatgggaagaagagacatgatcgtccctgacccaaagaatatgtaggcgttttagaaagacaaaacataaagcagggagagtagattgttgtgtagtctctgttttgttttgtgtggttgatgagggagccagtggacacagatgcagcctaatgggctgtgacattgaccccacctgttgtcttggtgtggccactgtgattctgcacacagctgggaagacttgggtttgggttcctggcataggtgatagagatgagaaaggtgtaatcaggaaagcagaaccccagtgtgggtggcagtgacgatttcgactttcttaacaggtgtggtggaggatgtctgtgtcatggagacctggaacccagagaaggctgccagttggaaccaggcccccaaactccactactgcctggactatgactgtcagaaggcagaattgtttgtgactcgcctggaaggtatggctcttatttgactctcgtgggcttctgtgtgtctatctcccctggagaagctgtgcaggcaggatgggatcatctgcagctggagagagcactggattaggactctaacaaccagaccctggaacacatggagcttagacacaaagatttcccacactcccaaccccaacagtccaaagtggggattcctggttgacaaacgttttttctccaaatggtgattcaaggaccagactccttccagctgtggctccataacccccctctccttgtcatttgtatccttgccatctgtatctggcagatggaaggagaaagagaaggagagggcgtaatcattccttaacagcctttacctggacttggtggacgtcacttccgcttgcatcccattggccgtagctcagtcacatgagcacactcaactgcaaagtgggctgggaaatgtgggccgacaggtgccccggaaggaaaggcaatgagtttggggtgaagaactagtcgtctctgccatagatgaatttgaaattggacagggctttgtgctggacacacagcatgttccgaatggtcagaaaagtttctacaatctaagagccaagcggcctgagggtggcaggatgtccttggtttctctgccctgacaattcactttaaggtcagcaactaaagctaagactttgcaaaggaatcagggctagcaatggggtcagataaattggaattttgtatataattctattttctgaggctttttccttgtattatcttttaagattttaaagcaccttcctcctatactttattatgtttggtcttcacactagcgcattttacagattaggaaactgaggtctggcaagtcatatgacttgtcaaagatcactgcatctaactggtgacagagccaggactaagcaatcccttgaagttcagtggaaagctcttgctgttaagacacatagcctcagttcttcatcttctcttcttgtgaaatgtcagctaccactttccaaacgatccctgaagagccagtcagaaaagtacccaaggtgtacatttctgggcagagccacacattgtgaagcattgaaaacaccaaggttcagaacataaagccacactcactcatgaggtaagagccaagtgattctcatggaaaatggttatgtggtgactatttaaagttcagaacaaatggttacatgtcagcagcaccactaataaaggcccccagcagcaagccttggcaccttggcaaaatttcagaatccggagttcagagggctccaggaaatgccaagtcttgtccctgctctccaagaaagagaatcggcatgtgctgaggccagccccctcaaatgatctatttctaaatgtctcactgaaaggcgattccctggtgcccagggtggtcagcctttctgacacccaaggtcacgtcgttaagctggattccacagccctaagcaaggcgtgcttctgccccctccacttgtcctcagaaagtcccacgcctgtgttgttctccttgcctgcagctgtgaccagcaaccacgacggaggctgtgactgctacgtccaagggagtgtggccaataggaccggctctgtggaggctcagacagccctaaagaagcggcagctgcacaccacctgggaggagggcctggtgctccccctggcggaggaggagctccccacagccaccctgacgctgaccttgaggacctgcgaccgcttctcccgtcacagcgtggccggggagctccgcctgggcctggacgggacatctgtgcctctaggggctgcccagtggggcgagctgaagacttcagcgaaggtagggtaacccctgggttagaaaggtaaaacctgcccgtgcagcatgggatggcagaacctggtgtcctcccagcaactcagtcttagggaacaagcctcagagacctccctggcttggggctggaagggaggttggaatcttgaatggggcagagggctagaggagacccatagcccaggatctgggattcctagtgtctgctcctagtcttggctctaacttgccatgcaaagactctctctgccgtcatggaaaatgccatgctgtgtgtattacctttactgctatgaagtactgtccccatttcaatccagttatactctgtgtgctcctacgatgtggcagacactgcaggacactctaccttcctccgtttgtgtaggtgagcatgaagggtggagccccaccactcaggagtgtacagactaggggacaaattggcacagacaaatgatgatgatatttgatgtgttccaccctgagccatgtaagagagacctaaccaatgtgctctgataaagaattctagaaggccccgtgtgctaggctctgaaggagcaatcagggctgggggcaggcccagagcccggtggtccatgcaatccccagactcaagatgatttccccatatctgctgttggggggccacaagtgggaaagaagggtcttctgagatgccacagccctcaagagaggggacccttggggagaaaatcattgtttcccatgcgccaggacagcaaggggatctgggaaggtcagggctacaagatggtatgtagttacttaggcccctgggtcaaagctcatctaagggcctgcactgtggttccttgaggaaaccttctgggtgactagtctctcaaccagatcggcagtgctatactgatctaaagactgtataacctgcatagccccaaataggtgttattatattagcccctttccagaaaatgtttgacaaccctcatgctaaagcaaaaagcaaaatactgattagggcactattttttttttttttttttttttttttagacagagtctcgctctgttgccaggctggagtgcagtggcgcgatctcggctcactgcaacctctgcctcctgggttcaagcgattctcgtgcctcagcctcctgagtagctgggattacagccacacgccaccacgcccagctaatttttgtatttttagtagagacagggtttcaccatgttggccaggatggtcttgatctcctgaccttgtgatctaccccacctcagcctcccaaagtcctgggattacaggcatgagtcactgcacccggccaagggtactattttttaatgctcaccatcagttactatgcttaggactctacctgagtgctgccactctccaaatcaaccagatgagagagacaccatgactatcccccttacagatgaggaaacagggtcatagcagttcaggaatccacacagggtcccacagccaggaaatggcagaccttgaggccgggttggtctgactcgaaatcctgtgctatctcattacctgccatgaaagccacctgacaaatatgaggtgtgaccagcaggcacctttcctaatagacacccagactgcaggagggaagagtacgtttcacccgctgtctgctcctctttttgctatgatttcctccttgctccattttttcctctttcccaggctcagaaaattgttagaaaaatcacagccactctcagatggaactcagctgttccaaagcccactctctaattagtgtgtgatttgggacttctgtggaatcacagatggggatcctgggagaaggcatcaatacttaggattattaaactagtaaactagctttctctcgagatgcagagactcccctgctgggctctgagacttggtacagccccaaagggcagaaatccagccaatctaggcagaagtctcaggcacctagcagcttctctcactgccctctagaagagcagccatcattcactcattcattcattctgcaaataccttgcccagtttctaccatgtgccaggcgctgtgccaagagctggggacatagcaacagtaattaagatgaagccctgaccttgcagctcatccatcctaataattatcatactttctgtagctgtttctgttctgcaaatatgtactcacaaccactttgatcactgacctgtttactacaaatgtgaacaacctcagagggtggcatggagtcagaagtaggaggtgactttctgggtgtatagggcaggagaaagctggaagtccaggccaggcagcccctcgccccagctagagggtgtgggctgatttgaacaaggtgagtggagccctcagtcattgcagcccagatgtttttcttctctaggccagatgggttaacagacttgcccacggtgcccagttctagctggaagatactcagccaaaagtgccatgtgcatcaagagtgactcacagggcaatccactccaagagcagtctttgattattattattatattttaagttctaggatacatgtgcagaacgtgtaggtttgttacataggtacacatgtgccatgttggtttgctgcgctcatcaactagtcatctacattaggtatttctcctaatgctatccctcccccaggcccccacccctgacatgccctggtgtgtgatgttcccctcccctgtgtccaagtgatctcattgttcaattcccacctaagagtgagaacatgtggtgtttggttttcagttcctgtattagtttgctgagaatgatagtttccagcttcatccatatccctgcaaaggacatgatctcattccttttttatggctgcatagtattccgtgctgtatatgggccacatattctttattcagtctatcattgatggacatttgggttggttccaagtctgctattgtgaatagtgctgcaataaacatatgtgtgtatgtgtctttatagtagcatgatttataatcctttgggtatatacccagtaatgggatggctgggtcaaatggtatttctagttctagatccttgaggaattgccacactgtcttccacaatggttgaactagtttacagtcccaccaacagtgtaaaagcattcctttttctccacatcctctccagcttctgttgtttcctgactttaatgatcgccattctaactggcgtgagatggtatctcattgtggttttgatttgcatttctctgataagcagtgatgatgagcattttttcatatgtctgttggctgcataaatgtcttcttttgagaagtgtctgttcatatcctttgcccactttttgatggggctgtttgtttttttcttgtaaatttgtttaatttctttgtagattctggatattagcctccaagggtagtcttgcatggttcactaagacctgagagaaagagaggggcagggaaaaccagggaaaggaagaagaaagaaaggattactttagtctgcaggtactttcagcagcagtgcccagggagcaggtgttgaaattgtctggctatggtgcagccggctaggctagttagacctcaccctatgcaaaagtgaaaagccctgcagaggctgacaggtgctgactcctctcacctggtctgtaggtagcagaggactcaagtctggtaaccctgtggctatagcccgggctacctgtggccctctaataatcggtgatgagccaggaggctggtgcccatcccaactctgcagtcacctctctgggtgcctggtacaagtccctgggcctcagttccttcactgtgaaatgagagggttagggagggctgtcaactgagaaagctggagagccatggattcaggacttaagttttgctgtcagactggacctcctttccaaggcttggttttgccacttcctgcctacatgacctctggcaatgatgttccctttctgaatctgaggttcttgtgcttaaaatgggaacaaaatcagtagccctcttgaggttgtcatcaagattataaatggaatgtgttacccttttttcacaaatgtttattgtgtgcccactgtgtcccaggtgctggagttgcatagtgtgaatggaggccacagtggagcttactttctagtgggatggacaatgtaattgcacttcacacacagtgtttaataaatgttagctgctaccattcatttcatggccaagatcctttgaggctcccaaatcatttcttcatatgaccagtccctcaagacttgtggaatcattggggtcatgcagaaatggaggcttagaaaagttaagtaacttacccaaggtcatagaggtagtaaatggtaggattggaactcagacacagttaatctggtttagagtctatgctctcagcattactcttattctgggttattaataattgttgttttgactgttgtcattagaattgtaatttatgacctttactaagaacttgctatatgcattttctcacttcatcctctgatatctatatttcttcatagcatttaatgctgcccgatgttatatatttaatcacttcctttctgtcttccccatgtgactgcaagcttctttgagactgattctgtttagttcatggctttaattatggcatctggaatatagtaggtgcattgcatatgcttgctgaatgaatgaatccactagaggccacagtgagcaaagaaaaaccgatttcaacccttctgagtgcctggtccaggatggatgaacagacatcctgggtgtgacagaaggggaggaagcttagggagtcacggtggctgttagccagggctccagcctggtaccagacctcattgaattaccctcattgcacagctgggaaagagggacaaagctggagggaagggccacaggactgaaagctgtgacatctggagggacaagcttccatggggccttcccccactcccactccccactccatcttggcacagcaggccacacatctgcctcttccttgggatttcgagggaagggcatcttcttcctgctcaacagaggagacttctgaccttcagctgatccctgcccacacactcccttctctttcctgccaggtctccccagagcttggattgcaaccaaacacccacctcctaggaggggtctttcggtcattcttgtcccttgacggatttgttgaaattccaaataaactcctgtacgaatttcaggagagttactctaaagctgcgtgcagggatagatgtgtttgtttggatgcctcacaggggcatcagcacctccttcaaggtgtggttattgccagttgcctctgggcatgatctaccatcatacaccccagcacttcattgacattacttgtcattctgttgatgaagcaacctcctggagctggaaagaactatcttttcaaacatagtaatgaattacaattctcccgctgccccaggaacctgatgggtccatgcagggattctgaaactgttctctgaggccctagaggacagaggtgtcccaggagcttgggggtggcagaaggtgaagggtaatggggaattctggcctcctccccgctgctgcattctgagtagcctttctttgttctgttttgtatgttggatttgagtatatggtatatgaaaaatcacattttgaggcaaacaaagaaactgctattgaagcgcatgccgcatggaattcctctgtgccttgctctcttctgcaagggtggacaccccagcattgacgggtaaatggtttcaaggatgcgtgttggatgcaaatccagcatggttccagcttcagcatttgttgatgggttggaaggcgtccccaggtgagactcccctcctgcatctccttttctgtttcaggagccatctgcaggagctggagaggtcctactatccatcagctacctcccggctgccaaccgcctcctggtggtgctgattaaagccaagaacctccactctaaccagtccaaggagctcctggggaagggtgagtgagatgtgagaggatggccaaggcccctccagctaccgggagtgtgtgctgagggaggtggtgcctgggaggaaatggtcacaggtaagcagggaggtggaatatgagcacatctacggagccatgctcagcggtgttcttcaccctaagttcacaaattgattttcgaggacacactcacttctatgagttcccatccatttactcttggaccaatcccatccattaggaccccagtgtgagctacctggggttccctaccttggagatccactatgagaaccatcagccctaaccacagagcacaagaagccaagggtcagactatagccgtggagtgaagggcctgggctgtcgggaaaacttggcccagcccttgtcacccacacctggctggacccacctttcaggcagatgtcaggaaggccaggttattcccctcctgtctgaactcaccaccactgcactcctgccacccaccccagtctcttctctcttctcagcctttgccaactgccaccctcacaccagctgagtgtgggtgatggcagaaggtgtgtgggtacatgggctgaggcctgaggcttcaggcgtctgtgccccatatacccaaataagcttttctgcaacaccctggaagcctcagtttttccttctggataccccagcccaggtccagcatctcggagaccaaaacaagctctcctatatgagcaggaaagcatcctcagctagccagataatacctggactggaagccacatgcgcctagcaagatataaataagtctctatttatagcagggtacaaataaagaattgccactgcattctgaatttcgagcaaaagacttggggctaatggaatcagaagagttggtcttgctggcaggttcctgagtcaaaggtcaaagttcaatgcttttatctcattccctttagacaattctttgcttcttgctctcttttatagctcctgtcaggacaattacagtacaacacttcgtctctcaactctctctgtagaaataacaaactaacctcccagaggtgataattacagcaataaatacaaagtaacaattattctcacattagctttggaaacattgactaagtaatccagtccagccttgtgatgtgacatgaaagctcgcctggtgacctgtttgtggatttccttggggccagctctcttggtgcagtgccctgggtttgggggagcgtgcaggaacaggcagtctgccttcatccctcttccacatgaagttgggggtcttcaaataaaactttaaaaagtacggatgagaagaactcaaccaaccagcaggggatctcctattttgataacagacaaacatgcttacaccaagaatcaaggggatgaagagttgggagctggcttcatttttctggtctgagtttaaaatccagctgcaggacccctgagctgttgtcatggacctggtttgatgtgaggatgtgaagtcatgtagcaaaggtggttccctcttggtactctaacatgccccagtcacaggccacccagtggccagccttctatatcatggtattggccgtttcctacactttagtgtcagttctatggaggcaagaacttctgctgcatccccacatctagaccagtgcctgccatagggtaggcacttaatatttgttgaatgaatgcatggcctagtgggggagtggagaataatccccaatgcaaggaaatgaaagcatcctggatcgactcctagagttatagattgtccgggtgggatgctttcctgctggtatagcagagccttctatggtcacatagacttgggacctgtgctggggtatccagaaggaaaaactgaggcctctaagatgtttgggtatatggggcacagatgtccgaactcttgagcatctttccagcaccaggagggagctttgtcctgggccctgccagatcccagaaactcactcttgtcccttctctctgtctctttttcccctctgcccctccccagatgtctctgtcaaggtgaccttgaagcaccaggctcggaagctgaagaagaagcagactaaacgagctaagcacaagatcaaccccgtgtggaacgagatgatcatgtttgagctgcctgacgacctgctgcaggcctccagtgtggagctggaagtgctgggccaggacgattcagggcagagctgtgcgcttggccactgcagcctgggcctgcacacctcgggctctgagcgcagccactgggaggagatgctcaaaaaccctcgccggcagattgccatgtggcaccagctgcacctgtaaccagctgcccagctgcctcccttcttggacagccctgacccgtcctctgcaacctcctttctgtgcccctttcctcattctgacacccagaagacagtgacagatgtgtttgcaaggctgggatggctctctcatcatactcttgtttcttagaaataagcaagacagagcaggaaatggaatatgcgggtcacactgaggaatgcattttgctcatctgtgttattgaaggaggtgcttattaaatacagttcctatgcctgttttataggtggggttaggccagatgcagagaaagctaaatgtgggaatcatggatgcaaagaagaatttggctttttgaaaaacaagcatttcaaaaatgatgaaggaagtgaaagtatcctggatcaactcctagagttagagattgcccaggtggaaagaaaccttagccagcgttcaatcaagctcaccatgcagggcagtcacccggcagttctcaaactttagcatgtgaagagtcaccagcagattcctgggctcgcctggagacattcctagtcggtattcctggtcgaagcccaggagccttcctttttaacaagctgatgtagagggtggagcactgtatgtggagaaattccttctacaatattccacacaggtttttggccacagtccttgatggagtcccaaaaccatggtgcagccagttccaatgctggacacctcaaccatcagggtgaaatctggggcctcagctttttaatttaattattttaattcttaatactttaatttgtgcatttcataagccccctgctcttggactgaattttgtgctttttattgaagaattttattgtttttatcttaaaatcagtttctattatccttggggagaccatccctaacaaagtacaggtgggatctcctgtgagtcattggctgggttctgattgctagatgtcacacccaccagcatcaccaaagtgactctgagatagaccggtcccttctcagcgttccagtcacttcaggaggaatttagttattgacttagtctatgacatctggctacatgtaggtagagaagaaagacaattttaaaaaggaaatcaggtcttttgcaactgtgcctccctctgtctgttttcacttgaatgggtaaataaccagcagctaggttttgaattcctaccttgttattctaaacagatgtccacattgttaattaaatctaaattatgagccttgctgagtggatacggtacttacacctgaaccaggattcctgggttctgttgttgacattgcccttcagcacctgtttggccagctgtataagataggactaatgactaggaagcctaccccaatgaatgatatactagatgaaatagtgttcaaaacctgtaggcactctctggctaaaaacaaactctgaggccaccagcagatcatctttaagctaagttactatttttcacctttttttttagacggagttttgctctttgttgcccaggctggagtgcagtggcacgatctcggctcactgcaacctccgcctcccaagttcaagcgattctcctgtctcagcctcctgggtagctgggattacaggtgcccaccaacatgcctggctaatttttgtacttttagtagagatggggtttcaccatgttggccaggctggtcttcaactccagatctcaggtgatctaccctcctcggcctcccaaagtactgggattacaggcctgagccaccgcgcccggcctatttttcactttaatttggcagctgagaatgcccaaaaagtgccagaagcatcgtggcatttccagaaccatggattctgcctttggacccctctctattaatattaaaactctgggccttcagatgtcaccctaatccactgccctaagacagaatttctggacaagatgggtaagggcttcattccttcaacaagtcaagtcatacttggcctctccctgagaatctgagcaggagccttataacctgtggtcattattttttctttctgtacagaaatagaaaagcattagaaataacttctaaccatcctctgaaaaaacagaaaaaatatcgaatccctctttcatgagaagtcttttggataattggaaaccttcatcactgaggttggccagcccctgccaagtgttgtgtaggcaaagcacttgttagtggcttcctatgaaatgttttagagatctcttcaccatactggtttcttctctttggttggtgtgggtaaaagaaaacaaaacatttcctataagctgaaagctgaccagcattctcttcttggtaacatctactactccaacctagaaaatttggattctagaccaaaaatcaggaaacatggctccttataaatctgtgcagctgccttatagtaccatcaaaggaatttcaggtgggctgggcggggccccgatcccagaattatcaactccacccatcatcatttggtcatgaagcatcctttcattcttcttcttcttttttttggggggggcggggcgggggagggatctcaaagttttagtcttccagaatccaaattaaaggttgcccctgatgggggccaggttccgccacagaacatcttagatgtcagccttgacctcacttagcagggattacagaaatgagatacattttgaaggagagttgtctgttatgttcactgtattctaagtgcctgggataaagctgtctcatgggtgctccatatatattcatatatatttgttgagtgaattaatgaattaagagtggctggcagagtaggcagaaaaagacactgcaaatggcataaaaattaaagtcctagctgagttctcaatggtaaaggcatcagatgtcttagcagtcaagctagaaattcatgacaatgagtattactatttgcctaatggcaactcattgctctccatgtaaatgtaatcaacagatgaagagaatataattgctctgcttttccactaaaactccatcttagtgaattttaaattatccagagatgtcaaactgccaaataaaaatatttcagtagtctttgcatcagcttaccttgtaccagaaacatttccaatttactatcaaattatagtaactgagcctgtgtgaagtatctcatcattttcgaaaggaacaccttgtgtgatgccagtgagcatttctaaaaagggtgtgaggtagaggtaaaaataaggtgagagaccatttcagaatgcactgttgctcaaaaaggtgatctggttctttcttcagagatttctacggggatagaaaatcgggagtctgccctcattaatctgtgattccacctcttgcaccaaatcaatatctatttgttgagcacttattgattaagaccttgcatatgtctgtccattttgatttgagatacaactttttgtgtgggttgaatgacaaatcactccaaacaaagctgggcacagagaatcagctaggagaccagttattcagggtccatttctcttggatgtaaaggagtcctgggtaaaatgtggctgtaacctaaaccaactagtccttgtgatttgtttctgccctctgtgtttcctgttgtcaaatgctaagtgtgtgttttgcagtcatgaactaaagcacaaaaagatgcatgagacattgtagtcatatgtctggtgtgacactttggagcaaaaaccttgcagtggtaaataaaaaatttccaacagggtcagctgcctggtgttttctttttttccgttttacctaatattttggcatataaaatgcagaagaaatcatctgataagcacttatgagccactgccatgtttaataaaacttgacaactacaattgaagtaccctcagtgccctttactcagaagaccatgaccttggatttggggtttatcatcccaggcattccctcatacttttattacatgtctctgtaagccctgagttccataaagtgtttttaaacttcatttaaattgtatcacactattttcactcaacattaaatatttcagtttcatctgtgcagacacatgcagctccagtttatttctttttcactgatgtatgatattccattgtatggatatgccacagtcctatgcagttgatgtatatctacatgtttctttttcttttttttttttttactgttacaagaaatgctgctatgacattcctctgcatgtctccttgtgcgcttgtgtgagtttctctaagacatatacccaggagtgagtcatagagtactctgtgcatgtgcatgtgtgtgtaccttggtggccttgcttgagtactgaatcaaagaggctacatacaattaggaatgccaaggttgggtgaagcttttcagggatttggcttcattgctggggagaaaaatttggtggaaactactaacttctctttctttaacattccccaaagaaatactccatcaatggaagggtctagtagcagccagtggtactcatgaactcctggtggcaagcagggacaagggcactcctggagtcctgtcatcctaagccttcctggtggccactacagccctggcctctggaggaagagggattaagcaaggggcagagcctgaattttcaagctagtagaaaattagccaggtcacacagaattaaaatagaaggttcttaaataggataaacaatccataaagaaagccatgagatgtcgttgctttccaagtctgcacataattccctattttatattatgtatacacatacattctattgtaatggcaactagcatttaaattttcataataaagtaggatcagttggttttatcccacatagtcgaatgttatgcagactatgtttcacaggtaactatgaatatggcccacctgaacccaaaactcatacttaagagtctggattgatgtaaaagagaaacggaagagggaagcagagttcatgagtcactttatacatggactttccattgaaatgcttcgaataacaagcactgttcctgcgtataaaattgactcatgtctagagcattgcctcagaagctgggaatctgcaacccggcttggctttgtgactgaccactgtaaaatgaatttggagcaaatgatcactaaggctccttccagctttaacattttgtgattctatgacctagactgtcaacagctttggctccttccagctttaacattttgtgattctatgacctagactgtcaacagcttttttttttcttttttagacaaggtctggctctgtcacccaggtcagagtacagtggcacaatctaggctcactgcatccttgacctcccaggctcaagcaatcctcccaccttagcctccttagtagctgggaccacaggcacatgccaccacacccggctaattttttgtatttttttgtagagatgggattttgctacgttttgcccaggctgatctcaaactcctggactcaggcgatctgctcactttggcctcccaaagtactggattacaggtgtgagtcaccacacccagccaacaacttactttttacacataccttcagccttctatcttgtgcataaaacaaattaaacctacatacatgtgtacttgccctccctgccccatgcctacctggcaatgtcccccggtatctcctgacactccctcctgacagctacccactcctctagacaacctgaaatggcacctgaggcttcaagtcagcctcttctcatttgcttaattgctaatggagctggtggtaattttccatccaagagtttcatttttttttttttttagagccagttggaagcatcaccatttcaggagctctgaactctagcatctgttctgtctccctcctgaggcagacgcctggcaaggataaagccacaggatgtggctgtggatggatttagggagctgggcattttcttagtccaagtgttggagaactgtccccttgctccacttcctcatctcctgcaggtgagccagcacagatggcccctggcagggacctcagcagcttcctcaagccagagaagaagacccctaccttggaggaggatgggaggaagccagactttctcccagataggcgcctccatctctagaagccagacgttgccatggaaactgagctactggtggccactgtgtgatttggcccctgtgctcgctcatccccagccaggtttggtctcctgtcagtgcagcctatccatgctagggcatatagttccccagctcagtttcccagtgccctttcttggtgtttcaggacagcctgttggcaagtgagcaatggcagaaatcctgtttcagaaacctagggattacaaccagggacaagcaaggaggaacctgcttttctagccagaacaaacagaacctctctgcagtccctttctcgggggccaggtgagatgagctgcaggaagcagaacaaggtgccctgaggatctctctgagaggggaatggtgattcccatttaggtagaggcatccacgccagttgaagatgtaagtggctctgtattaaaagtcaccccaggcagccccagggattctggatgaaagaggatggcagcaggaaaccttgacgcttcctagcacctcattcaccctgatcttagcggtcgcaatgaggatgataatgataatcagcacctagtaaaccatggctctgggctaagcactgaagagatagaataggataagtgactcatccaaggtcccataggttgaaagaggcacaggaggatttcagtctgggacggtctaaacctaaaaggtctaggctctggggtacagccagtagcccagggtctttattggaagatcacttacatgcataggcagtagcttaaaaatgctacttggaagcatgaactctgagaatcaccaagctggaaggaactggaaaagttctctttcctataggaactaggaggcacctggctggattgggcagaacattgtccaaggggcaagagcaagttggaatggaggggaactcaagtgagtaccatgggaacaacctccagctttgtggagtaggggctgggtcaaggttagatgcaaccagaggtcaggcgcagggtctttctgatcaaggaaggaaaccaagatagagacaggcaacatggaagaacctaggacctcagctgtgaccaacacagcattgcaggagttgcacttctatcaggagtggcttaagttcattcaccccttcaatacccactgattaaatgcccactatgtagcttttcccttgtgggtgttaccatatggaaggggaagacggacataaaacaatctctgtctttctctatctctctctgtctgtctctctctctctctctctctctctcacacacacacacacacacacacacacacacacacagagtaattatacagtttagataggctggccaggaaagacccctttgaggctgcattttagatgagacctaaaagaggagaagagttcagtcatgtaaccatctgggaaagctatcccaggcagggggctcatggcatcagaggatcccgaggtagaaaagagcttagtgagttgaaggcagtgtggctggagcccagtgcaggggaggacaagatgaggctgggaggtaggcagggctgcactgtgtggggctgatgggtcataattaggagtttggattgaattataagggtaatgggaaaccagtggaaggtgttaggcagagcagatgccatgactgaatctaagttttaaaagatcattctagaaattgttgcatggtagcctttcaggtcttcaggcagctggtcattctcctaagtcctctctgggttggactcaacttgcccttgaatcttggggaaggagggacaggagaagctggggaaaagagggaggaagggaatggaatagacctcacctccttatcatttcctacaagccccactttggggagaccaatttcatggtgaagtgcaaatggggagtctttccttcccttgcttcctggtgatgaaatcattaacatgttccagatactgctgcaaaggtgggtcaaatctgtgtagcccagcatgggggcgggcctgagcctggttcacttgggctgatttggtgtggacagctatgtctctttgctccttctttccctacacctcctctgggaagaagaaaactagactgttccatgggtctgtagagtggctttcacaacaggaggcctctgagtgatcaaccacgggaaggaagccttcaagggctgggaggaaaatggcagaagacagaggttaagaaaaaggaactaggaaggctcctaaaaggaagacaaatgggcagggcagggaaactgggagtaggaggaccgagcagctcaggaggaaaaaattaaaacatattatgtgtcttcactggatttatactaatttttgtaaaacaatgtggggaaagcatcactcatcacccttataccagtgccaatgacaaaccattgaggaaagacccttctccagggacaggtctgcaagtagagaaccatgccagacagcttgagggagaatgagaacaacagtttatctgcaacagcccttgtgtgctgcctccaggagattcttgtgggatgaatgcatatgggggcagagagatttattttaaacggtttcggtcacacctcttttggcctgcctggtgggcgaggcacgtaggttacttgctggaaagagactctaatgggggaacaatgagagcagcaagaaggggctagtggcctcttctagttccttccaacctggcagcaggcaagctcctattctgacacctgagcccttgtggtggggcccgttctgagtcaaccagagcacaggccggggatagaggcaaggaggcagcaattcaacagtggtgagtaaatttaaatgcttttattaacaatcttcttacattacaaggataatatgacaaaaagaaagtttctgcgtacatattatgataaaccaacatagctctatttgtatccagtgttctaggtcccgtcacacaggtactataaagcgtagtctgcaaaataataacatcaagaggttttttttaaagaaagtattaacatattaatatgtatgtgataatagactcctaggtatttccccccatccccacttatttttcctttgtgattgacatgaaaatggttcagcagcgtgggggtggagaagagagagacgggggctgaaatagacggaatcagactgctggttcttccggagagacaaaagtgaagactgagaggtgcccgagggcagcctggcctttgtcttttggtgagcagtattgtgaccgctgtccccctctggacagagggctcggtcccttggtgcccctggcgtgctctctctctgaggtacagtgcattgtgggattgctacctggggatgcccatcccctggccgtgggtctagtccactgcagtgggaagaaggctcggcccggcctggtctctcttgagccaggtactggagggtgtcccaagacccagttggcagctaactgtggctcaaggaggtgggcattggcagaacagacccgccctgggctgcaggtggaggggtgggcctgctggagactgaggtacttgtaggatggtagggaagagcaagacaggggcagaggaggctcaggatgggagcaaatgccccttcggaccccaaaagcagaaggctggtctggagagagggagcatgcagctgcccttgctccatcatctggtgcctggtcaggccctctctcctacctccaggaggaaaaaaacagagagaggaaactgcgagcaaatgggcttctgggtcccgtcagggctgcacaagccctctgtcatgctgccagcttgcaccagtgcccccgcgtggcccccagacatccccgcccggcccgggctaggagctggtgataaacccagggaggggccctccccaacgaaagtggatgagcttggggtatcccagctcagcctctgcctcaagtcacagaatgcgaacagtgtatgtgaactaaacctgcctgttacggcgggagtggggtaggggccacggggcctctgtgagggagggggaacagcgttgtcctgagtacagccagcagcagctgctgcgcggagcgggctgggccaaagccctgcttctggactggagtagccattgaatttatgagtgtgcagatatgtctctcccaccgtttcctgctagctgatgccccctgccctggccagaaagcctgtggatggtgggcagcgctgcctggcgatgctcatgctgcccacatcctctcctcctgacagtggttgagcaagtgagggaggccaggacggctgcacttcaggggcttggcctctaggggcagcagaagcatctaacagggcaggggcggtatctttcctggaccagctcttgatccagtttggacctttcctattgccactgacgctgctcagtcctggtgggggagggttttgaaggagtttgtgcagtggtccctccaccaggagtcagagaccacgtcctactgccaagcagcagtgaccgcctaagcgtgggctgtgggggtggggagaggtagggggcacctcagctggagctcagggggtatctccttccaacctcagaccaagcctgtggaaaaggagagaaagtgcatggagcgagccgggacccagccactctcctctccaacactccgggtaggaggcccccttgccagccaaccctgcctgctggccttccccggctccctctccgaaggccgtgctcccttcccctttgcacagcacagcgccaggcttcccactgctctcccagctctatagactctatttttatatctatttaaaacatagaaatgtataaatatataggatattatttatagatatatagacgtgatttactctcttactctgtgtgtatacgtactgtatatgtccatatatacaacatatatgctgtagcatctgtattctacactgcacatacccctgcttccatgcactctctcctagggagactggattgcataggtatttccagggtgataccacttgagggggtgggggggaagggagtgccagatggaagtggaggggcgtaccattttcctcccaaaagggcactttttctccctctggctaacatgcaaacattgcctgaaaggctccttaaaaatatcacagcaccatccactcagctcaagcaccctaaccaacagatggcaagagaagggcccccaccaagtgggagatgggtttccctccaagcaggagaagggccgtgccagtctcttgggtcctcctgaggactgaggaagaggccagactagaacccatgacacggcaccacctccccagaagactggtgtctggaatgggcacaccactgccctctgaaaacccctttcttgtctgaggaggactggcctgcctgtttcagctgtttcagcctggcctggctagatctgcctcttgaagcagggagggggcacaagtccaatgccttctgccaaaattggacctatgggccaagaaaaagcatgaattcgacttggaaatcaacccagactgaaagccaaaagcagacctaggtctagaactcccattcctagagggggtagaaggaaaatgaaaggggggatccagaagagggaagttatacttcaacccctcaggccacctcctgggtcccatcaggctccaggtgatcaagtaacatggcaccagcccctcagtgccggctgggccagggctgtgggcccacagtagggtctcagctattgtttccagccttctgcatgctttcccccctgttggcaccacctccaaatgaatggaaaacatttaaacattaccttaagtaattacaaggtacttttcctaaattaaagggttggcataagcaactcaaggggaggaccacctcagcaaaacaactcaacttggaaacatgtggcagaggctgaggtcagagacccccaagtgccatagattccagggcccagcactgaaccttgccatccagggaccctggaacttgagcctgctctcagtcccaagtgaggatggggaaatgaggatgtgcctagcatcacaaggtgtcataggccagtcattagaaaaattaaattaaataaggctgctgtttctgatgcctggactctcatattcaaccaggcaggcaaaacttggggattctgacatggcaagagttacagacttgactgcgctgtcctcatgtttcacagatactagatggcagtggattttttctttgtcctccatgaaggaaaagcagatcatattaatcataagggctctggctcccaggctctgccaggtatcaccttggcacagttggccacaaacctgggcctcaaggttgatctcacttcccaccaaccctacgagccaaagaaagtcactaatcagccagcccagttatgccaagtctcagccccagagacacacttcattctaagcctgtagtcatcactcctaagccagaggctgagttaaagggctctgtcttgtctgaagtaacaacatttgggatccaccaactgcttttccacagttctgtatacacatcaaggggagattaggttagccaagcatatgctccctgggctagaccctgagtgtcccatcagtccaagtccttctcaagcaagcagaagagtgggaaatgcctatgacagaaatcatgggtaatcacatgcagaattcacaggacagaagcactgggcctcccagggagcatccaagctgagaagagaccccgtgtaaattgcagtggtgtatcacccaaattattccctgtcccatggcagtgtggcctacagagtgtctgccacagccctggcatggctaaattcagcagaagccacaagcacccagagttttagggatgccctaacctaacttcaagaccacctgagaggttagcttttccgaggtctggtggccagctcaggaagtgacccctgcagctgcatgctgtgcatagcagctcattctgctaggccagaagtgggtcacctgctctcagctttctcaggaactacagggtaggcactggcactggcccataagcttttccccttctagctgaagattttagctcattttggccatgatctcttgagaggaaaaagagtagctccaactgaccaggtgctcaggaagacactggttctctcttcctggttttcaaatgagcgggagccttagcctgctcctccctacccattacccaatgtaaggtgtaaggcaactgttggctagaagaaaggatctcaacctactgtttctgccctcaccaagccctgtcttgctagccatctctgccctcaacccttcttagtctctgcaatgttcagtgaaaactccccagacacagcagtttgcgtgtgtgaggggagaggaagtcccaaggctggggctgggccaggtgggacctggtgctttgcaacagcatcccatttgaccacagttaggttttgaccctgatgggaggagcagatggagggagacatcagtttaaagtggggaagtggaatggggctgggaatctcaaagcctcagaaggaggctttcagcctttccttgctagttcctgctaactgtcttcttgctcagaggagggtagggaagcatgtgtgcaactgggttggg

SEQ ID NO: 1302 - DNA, 4409 bp, Homo sapiens
cccctctggcggcgggagagctgctggctcgcccggatcccgggagctgcctggaggcgggcccggcccggggaaggtgagcggctgcgggacccagcccctcgccgggagcgggcaccatggtgctgtcggtgcctgtgatcgcgctgggcgccacgctgggcacagccaccagcatcctcgcgttgtgcggggtcacctgcctgtgtcggcacatgcaccccaagaaggggctgctgccgcgggaccaggaccccgacctggagaaggcgaagcccagcttgctcgggtctgcacaacagttcaatgttaaaaagtccacggaacctgttcagccccgtgccctcctcaagttcccagacatctatggacccaggccagctgtgacggctccagaggtcatcaactatgcagactattcactgaggtctacggaggagcccactgcacctgccagcccccaacccccgaatgacagtcgcctcaagaggcaggtcacagaggagctgttcatcctccctcagaatggtgtggtggaggatgtctgtgtcatggagacctggaacccagagaaggctgccagttggaaccaggcccccaaactccactactgcctggactatgactgtcagaaggcagaattgtttgtgactcgcctggaagctgtgaccagcaaccacgacggaggctgtgactgctacgtccaagggagtgtggccaataggaccggctctgtggaggctcagacagccctaaagaagcggcagctgcacaccacctgggaggagggcctggtgctccccctggcggaggaggagctccccacagccaccctgacgctgaccttgaggacctgcgaccgcttctcccgtcacagcgtggccggggagctccgcctgggcctggacgggacatctgtgcctctaggggctgcccagtggggcgagctgaagacttcagcgaaggagccatctgcaggagctggagaggtcctactatccatcagctacctcccggctgccaaccgcctcctggtggtgctgattaaagccaagaacctccactctaaccagtccaaggagctcctggggaaggatgtctctgtcaaggtgaccttgaagcaccaggctcggaagctgaagaagaagcagactaaacgagctaagcacaagatcaaccccgtgtggaacgagatgatcatgtttgagctgcctgacgacctgctgcaggcctccagtgtggagctggaagtgctgggccaggacgattcagggcagagctgtgcgcttggccactgcagcctgggcctgcacacctcgggctctgagcgcagccactgggaggagatgctcaaaaaccctcgccggcagattgccatgtggcaccagctgcacctgtaaccagctgcccagctgcctcccttcttggacagccctgacccgtcctctgcaacctcctttctgtgcccctttcctcattctgacacccagaagacagtgacagatgtgtttgcaaggctgggatggctctctcatcatactcttgtttcttagaaataagcaagacagagcaggaaatggaatatgcgggtcacactgaggaatgcattttgctcatctgtgttattgaaggaggtgcttattaaatacagttcctatgcctgttttataggtggggttaggccagatgcagagaaagctaaatgtgggaatcatggatgcaaagaagaatttggctttttgaaaaacaagcatttcaaaaatgatgaaggaagtgaaagtatcctggatcaactcctagagttagagattgcccaggtggaaagaaaccttagccagcgttcaatcaagctcaccatgcagggcagtcacccggcagttctcaaactttagcatgtgaagagtcaccagcagattcctgggctcgcctggagacattcctagtcggtattcctggtcgaagcccaggagccttcctttttaacaagctgatgtagagggtggagcactgtatgtggagaaattccttctacaatattccacacaggtttttggccacagtccttgatggagtcccaaaaccatggtgcagccagttccaatgctggacacctcaaccatcagggtgaaatctggggcctcagctttttaatttaattattttaattcttaatactttaatttgtgcatttcataagccccctgctcttggactgaattttgtgctttttattgaagaattttattgtttttatcttaaaatcagtttctattatccttggggagaccatccctaacaaagtacaggtgggatctcctgtgagtcattggctgggttctgattgctagatgtcacacccaccagcatcaccaaagtgactctgagatagaccggtcccttctcagcgttccagtcacttcaggaggaatttagttattgacttagtctatgacatctggctacatgtaggtagagaagaaagacaattttaaaaaggaaatcaggtcttttgcaactgtgcctccctctgtctgttttcacttgaatgggtaaataaccagcagctaggttttgaattcctaccttgttattctaaacagatgtccacattgttaattaaatctaaattatgagccttgctgagtggatacggtacttacacctgaaccaggattcctgggttctgttgttgacattgcccttcagcacctgtttggccagctgtataagataggactaatgactaggaagcctaccccaatgaatgatatactagatgaaatagtgttcaaaacctgtaggcactctctggctaaaaacaaactctgaggccaccagcagatcatctttaagctaagttactatttttcacctttttttttagacggagttttgctctttgttgcccaggctggagtgcagtggcacgatctcggctcactgcaacctccgcctcccaagttcaagcgattctcctgtctcagcctcctgggtagctgggattacaggtgcccaccaacatgcctggctaatttttgtacttttagtagagatggggtttcaccatgttggccaggctggtcttcaactccagatctcaggtgatctaccctcctcggcctcccaaagtactgggattacaggcctgagccaccgcgcccggcctatttttcactttaatttggcagctgagaatgcccaaaaagtgccagaagcatcgtggcatttccagaaccatggattctgcctttggacccctctctattaatattaaaactctgggccttcagatgtcaccctaatccactgccctaagacagaatttctggacaagatgggtaagggcttcattccttcaacaagtcaagtcatacttggcctctccctgagaatctgagcaggagccttataacctgtggtcattattttttctttctgtacagaaatagaaaagcattagaaataacttctaaccatcctctgaaaaaacagaaaaaatatcgaatccctctttcatgagaagtcttttggataattggaaaccttcatcactgaggttggccagcccctgccaagtgttgtgtaggcaaagcacttgttagtggcttcctatgaaatgttttagagatctcttcaccatactggtttcttctctttggttggtgtgggtaaaagaaaacaaaacatttcctataagctgaaagctgaccagcattctcttcttggtaacatctactactccaacctagaaaatttggattctagaccaaaaatcaggaaacatggctccttataaatctgtgcagctgccttatagtaccatcaaaggaatttcaggtgggctgggcggggccccgatcccagaattatcaactccacccatcatcatttggtcatgaagcatcctttcattcttcttcttcttttttttggggggggcggggcgggggagggatctcaaagttttagtcttccagaatccaaattaaaggttgcccctgatgggggccaggttccgccacagaacatcttagatgtcagccttgacctcacttagcagggattacagaaatgagatacattttgaaggagagttgtctgttatgttcactgtattctaagtgcctgggataaagctgtctcatgggtgctccatatatattcatatatatttggtccatttctcttggatgtaaaggagtcctgggtaaaatgtggctgtaacctaaaccaactagtccttgtgatttgtttctgccctctgtgtttcctgttgtcaaatgctaagtgtgtgttttgcagtcatgaactaaagcacaaaaagatgcatgagacattgtagtcatatgtctggtgtgacactttggagcaaaaaccttgcagtggtaaataaaaaatttccaacaggg

SEQ ID NO: 1303 - protein, 420 aa, Homo sapiens
MVLSVPVIALGATLGTATSILALCGVTCLCRHMHPKKGLLPRDQDPDLEKAKPSLLGSAQQFNVKKSTEPVQPRALLKFPDIYGPRPAVTAPEVINYADYSLRSTEEPTAPDQPPNDSRLKRQVTEELFILPQNGVVEDVCVMWNPEKAASWNQAPKLHYCLDYDCQKAELFVTRLEAVTSNHDGGCDCYVQGSVANRTGSVEAQTALKKRQLHTTWEEGLVLPLAEEELPTATLTLTLRTCDRFSRHSVAGELRLGLDGTSVPLGAAQWGELKTSAKEPSAGAGEVLLSISYLPAANRLLVVLIKAKNLHSNQSKELLGKDVSVKVTLKHQARKLKKKQTKRAKHKINPVWNEMIMFELPDDLLQASSVELEVLGQDDSGQSCALGHCSLGLHTSGSSHWEEMLKNPRRQIAMWHQLHL

SEQ ID NO: 1304 - DNA, 5150 bp, Homo sapiens
cccctctggcggcgggagagctgctggctcgcccggatcccgggagctgcctggaggcgggcccggcccggggaaggtgagcggctgcgggacccagcccctcgccgggagcgggcaccatggtgctgtcggtgcctgtgatcgcgctgggcgccacgctgggcacagccaccagcatcctcgcgttgtgcggggtcacctgcctgtgtcggcacatgcaccccaagaaggggctgctgccgcgggaccaggaccccgacctggagaaggcgaagcccagcttgctcgggtctgcacaacagttcaatgttaaaaagtccacggaacctgttcagccccgtgccctcctcaagttcccagacatctatggacccaggccagctgtgacggctccagaggtcatcaactatgcagactattcactgaggtctacggaggagcccactgcacctgccagcccccaacccccgaatgacagtcgcctcaagaggcaggtcacagaggagctgttcatcctccctcagaatggtgtggtggaggatgtctgtgtcatggagacctggaacccagagaaggctgccagttggaaccaggcccccaaactccactactgcctggactatgactgtcagaaggcagaattgtttgtgactcgcctggaagctgtgaccagcaaccacgacggaggctgtgactgctacgtccaagggagtgtggccaataggaccggctctgtggaggctcagacagccctaaagaagcggcagctgcacaccacctgggaggagggcctggtgctccccctggcggaggaggagctccccacagccaccctgacgctgaccttgaggacctgcgaccgcttctcccgtcacagcgtggccggggagctccgcctgggcctggacgggacatctgtgcctctaggggctgcccagtggggcgagctgaagacttcagcgaaggagccatctgcaggagctggagaggtcctactatccatcagctacctcccggctgccaaccgcctcctggtggtgctgattaaagccaagaacctccactctaaccagtccaaggagctcctggggaaggatgtctctgtcaaggtgaccttgaagcaccaggctcggaagctgaagaagaagcagactaaacgagctaagcacaagatcaaccccgtgtggaacgagatgatcatgtttgagctgcctgacgacctgctgcaggcctccagtgtggagctggaagtgctgggccaggacgattcagggcagagctgtgcgcttggccactgcagcctgggcctgcacacctcgggctctgagcgcagccactgggaggagatgctcaaaaaccctcgccggcagattgccatgtggcaccagctgcacctgtaaccagctgcccagctgcctcccttcttggacagccctgacccgtcctctgcaacctcctttctgtgcccctttcctcattctgacacccagaagacagtgacagatgtgtttgcaaggctgggatggctctctcatcatactcttgtttcttagaaataagcaagacagagcaggaaatggaatatgcgggtcacactgaggaatgcattttgctcatctgtgttattgaaggaggtgcttattaaatacagttcctatgcctgttttataggtggggttaggccagatgcagagaaagctaaatgtgggaatcatggatgcaaagaagaatttggctttttgaaaaacaagcatttcaaaaatgatgaaggaagtgaaagtatcctggatcaactcctagagttagagattgcccaggtggaaagaaaccttagccagcgttcaatcaagctcaccatgcagggcagtcacccggcagttctcaaactttagcatgtgaagagtcaccagcagattcctgggctcgcctggagacattcctagtcggtattcctggtcgaagcccaggagccttcctttttaacaagctgatgtagagggtggagcactgtatgtggagaaattccttctacaatattccacacaggtttttggccacagtccttgatggagtcccaaaaccatggtgcagccagttccaatgctggacacctcaaccatcagggtgaaatctggggcctcagctttttaatttaattattttaattcttaatactttaatttgtgcatttcataagccccctgctcttggactgaattttgtgctttttattgaagaattttattgtttttatcttaaaatcagtttctattatccttggggagaccatccctaacaaagtacaggtgggatctcctgtgagtcattggctgggttctgattgctagatgtcacacccaccagcatcaccaaagtgactctgagatagaccggtcccttctcagcgttccagtcacttcaggaggaatttagttattgacttagtctatgacatctggctacatgtaggtagagaagaaagacaattttaaaaaggaaatcaggtcttttgcaactgtgcctccctctgtctgttttcacttgaatgggtaaataaccagcagctaggttttgaattcctaccttgttattctaaacagatgtccacattgttaattaaatctaaattatgagccttgctgagtggatacggtacttacacctgaaccaggattcctgggttctgttgttgacattgcccttcagcacctgtttggccagctgtataagataggactaatgactaggaagcctaccccaatgaatgatatactagatgaaatagtgttcaaaacctgtaggcactctctggctaaaaacaaactctgaggccaccagcagatcatctttaagctaagttactatttttcacctttttttttagacggagttttgctctttgttgcccaggctggagtgcagtggcacgatctcggctcactgcaacctccgcctcccaagttcaagcgattctcctgtctcagcctcctgggtagctgggattacaggtgcccaccaacatgcctggctaatttttgtacttttagtagagatggggtttcaccatgttggccaggctggtcttcaactccagatctcaggtgatctaccctcctcggcctcccaaagtactgggattacaggcctgagccaccgcgcccggcctatttttcactttaatttggcagctgagaatgcccaaaaagtgccagaagcatcgtggcatttccagaaccatggattctgcctttggacccctctctattaatattaaaactctgggccttcagatgtcaccctaatccactgccctaagacagaatttctggacaagatgggtaagggcttcattccttcaacaagtcaagtcatacttggcctctccctgagaatctgagcaggagccttataacctgtggtcattattttttctttctgtacagaaatagaaaagcattagaaataacttctaaccatcctctgaaaaaacagaaaaaatatcgaatccctctttcatgagaagtcttttggataattggaaaccttcatcactgaggttggccagcccctgccaagtgttgtgtaggcaaagcacttgttagtggcttcctatgaaatgttttagagatctcttcaccatactggtttcttctctttggttggtgtgggtaaaagaaaacaaaacatttcctataagctgaaagctgaccagcattctcttcttggtaacatctactactccaacctagaaaatttggattctagaccaaaaatcaggaaacatggctccttataaatctgtgcagctgccttatagtaccatcaaaggaatttcaggtgggctgggcggggccccgatcccagaattatcaactccacccatcatcatttggtcatgaagcatcctttcattcttcttcttcttttttttggggggggcggggcgggggagggatctcaaagttttagtcttccagaatccaaattaaaggttgcccctgatgggggccaggttccgccacagaacatcttagatgtcagccttgacctcacttagcagggattacagaaatgagatacattttgaaggagagttgtctgttatgttcactgtattctaagtgcctgggataaagctgtctcatgggtgctccatatatattcatatatatttgttgagtgaattaatgaattaagagtggctggcagagtaggcagaaaaagacactgcaaatggcataaaaattaaagtcctagctgagttctcaatggtaaaggcatcagatgtcttagcagtcaagctagaaattcatgacaatgagtattactatttgcctaatggcaactcattgctctccatgtaaatgtaatcaacagatgaagagaatataattgctctgcttttccactaaaactccatcttagtgaattttaaattatccagagatgtcaaactgccaaataaaaatatttcagtagtctttgcatcagcttaccttgtaccagaaacatttccaatttactatcaaattatagtaactgagcctgtgtgaagtatctcatcattttcgaaaggaacaccttgtgtgatgccagtgagcatttctaaaaagggtgtgaggtagaggtaaaaataaggtgagagaccatttcagaatgcactgttgctcaaaaaggtgatctggttctttcttcagagatttctacggggatagaaaatcgggagtctgccctcattaatctgtgattccacctcttgcaccaaatcaatatctatttgttgagcacttattgattaagaccttgcatatgtctgtccattttgatttgagatacaactttttgtgtgggttgaatgacaaatcactccaaacaaagctgggcacagagaatcagctaggagaccagttattcagggtccatttctcttggatgtaaaggagtcctgggtaaaatgtggctgtaacctaaaccaactagtccttgtgatttgtttctgccctctgtgtttcctgttgtcaaatgctaagtgtgtgttttgcagtcatgaactaaagcacaaaaagatgcatgagacattgtagtcatatgtctggtgtgacactttggagcaaaaaccttgcagtggtaaataaaaaatttccaacagg

SEQ ID NO: 1305 - protein, 420 aa, Homo sapiens; identical to SEQ ID NO: 1303

SEQ ID NO: 1306 - DNA, 33131 bp, Mus musculus
  misc_feature (1)...(33131): n = A, C, G or T/U
cctcgaagatatgggtacaggggaaaaattcctgaatagaatagcaatggcttgtgctgtaagatcgagaattgacaaatgggacctcataaaattgcaaagcttctgtaagggaaaagacaccgtcaataagacaaaaaggccaccaacagattgagaaaggatttttacctatcctaaatcagataggggactaatatccaatatatataaagaactcaagaaggtggactcaaaaaaaatcaaataaccccattaaaaaatgaggctcagaactgaacaaagaattctcacctgaggaataccgattggcagagaagcacctgaaaaaatgttcaacatccttaatcatcagggaaatgcaaatcaaaacaaccctgagattccacctcacatcagtcagaatggctaagatcaaaaattcaggtgacagcagatgctggcgtggatgtggagaaagaggaacactcctccattgttggtgggattgcaaacttgtacaaccactctggaaatcaatctggcggttcctcaggaaattggacatagtactaccggaggatccagcaatacctctcctgggcatatatccagaagatattccaactggtaagaaggacacatgctccactatgttcatagcctccttatttataatagccagaagctggaaagaacccagatgcccctcaacagaggaatagatacagaaaatgtggtacatttacacaatggagtactactcatctattaaaaagaatgaatttatgaaattcctaggcaaatggatggacctggagggcatcatcctgagtgaggtaacccaaccacaaaagaacttacatgatatgtactcactaataagtagaagttagcccagatacttagaatacccaagatataagatacaatttgtgaaactcatgaaactcaagaagaatgatgaccaaagtgtggacactttgccccttctaagaattgggaacaaaacacccatggaaggaattacagagacaaattttggagctgcgatgaaaggatggaccatctagagactgccatatctggggatccatcccataatcagcctccaaatgctgacaccattgcatacactaacaagattttcctgagaggtccctgatatagctgtctcttgtgagactatgctggggcctagcaaacacagaagtggatgcttacagtcagctattggatggatcacagggcccccagtggaggagctagagaaagtacccaaggagcttaagggatctgcatccctataggtggaacaacaatatgaattaaccagtaccccccagagctcgtgtctctacctgcatatgtagcagaaggtggtctagccagccatcagtggaaagagaggcccattggtcgtgcaaactttatatgcctcagtataggggactgccagggccaagaagtgggagttggtgggtaggggagtgggggggggggtatgggggacttttgggatagcattggaaatgtaaatgaagaaaatacctaataaaaaaattaaaaaaaaaagaatcaacaaaaccagaaaaaaaaaaaagttcaacaaccctcagctcatgtttgcaaatgaaagagctcacgctcagggatgcctccttagtgacctcggtaactccagattcacacagaacactgggaactggaacgttcagtttgaaaacatactgtgagtatttgtttgattcagtgatgaaggagtactattgtatgttctctgcaaactctgtgagtattatagttatgacgagtggctaactaagagtaattgtcagattttttcaggtataaataagacagaagtcttagggacgttcacagaactgtatgcacagggctaacaggattcaatgtcagacactgttgttgaggtgaactggacatggaatacagtccaatgaaaagaaataaacattccccatgttgaaacactgtctggaaccccattcttctttccatagctgatggtttaaaaaggtgagtcagcagagaaagtcctactcacccagttttgagactttaagaattcatcaaagctccttgggggatccggtaatttctaatgaagcaaaatcagtcaattgcattaattctgattgtacttaactcacatagctcactaaaccaaaatatggtatttaagttagaacttttggaatttgtaagctattgtaaaccattcattgtgtgctttgtagagtccacacactgtgaaaagggatagaggccagtgcttccctgctgccgctacaagaaaccccaacaagacttttgctgaatgatctcatttcaaaatctaataagtgttccaagataattttgagatgttctggaatttatctataataaacccagaaccagaaatgtaataaatctttaccttggtgacagggaagcagcagcagtaaaattgtgagatactctgtaggctccaggctaataactcctaatctcatttgtattgtataggagtttctctgagcactgaaaatgtactcaaccataggtgaattttatcaagctaaaacgggagtccttgtggagactttgcatacatttctccttcagcttagatatttccctgtctaaaactctctctttccaagtcctttttcacctatttagctctcaaaaatatcaaattaaaagtaacttttaattggaagattgaaaattccagaccaaactaattacccagaaagacttggtttaaaacaaagcatccacgaagacataaacagatacttttttctaaaaaggctctaacctccaaacttacaaagtttttctcatggtaatattgtgcagattcatgtctccagggagatagagactatgtacatcagagctgaatcccataaattaaatatagcagctgtcccaagtctgtaagggcttgttgtcttcatcatttgatgaataggtgagtagataaatgggagaactatctagtcatttgaaaaataatgacatgtccagataatgaaaaattagcgaggaggagccaaagagagaaaaagagagagaaaaatttggaaatccttaatatagcttaataactaattaacataccttaatagtggctgaaaagaatgaaatcatattttagtttactaaaacacttatttttttcaccaattaaatggtccagtttataaaatcacagtgctatactatataaaactaattacacatttggagtcaaatagaatatgtcattctcttaatattatttaaaatatatgaatatcattaaacatacatttaacaatgacagtaaaacattgtataaaatatcaagaacagatgaagtcaagtattaaagaacctaatgctaagtagacacagaaagagacatgaggagtagagtacacaaaaggcttagaaataaaataaatgaaaccaatttaaatgttttgttttttaatggttatcaaactatttcaattaaatttttggttgtgaacctagctagcttttaacagctgagccatctctccagcccactattttaattataacctgaaaataatatcacattttactggaaagaaagagaaaatgaatggaaggcatgaaacatgcataggcaacttttagccaacttcaatatgaaattcacagcctggaataacatgaaaaggacttaagaaatgggaggtaaacacacatctattctcatggaaggagagagctgctctgtggaaacaataaggaaaagccaggtcatacagaaagcattcttttctaggtgttaatgaaagtcagcagacactgataacaatgatggtcaaggttataacacttcattcaaaacttatcaaagctctaaactccatgcaggcttctcagcaccaggctcagatcaacagcagggcaagcccacgaagccagccagctgatgacctgaaatctagaaagaaacatactctataaatatgcacaaatccacaacagcttccttacctgagggacaggcaactccatccactgaaccttcccttgacctgccatggtgaaacaaatgtgaagatgaagagagatctgctgtagcttagatgtaagtatgtttttaggtaacaactggaaagatacccaaatgcaaagttagacgacttaaacaacccttctgtgtcaccttcaagccccacttatgaattttttcaacaaatccaaagtgaaggaagagcgaacacagacgaaaactagacagactgaatgattcttacagttttgaattccagaacctgagcagattttgaaaaaaaaagaatcaaactccacttcaaacttcccttagctcaaatatcaagaaaatattagaagtaattagaagaggttggaggttgagcaaatgccaaataaactcaatccaattaaagttacagctagccctaaaactcagctcaactcaaggaagattctagagcagcctttcatgctgagaaagctccagccctttactctaaaagccaaacaagaaaaaggctggtgctttccaaaacttaaaactagtgaatctcagtgttccacaatgactgttacagaatgttcaatttaacataatgttagatgtacagcaattacagagtagcccaagaaagaagaggagccataatccaggggaaatgctgtcaatataaatcaggtaagcagacaagagtgtaaaaactactgtaagtatattaaagatattatagtgtaggctgactaacagtgcctgaagaaatggagtgtttcagatatatctgggagtaaagagcagtaatcccagctacgcagtaggttgaagcatgaagattccaagtttgaagtcttcctaggtaatttagcaatgaagtcttaaattagacactaactcaaaacagaaagtggacgacaggcttcgctcaggactatgactctatttcttagattaggctttgttggattagaacaagagattaaagctcttctcaataattcaggccccactcttcgggaaatgacacagagttagcctttcttcttttctgcagcatggtcacactaattcttatcatcctgaataagcctttcctcatagacttaaggaactggagtaaccaaaataaacacccctgggctgctgaatgtgacattataactgtaagatccatccatgctgtctcgtgtaatgaaaaaaatatgattttgttgtataatactgtagcgcataatgctttcaaagtctatttgtctgttcagcctttggggaactcaagtcagttcccactcatgtgttgctcctgtcaacatgaacgttcttgttaatgtcttctggcatacattctctaactcatagtggggtggctaggtcagctgaagtgagcactgccaaagagacttccaaaacggttgtatactgatcttaattttcaatagagatgtatgaaagcttcacaaactacattcttgctaagaatctaacatttaaagagatctctgtagacttagcaatgccttttgccttttggattttttgtttggctttggttttggggttttttgtttgtctgtttgtttgtttggttcattggtttttgggttttattgttttgtgttgtttgagacaaggacttactatgttgcccaaactggtcttcaactcatgattctcctgcctcagcctcctgagtagctgggattacaggtatgcatcaccacatgaaagagccaggcatcatttattagtcacttaattatggggctacattacaccagtaaatataccagcaagtaatttgtcatgccaatagcagcatgtgcttgcacaaagctagatagtatagcactcagcacacagtattgctacacatttagcatacatgtaagcagcatgagtgcatgactgatccatcagcaccacaaatgtgattaatgctagtacatttaatgtaacacagaatcacaagtatacagccttttcagattggcttccttcggctaataatgtgcattggagtactttcatgccttgatagctcatttttaagtatactacttgaattactttgagaatttcatacagtgcattttgatcatattcatcttctttcctaactcctccgagatacaccctctccatcctcaactttaagttttcatcatcataaaaacaaacaaacaaacagcaacaaaaacttatccagtccaatttgtaatgcacaactactcttgggagtaagggctgtcctggagtatggttttgtgagttaccatacttctatattgccagatatgctatgaccccaattcctaggaggtgttcaaaagactgaaaataagaagcctgtgacttagagcctactatatcttctaactagggacagttatatggatcttttatcagaaaggtttgtcatatattttaaattttttattaggtattttcttcatttacatttcaaatgctatccccaaagtcccctataaaccccccccccgccctgctcccctacccacccactccacttcttggccctggtgttcccctgtactggggcatataaagtttgcaagaccaaggggcctctcttcctaatgatggccaactaggccatcttctgctacatatgcagctagagagaatgagctctgggggtactgattagttcatattgttgttccacctttggggttgcagaccacttcagctaaaggtttgtcatattaagccattgataatttgtgatttcctgggatggctgaaagttctctatgttagtttaccttacaagttacactttctttgataaccctttaggaagtgtgaactatgttccttttcctagtatctgaacaggcctaaagtctcatttgcaagcaaaataataggagagatataacactgttattttttgaggatgggtcaaaaaggacatgtgatttcagccttctttgcagtgctccatttgtagtctctccagcctggggttcttttcttttcttcttttggggtttttgttgttgttgctttttgttgttgttgttgtattgttttgtttttggttggtttggttttgtcagcttgacacaattagagtaatcttggaggaggaacatcaactgagaaaatgcctcaataagattgtctgtaggcaagtctgtagtgcagtttattgactggtgattgatgtgggtgggcacaagtggcactgccacctctgataaggcagtctttggctgtataagaaagcaggttaagtaagcaatggggagtaagctaggaagcagtaccccttcgtgacttctgtcttagctcctgctttaagttcctgctttggtttccatcaatggactatggcctggaatgtaagccaaataaattcttttcctccccaagttgcttttaagtcatggttttatcacagcaacagagactctcagactcccagcctaagctgatgagtctgctactctcctgccgcactgtgaggaagatgaggcattactccaggcattaccatactccaggacagcccttactcccaagagtagttgtgcaacacaaattggactggataaggttttgttgctgtttgtttgtttgtttgtttgtttttatgataatgaaaacttaaagttgaggatggagagggtgtatctgggaggagttaggaaagaaggcgaatatgatcaaaatgcactgtgtgaaattctcaaagtaattcaagtcgtgaatgtattaataggcaccctgatagtatgctcagtctttccatttgacttacaagagaaaacaaaacaatccattatgcactagaccacatggttgtttcaaactactgtactttggagtaattagttacacagacatagcaacctagaacattggaacataggaatgcttgccatatctatgcatatatgcacatatgtatatatgtacatacatgcagctgaaagttctattggatagtactttactaagtataatgtactaagcctaatgactttctgccatgaataatttcattatttaaaaaatatgggattttgttttagacagtgtcttccccagtctagactggcctgaaacttactatgtgtgctaggatagtctcaatctcttgattctcctggttccccaatacagatatgagttatcactgctggctctaaagtatagttttgacttaagtttttattgttgtttataaataagtcaagatgtgaaacgacatatcctatgcaacaccctgtccagttggaaattcttccctagactccaaccactcatcaggatttggcttcatggactcccccagcctcttttgaggttcctaaaatttgtcataatgtttcctgtactacccatacttaacatgtaagcacttccagggcaaggtgtaaagatgacaataacaaagccaaaaattgaaagggctaacaattaaaagtcaaatatcccattttctgatgttcaggccctcactgtttgatgcctaactgtgatgttgtgcacaaataactaaagcttaattcctaaggcaggtagacatgtcaatgtgggtctcaaagtagactctcaactgttttagcattcaacatatatgaataccattctggtggctctcacattgcgtctcaaaaggttagtaacttctttttctgttttgataagtgaaggtatagtggactggctgacatttagaatgacttttgttctgcatgcctctctttattaaaacatttttgcttaaagtctaaattcaaatatccatggtctaatttctacctcactctcactagttctgaaattccttttctgtatccaaatcaggaataccagtttggctcgagttgaggtctccaaaacattaagggacctattcagtctgctaagagtgacagaagggattctcctctcctcctctcctctcccctcccnnnnnnnnnnnnnnnnnnnnnnnnnnnnnnnnnnnnnnnnnnnnnnnnnnnnnnnnnnnnnnnnnnnnnnnnnnnnnnnnnnnnnnnnnnnnnnnntctcttcctctcctcttctctctctctctctctctctctctctctctctctctctctctctctctctctctctctctcctcatcctcctcctcctcctcctcctccttcttcttcttcctctctgtgtctctctgtctgtctgtctctgtctctcctattcaagtagaagctaccactcatgaccaggctggaaatgggcctttctcctacttacaggtgtgatcctgggaattcatgttaaccattgtctatttttctgttaaaacttttatataaattctggtgtggtaaatatcagtgtcctggcttgtcattcgtgattacacacaaggctgttctttttctcccattggttaatttcataattctccactcattaaacaaattgcttgatatatgacagttttgtttctaatttaacaactattgtttaggtttctttgaggtggagcatagaaaaataatttaatcacttatccacatatattagactttaaaaaaaaataaaagaaaaatacagtaggtgtcaactctgcgtgttgtaagcaaagcacaaaatgcataaacggttttcctaagaagtctatcaagcttgaactaccaaccacctaaagctacaagtctgagatctcgtaaatatagtatttggggaggtaaagcggtgttactagctcctcactaactcacagaaactactttcgaaaaggctgttccggaacacgtccccagttgcgctgggggcccacaacgggcggcacagcaggaagctgacggttcctttggaacaggtcacccgggaagcgaaggcgggacttccgaaccagttcctcctgctcgcccacgggattctccctctgagcatgcgccgtggtcagcttccccgtggccctggcaaccgccaggccccgccctccggtgttctgcggaaagcgctccgggggggagcgcgtggagcggaggcggtacggaccgagagttgagcgtggtgcaggtcggcatcccctcgggtcgggtggctcgggccggacgccggccaggcccagcggaggtctcactgcgggctagtgctgcgtgtggcgtgcccgtgggggcaagacttgagtggtctggggcctaaatgaagccttattaggcttcccgagtcggcgttgctcactcctggcaaggccagctccctgtgagcaccgatctgtaattcaggctttggcgtggtttcggcatggtcgcgggaaaaggaaaccagatgtgtgctgttaccgtcagccgataagcagacgcgtttcttgtgtgtctatttcttgggaatgtgagacaagtatagtaacactttgcgttgctagttccacgaggttgggtaaggatgaagagcccaagattgcagcatttcagggctgtttatgattgaactccaaatgcaaaaatttccaagacatttcgcctgtcatataatgtgttctgtgggaagggagtcaagttctgtgtttaaaaaatggcggtggtatcttggatgtttaaaaaaaagggggggggggcgagagggatattgtacctcatcaaattatacgatcagttcttagtacttcacaagcaaatattgaaaacagtcttatctggtcctgaatttgtccacaattcaaaataggagaaatttaaagaatattcccttgggaggcaaatcagcttagtgtgttggaaaaagtagccttgttccgccgatctgtgtagtgccccaaagttgagtagaaagataagtcctggatgccttctacagagtggtttcaatttagttgataagtatttgaatctatctaaaaaaaatcaagaataggtaaatcggaaagagttgtacttttgcctcattgaaaagtgcctccaaatgaatatgtttgtccatatcaaatatgtggacccagggataagtagtcagaagtgtaaaagattgtctttgtgtgagtttataactgagttagaatctgactttgagcctaaaaatagatgttatgtgcaaagcagacaggatgaaactgcataagtatcattatttttagagaaattgagtggaaaaaaaagtttttcagcccaatttgcagagtagaccatcaggatgctagttatttgccctaggaaccgcccttgttttctaattctttacaactctcccccacccaactccagctgcatcgccctgcacgtatttgatgttaagtataggtatacttacatgcatctatgtccttgttgtcattgattgttattatatactactggagacaatgtcagaatccacaggctgacaattcagtcacaaaattgtcccagcctcttccaagtcacacactgaaccatcagaattcccttccaactagctacaagctgagagtccttcatcccctcttcaaatgcatttgatttgcttgtgtggcccacagatctcaggggacactatgcttgcatttgatggttattataaaggcgattttaacagatttaaacatacaggcaggtggagtaggtaagggactagagcacaggtgcttcctccctgtgcagccgaggtgggcttccttacagtgagcggatgcccttgcatcatcaactgtccagaagctaccggaagtcctgatggggttttagagagggttttataggcttacttgctaaccgagtgaaaggaaatcctcagggcctgtcaggttctttggctttcctccctccaagggaggaaataaggcagaatccggtattcatctactgttatactgggacaatttaagttgaactttctattacccctcctcagaaaggagttttaagtcagaaatccagggaaaaaagaaaagtgtgtgtgtgtgtgtgtgtattcacaatacccaactgattttactcataccattatagacttttatgttttatttagatttatcatgagtgttggtgtcataggatgccaattcaatttatatagttgaacgtatttctgtacaatagtaacagaaagtcttgtattattaatattttaaatcaaaattactatatttgggacaaaatgggtactatcagaatggattgtcaatgtctaaattttatatgtgaaatcattttaatatagacatttccattttttaatgaaagagtaactgaaattgcttttttgagttggtttttaattttgtattttcaagcatatcaatttagtgggttttgaacttattaatatctgttgataagtaactaaacctaacagtgtaacttatactgggcaattttatttgtaatgacagtacaatgttgacatttcattccttctcattttaatttttgcagtgtacctatgatacatgctttagaaacagaatattttggttcaaagggaaaatggctctcagtccatctgtagttcctcaagaaagtaaagaagataatgcaaactgtgtagaaacaaaaccgccacaaaccgcttccattgcttcaggagacccccttcaaaacttatgcttagcgtctcaggaagtgctgcgtaaggctcagcaaagtgggaggtcccggtgtcgccaatgtggtggctcaaggatgttctactgctacacatgctgtgtcccagtgggaaatgtgcccaccgagcagatcccatgtgtgcaggtaagaggctcgtgggaaagaagaaaaatgtattttataaagagaccgtgtgtgtgtgtgtgtgtgtgtgtgtgtgtgtgtgtgtgtgtatgtatacatgtgtgtgtgagtgtgtgtgtgtacacatatatatatacactgctccagccccctgcctgcctgctgttatgctctctgttatgatcacagactccaatgctctgaaaaaaggaatgtagatcagaaagaaaaagttatatttatagagctactgttttgatagaaatttaacaacaggattatttcccaaatcatttgctttgcctaccacttgttagaagtacgtaagaaaggatttgagcaactgtatagttttctaaagtatatttactttatttgcctgcatataaaatttaatatgagaaatagaaaatctagacgatcttgtttctaaattctacttcagttttaaaaaaacgttcagcctgcttgggagtaaggagtaagtctctcttaatcctaaaatcgtctggaccattgtgatttaaatgaaaatggtcccatcaactcgtatagttgaatacttggtccccagttggtggaaatttttgggaaggtttaggaggtgtggtcttagcagaggaaatgtgtcactgggggttggggggcaggctctggggtttcaaaagagcaattaccagtgctctctttctgaatcacggttgtgtctcaggatatacgctctaaactaccgctccagcaccatgcctgcctgcctgctgtcatgctccctgctataatggtcatggaatctaatgttctgaaactgttattccaaaataaactttttttttgtaagttgcctaagtcatggtgttttgccacagcaataactaagaataaatcagacatacctttatttgatgcagaatttgaaaactataagacttgaataaagattacaaaaaacatcagaagggaaaagaaaacctcagcctcagcagccctgtttgaaaggctttgctttgggacaagcacttgtgccttcctcctggtggtgctttaatatagctgagtctcttgtcagaaacatggccatcagagaaaaattggtcatcctgttgtatatttcaaagtagagtatctcttccaaacttccctctggtctagtcaatactgtagcgtttactctcccatggcagtatttaatgtggtttgcctgtcatatatgtatatgaaccagtgcccaaatgtaaattcccattgtttggtgtgccctggtatcacactgccagtagctgcagacttgctcattgagaactggtgatattctaggttgggtcctgaggtcatgggttatgtataattgtcttataactggagattttagttcataaaacttcctttttagtcactttaaattagtctacgtgatttgaaattttcattaataacattgattctgtgttcttcggtcttgcttgttttttattcttttttaaaaaaaatcaattctatgttcttgatgtaaagttggtcagaagtattaatcttagcctgtactctaactctactcatcatcttgttagatagtcagttcttgtaggagtagaaatctttgtcctgatctttgtcattcctctttcccacttcccagggcctaagataaagctgacctggtatttagaggccctggtaaagggaagcgaattacagctgaggcagtgctgtgaggaaagtctggggcagtgctcattcaggagcagacctgtgtaaaataatccccgaactgcctacttaaatggtaaatttcctaccgttagaaatcatcatgttggttttatgtgattggccctatggcctaaatgatgactgggggagtggagatgaaaggggagtagtggtgcttgcagtcctaattgggaagtggggaggctgttggaagtgtgcatttgtgcctgcatccctctgaggtatactgtttataacatcttgtcctcacatcattgtccagaaaggaaaagaacggaaacttggtttacttatggtgtgcagcaactgctcctttaaaaaatggccttggggcacctgaagggtcagtctctccctttaggccctctgtcagtgtccacagggcaaactctctctcctaatgcagttcctctccaggttctgaaaggaaggctctctcttcaagaccccaccatgctgcctcttgtgtgtgctctatctcagttaatgctgcccactttggaggcccagtcatggcccctgttaccttgagactgcctctccaagtaatctcatcttgaagtgggtgtggtgaactgagaacgaatgataagcattatctttatgcatgtcaaagtaattattttgagttaaagacaccaggtggaaagatattttattattccatttatataagactgcagaaaaagtaacttgaagtgacagccagcctgtgggaaaggaagaggatgggctactagaagacctttggatagtggtggatccttatcttgattgtggtaactagttcacaggtataatatataccaaacctattagaatgttgactaagcacatgtgtggtttaaaacaagaaacacaattttatgttccagagtaaaatagctgccttctaggacctggtcatagagctcctaccttctttgtatgaagtgggggtcttagagatggtagatgtgcctaccaagcaacagagttggaaacagagaaactgaaatagtaaaaacattttagttcaagaaatccaagataattgttatttttgaacagaagcaagacataatatgtaagaaaaatacttgggcaagtatttttgagatacaacttgaatcaaatataattttagtggggttatttgtgataaagccctttaaggcttattctggtgctagtttttctttttgtttgttttttttttgtttgtttgttttttatttttttgtgacagggtttctctgtgtatccttggctgtcctggaactcactttgtagaccaggctggccgtgaactcagaaatccgcctacctctgcctcttgagtgctgggattaaaggcatgaaccaccacgcccggcctgttgctggtttttctattgacagcttaattgtattgccaaagatcacaaaatttcaggtaactttgacttgaaaaaagatgtatgagaaataagatttaaatttgaattttaagtctgaagtatcatttaagctttctttctttcttttttttgaaaacaacataaaataaacctagagttcataggaattatttttaaaatgtccttggcatggatgctgagatgtgcagaactgagtgcatgtatggcttaggtaaagcaaccctggatcattgtgttgagagggttacacgttgtgtgggcaagatcattgctcaggtacatggtccacattggtaacctggtctacacagtgtagtcttcagttgtaagtgcactcataggaactcagtctgagctgggtgggtttgcttcagagcttatattggcacaaaatatcataattttatattattttgttcctttgcctttttgttttaccttagcttccattgaagattgatatcattaagcatccaaatgaaacagacggcaagagcaccgctgtgcacgcaaagctcttagcgcccgactctgtgaacatttacacatatccgtgcattccggagtacgaagggaaggatcacgaggtgggcgccttggcactcacatcctcatgggatttagcatctccttagcagtccagtgctgtgtgtagttaatggcattgacctttaaatggggtttcagtctttgccagtgtcctgcttttcccttttcccccttagaattcccctgtctgtattgcttgtagatggtctaatttgatacagaccaggaaactgaattagctatcattggaatgtctgcaaagaagaagaaaaaagactgcctcagaggagtttttagaaattctcaccaaattaagagttttagtatataaatattgagctatttcttaacagctgcttatatgtcttccttgggcatacctagatttctaattcataattctagttaaaattgtcgttttggtgggaaaacgtagccttcttatcaaaaaagtaactttgtaatagatctcaaaaaaatagtctttaggtgcttctaaaacaagcatgtttacttcttttgagctatatatattttttcttatttaatattttaaatatgtaaatatattttatttattattaaaatacataaatatatatgttgatatatatatatattactttatatctctatatagtttaaacctatttagaaagttatatttacaaggaatatctgaatttgatatagtaatatgtttgtgtatccttctctggtcagctaaataccatttatttaattaaatagaacacactgctgcattcttctgtaatttaagacagtttccctgtgtggctcacactggtctttgtaaaatggacatggaatgtattcattgagcagttttcggtggtggtttttaaaaagcatcgtgtactttgtcttttgtctatttgtctggccctgacctcgtgtccctgtgtctctagtgctagaatcacaggagcgtagcaccacgtcacagaaatgaatctgtatttgtttgtttgtttttaaatttggtgaattattgacttggctttgtcaattagtgagaaacttgttttgaagtaacttctccaggtagtataacatgattacatgttcttaggaatgagctaaaactttaccatatacataagaaaacaaataccacagtcaacccaatgcttatttctttagacactcagcatttctttttcttagagttctaagtcagcgtttgttgaagatcacagtagcacttagctaacgtgcgtttctttgttttaggttgtacttgtttttcctgggcctcagtctatctcaatagaagatgtctctttccatctacaaaaaaggattgaaagtaagggtagaaacaaagctgacaaccttgatgtgccacctcggaaactcaagaggactacggacgaggaaggctgggatctgcatgagagcacacgccaaggccccgagttgaaaagagttgtctttattgacagcacctggagccagacaaaccagatcgcctctgatgagcggcttcggggtgaggatggagtttggggactttcttcccctgacagcctttatttagaaaaacttcacttctatggctccctcaaaagaaaagttctattcaatgcttgcatttgctccatttctcatctccctttctgtattctgtgtgtgtttatgcatctatatacatcgctggaggaaccctttcaaagtaagcagtaggctttgcaaaatggctctcaaaatactgtagatctgttagaaataagggcactcctatgtgataaataaaatgccgttggtgctcctaagagaatcaatagaacaatatataacctacaacctgtcttcacatctctccaatgtatacaataatggcttttgtagcactttctcctctgacagtatttaaactcagactttccgactttccgatgcttctatatctttagtttcttaatctagagcagtttccttttttttttttttttttttcttaatttagattttggtaaagtgggcaggttggtggactgaatgtctgatcatgataaactcagtctaggtactttgcttcctatgctctttagattatttaaaatgtacatggatgtatgtgtgcctgtgtgcacatgtgcatgtaggagcccatggaggccagaagagggcattggatcccctggaactagagttacaggcagttatgagctttctgtgtgggtgctggaaaccaaacttgggtcttgcacatgagcaggaagtgctattaactactgtgccttaccccagcctcatagttaggatactttaaagtaagaggaaatgcaggcttttctgtagctggcccactttgtgtttgttgtttgttgtcattattgatagtaggtcctttccctgaagttcattaattgtttgtttgagcacgtagtgtatgttgaactcaagttttatacttacttactgttgagttcagtcaggagacataaaacaagctgtctccttatttaactaggactacttgattagtgtgatgattgctagatctttgcaccataaaagtttatattcctttagtatacaggaaaataatgcttccaggctacagatgtcctcaacagagcttagtattaccggatcattgcttcaatcagtcattacattgagaaacatgatatggtgacagtttagttatgttacttcttcctgtgttaattggcccttttaacactggcctcaggagtttgtagtagtactggcctcagtagatgagcaggatatctcaaacctacttcgactttcttcctgctgcaaacttgggttcatcgttctcttaaagacccacggttcagtttactaggatctgatattagaagctgagttgtgtcagttgattgctacattccatttctttggtagacagagccaaagaaataaatatgtgtgcatattgtgagttcacagtggtagtctcaattcactttaatattacaggaatttcatttgtttaacttccatttctctgtctttcataagaaaaaattccacatgcctatgtgtttatatgtgtatgtgatgcatgtgtatatgtgtctgtacgtgtgcttatgtatatgtaggcgcatgcatgctacctactatatgtggtgttcagagaataatgttgattgtcattccttgcctcccaccatgcttcaaaaagagcctcttgctcactacaccagacgagccaactcacagcttttgagtatcctccagtcaccacctccatctcaccaaaggggtcggcattgtagctgtgcttcttcctgtgcctttccatggattctgggattgactcaggtcgtcaggctgttgtgcaacaagtgcgctgctcactgggctgtctccgggccctgcatgccgtttctgcctgaatgatatgctgagctcccaataacagcttaagttcctttacttgcctgtgaacacagctgtagtatgcagtctaggggctcatgttgtttctattgtttctttgtaccttcctcagtgcttcaagcattctctggtttctccaaaagcttttaagattttcccagtaattgaacagcctcatgatcagaaggcaagagaactactcagttggtattgcatggttgccaaaaggtccctcaagaaaaggcatactacagtctgttaatcaattccaagttaaaggaagtacagagtacatcacactgacttagctaacttgttagctaatggaatagtttgtaccagtgggcggtaagactttgaagacttcatggctgcggtttacatgatgatccatgctgccctgtgctttggatgaacaagaaatcatagttgccacagcccctcggtccccttagtgcagcaagtcactcctcaaaagtttgaagatttgtctcggatatttttcttattactaccttatatggtaatcactaggttcaaatgaaagaacacaagtaaaagtccttgaaaaacctataaatagaattattctgctactattcaaagtcagcttgtttaggtttgcctaaaatgaaatttgtacaaaagatttgttactcctttccatttctcatcaaaagcatgcatttcacttctgtgctagtttataaccatgaaaagcaaatccctacaggtcctaattaagttcctgcttcctctgcctcctcaggaataattgggggactctttctcagtctggtgaccttacttcatacagtgttctccaatttcatgtatttttctgcaattttcaaaattttagtatctacttacagccatatagaattccatggtatagttactatattttcctgttgataaccatgtaggctgacttcatttcctcactattgtgtacacagcagtgatgaaggggatgagactctccatggtgtgataagaagcctcctgagtgtatttccagggcttctatagtgagactgtgtgttagttccattgttagtgttttgaggaacctctacagtgactcccgaaatggctacacagtttacattctcactagcagtgaataaaaggttttcccccaactccccaccttgtggtgatctctcacttcattggtcaatttatttctaggcatctaagttgctttggtttggtttttgaggcaattacagtgtcacatttttccctgacttctttctctgcaagtccattattggtgcatattaaagctactgggttttgtatcctttgctgagcatgataatcaggcccaagagttttctagtggagtccatgcagtgttttaagtgtagagtcacattgtctgtaagaagcaataggctaatttcttctttccgattcttatcctccctgtctttctctgatcctactgctttagctaaaacttccagaactatatagaataggagtcaggggaatgggcacccttgtccaagattttagaaaaaaggctctgctttccttgtttagtgtgttggttatagtttgtcgtgtgtcaattttatcatgttgtggtatgctctgtccattcttactttcttgtggacttttattatgaaggcatgttgaaaatagttaggggaaatgttgaaatagttagtttagtaaagagattctcttctatgaaccatgacttcactagccctggaaagatgactaggttttaaatatcaggcatgatttcccactttagtgggtttagttaagtctgaatagatagctgttggttaccaccaggacataggtgtcactactgtacccttaggatattgtgctgtgctggtcgttgttgtagttcgtaggcatcatagctaggtaggactatgggttgcttccctcttttggaagcatacatggtgccttctggtaccaggaaagctagtcttcaaggaagaagcttttaagcctgctctgggcacactgtttgaagtacatggtgtctttagcagtaacgtcttgccttctgcctctggggagcaaccaagggtagtaataatacctataatatttttgagtctcatagacaacataactcaaaacagggcttctcctgcctgatgttgggggttttgttagatctttggctcttgaagggagttatcaacccagatgagaaaatttcatatcaagtatgtatgtatatttatatacctacttatatatgttatagtatgaatccttatgacttgtttaggcatctttacagttatttccccttcctccctccctgtctgcatttgtctccctcctcctctctggtgagagacctttaaaaaagagtaaataaagatgacaactatttcaggaataaaaccattttatccaataaattaaatcctttgtgcaaatggataatgaagttctgtcaacaagtcagaacttgaaaagaagctgttagatagaaaagagcaggagaggtagaagcctctctagacagttgtaagtgtgtcctataagctatgagccttggggagattacgtgtgcacatgatcccattctgtgccgtgcatatgccctttctatatgtacctccgtttattaaaataataccctgcctacacttggaatagaaggaacttactgtactttaaaaaatatccttgaagcaattaaatcatcactgtttatcaacacatattattgtaccagttattgttattgttctcaataataatgtgattgagacatagtcacatgttccctcttttgtttgtttggcagagttattacaagttgaactgagaacaagaaaaacttgcttttggcgccatcaaaaagggaagccagatactttcctttccacaattgaagccatttattacttcctagtagactaccatagtgccgtgcagaaagagaagtacagaggacagtatgacaaccttttattcttctactcttttatgtaccgcttgataaagaatgccagaggctctggagagaaggctaaaccgcagctcgtccagtagttctgcacacccgcttgtcctgggctcttgcagtcgagccttgtttactccggggtggtaaccatgtgttatgcccatgagagaacatggggaagattccagccttgttcgttttattgtatttttttaaagggaattttgaatttgggcaatttttaagagatgatcctgattgaaagacaaatcagaagctatttgctcaatttgggcatatcccactatactgtacattttaatatgctgtgttacatttatgtgattgtaattatatgtgattaaagagtgtctttatcttttcacttatactcgcccttacctttcgacttaaatgaagttagaatctgttggggggggaaaatgtaatttgcttaaggttggtggcagaattggcaaaggtgagtgtgttgcgctgtctctggaagtgaacactccctcccactacctggcctctgctctaagagagaactgtggcatcacgtggtcctgccagagggatgtgcacatgacccattttggcaaatcacatggcccaacaggaccaggtctgttttgatgtatgaggtatgctgtaggagatgggatttatttttcaagagtgagtgatccaggggtaaaataaatctcatttacaatgcatttagaaacaaaggtaagtttgacatgatttaagtagggcaaagtctagattggggcagggtgaggagtatgctcaagtcaaatctattgcccagctcttcagaccatcaaaacagttgcaaggttgaaggaaaaaggagggaacagtctgatcactcatttgcctatctcatggcagccataagaaagaaggcccacacacttcagataagagtattgcacagccctacagccagatagtctctagtcctgccgaaagcagatacctgtgagagtacagaattggctgtttgtactggctgattttgtgtgtcaacttgacacagctggagttatcacagagaaaggagcttcagttgaggaaattcctccatgagatccaactgtaaggcattttctcaattagtgatcaagggggaaaggccccttgtgggtgggaccatctctgggctggtagttttgattctataagagagcaggctaagcaagccaggagaagcaagccagtaaagaacatccctccgtggcttctgcatcagctcctgtttcctgacctgcttgagttccagtcctgacttcctttggtaatgaacagcagtatggaagtataagctgaataaaccctttcctccccaacttgcttcttggtcatgatgtttgtgcaggaatagaaaccctgactaagacagctgtattgtcctatttctctttggtgtgatagaccccctgtgtcatggcccatgagcccctttgttactttgaaatacctttcactctgactgcatcatcaacacttccaagatgctgtatttctgtttttgtggtttggctgttgacatataaacatacatggctatgctagcctgctggagcacacaagattgcctttacccatctgcctctggacttctgtgtaggtcagctgacaagacagccacctccctgattcctgccactcttgcaaggtttgtgttatggcactgacatttaactctaattctttaacagtattattgtgccagtagacagcccatctttgggcactgtatcagatgcagctcaagcatccaggaatggttttagccccattatttcttaggctctgtcctagctcccttcttctgcacttgtgtgatcgccacagcaggcttgcaagattccctgcagctgcccaaagggttttgggaagtaatctgcagtgttagtgaaactaactagatcagtgtctggtaactaactagatcagtggatacatattcctccacatgaaaaatggaaggaaaagcatggaatacggaggaaaaagagagtttgctatctcccgaaagaatgtatttattcaaaaatacagtcctctcctttagaggactgtttccaggcactaagcctgctcatcctgacatgaccgcttggttaggcaagcatacttgccaagagactgacactcgcttcatggcctgcatgccacaacagcagatgctctccagtaaattgtcagtttgcatttggtttccatccttgctagtttctcttccttcttccagctttaccacccaggagcattctaataaagttgcaaatttaatctacccccagtctcttccagggaagtcagctcgtttaggtgggatttgatcagaaaagcagacatcatttaaagtgttagcataatctttaaacaagtgtaataaaggaactggggcttccttaaagggacttctctaaaggtggcattactgggggagtaagtccagttggctgcggcaaggaacccatgactgactgcagaactgtgaatcttcagctccgtcagcctcataatcactcttcccacatgtcttggcttagtgacaggtccttctcgacccatttggaagccttaaagaagaattaaagggactttgcttggctgctgctttgatgccatgttaatttggtctttgtcccaggtctatctttaataaccacatgttatttgatgaagaagatttcatttctgatcccaaattctgtcctgtccttccactgaattacatctgtataccaccatctctgtgaatctctgtccttacagtgccttatctgatgacgttaccttaggaaaagtgatgtctttcacattatggaagaatgatgtatcaatgtttggtctccagatactaatggttaattggctccagtgaaaagtattgctaatcatttggtgaactttaattgaagaccacacctaaaacaatcactgcccattcataggaatcatttatcaccagtggatacatattcctccacatgaaaaatggaaggaaaagcatggaattcggaggaaaaagagagtttgctatcttccaaaagaatgtatttattcaaaaatacactttggtagtatgtaatttaaaaaaagatcctagaaattgaggaactgctgaagtaattcaattaagttggaaggtaaaatatcagaatagaacattctaatttctaaatacttaatgttagtcttgttaaaagttgtaattgagaccacggagtacctgtatattactgaattaagcacacaggacaacttgaaatgcaaagatgtcagtgctttgactagctagacactttgttggaaaaggttggagactacatacacggcagtagtaagttcacaaaaaattaagcaacagcaggtggtaggaaaatccaaataccttgttaatcagttcatacattcaggttatttgagcttcctgagattgttgagagaacccaaagccctcaaattatttttaattaaaaatatggaccatctagagactgccgcacctgggaatccatcccataatcagcctccaaacgcagacaccattgcagacaccagcaagattttgctgaaaggaccctgatatagctgtctcttgtgaggctatgctggtgcttggcaaacacagaagtggatgctcacagtcagctattggatggaacacagggtccccaatggacgagctagagaaagtacccaaggagctgaaggggtctgcaaccctataggtagaacagcattatgaactaaccagtacccccagagctcgtgtctctagctgtgtatgtagcagaagatggcctagttggccatcattgagaagagaggccccttggtattacaaactttatatgccccagtacaggggaacaccagggtcaagaagtgtgagcgggtgggtaggagagcgtgtgtgtgtgtgtgtgtgtgtgtgtgtgtgtgtgtgtgtgtgtgagggtataggggacttttgggatagcatttgaaatgtaaatgaagaaaatacctaataaaaaattggaaaaaatatgattattgtgtggatgtgtatgatttgtaagggtgaggttatgtgccttggcatgtgcacttagaggtcagaggttacccttgtggagtctgcggattgaaggctagcttggtcagatcattggtttgagctctgagcatctttacctagtaagctatatctcaccagccccccagatggtttttaatcataacatttcatatcctttgagactctagaaaagttttattttacatgttggttatggtaagtactatatagtcactacatatttatggtagaatattgtgtcatggagaaatttgactcagatgttatgtttatatcttcaattgactgattaatgtcaagaagtatgtttattcagtaattctgtcactagaattaattaactagcaagtcagcaagacagttttggctatctttgctggtttgcttgtttgtttgtttgtctgtgagacacgatctcactctagcccaagctatcctggaaatcactgctcactatttagtcttgaactatcagcagcctttctgcatcagcctcatcagtgctgggattgtaagtgtgagacagtacactcagttctaaaagtcatttctaaatctggtacaaggttggttggaccagagaaggaaatgcacaaggtctccctggaggtatctgcgaatgtagcgtatttgagaaaagacttggaattacatgtgccatggaaaagtaacagaagattgcagaagtcatggtaacagagagtaggccaaagtgcccttggtgaacaagtgacttttactggggttgctaacaggaagatggatgaggggttacctacaggatcatggatgactcaaaagcagctgcatcaccaaaaagttcatcctaacacaggcgccaactgaaggaagctgcagccctgaagagccctggagagctctgaagcttgcgggtaggaagctggacaggcacacaaaatgtattttcatcatatgttctcctcctccaaaaagccaacaacagcaaacaacatggagctggttttgtgttcgccaattactactgtgcaagaggcctgctctgtcctaaaggaagaaccaactgggctgacagcattctccacaagaatcatagtaccaggtatgggaaacctttcaaatagtcaaggtagtacaggtggctccccaaacaatgtagacaatagatggtagccctggatgcctcccaggtgttaaggatggatccctattgctgctgctgacaacccatgtaagaaagaggactggaatgattagagctggatctggcctgacagcctttcctgcagtctagcttctatggttccagcagccaaccagtggaagaaagaaattaaacagtcctgcatgaaccatggcagttaccagcatggagagatttgcataaagatgcagtaaataatgcttacatgaagcttgtgggtaggaagctggacaggcacacaaaatgtattttcatcatatgttaaggtatcactcaacagaaaggaagttaaatctgttctggaaacctagccagcttcccggggctagtgagatcatggaccttagtcaagactgttatctcttaccttgcaggtccagcacaattcctaactacacttaaagtcctatccttatacccgaggttaagtgtagccatcaccccaccccccagtcaaagaagcctctctttatagcaagtaggccaatcatcaaaaaacatggcggaatacaataataataacaggccttgggaagcccagtcccaacagatgtttataacatagcccctgttcaggaagcatggcagaagagacagtagccttgtcggaggaagtatgtcaccatggagaccgacttggaggaagtatatgctcaagctaagtccagtgaagctcaagtcaatctcctgctgcctgtgaatcaagatgcagaactttcagctttttcgccagctccatgtctgactgcatgctgccatgcttctcaccacgactcaagccctgaaactaagccagccccaattaaatgctgtcctttttaagagttgctgtggtcatggtgtctcttcacagcagtagaaaccctaaataagacagaagatggtaccaggcactggtgtgttgccatgataggcccaaccatgcttttttctttgttggaatgaggatttgggactttggatttggagagtaatgagttacttgaagtgaagcttagtgggccatatggtcaggaagatggaagtcagtgatgctgagggtgatttgaactatgggggtgtggctcaagaagtttcagagaagaagaattttagtatgtggcctagagactgttcttgtgatattttggcaaagaatgtggctgctttttacccttgtccaaaagaaaaaaaaattctgcctgaggctaaatcaaagaattattttattattaattccattggcagaggaaatttcaaagcagcctgctattgactgtgtcatatggtcacttgtgtttactcctatgaagatctataatgaaaaaaagcaagctgggtgagtaaaaatacaaaaaatggtagactggagagaaaaggggcaccaggaagtggaatggagctaagtcctatgttcaaggagataaacaggttcaacagaggccatctgttaaatggaacaaagggagtggcaacctcagaccaagacccctccttagaactgcacagtgtaaggacttgatctcacagaagagacactttagctagacaatggggcaaaactctgaaaaaaacaaaagctgtgagctgcatcagctgcttggatacttgttgttctgtgtgtccagagagcaaaagacatcccgccccatcttcacagatatgatgactattcttgtttgtcaacttgactacatctgaaactaactcaaacccaaaaatggaggccacacctctggggaacttttgcttaatctgaagtagaaagatctacttcttatctggatcgttgagataggaaggctttaatccatatcttttgagctggtaaaaaacacacctttggtctgaatcttgaagcgggaagagacaactttaattcagatcatttgagctggtaaaacccacctttaacatggaccacaccttctgctggaagtctgtaaaaggacatggaaaaggaagctttggttctttgcctgtttgctcccacctcaacagcaagtccattctttcactggcattatagcctacttcttcaggattccagcatataccgaagaccatctgagacatccagcctcatgaatgagaaacttctgtgttagactttccattcatagccagccattattggagtagttagaccacagcctgtaagccattctaatgaattccctttctaaatatacagagggagattcactctacaaattctgttactctagaaaaccctgattaatacaacagggatggttgacccttaacacaaggaggttagagtcttgttcatcatggggacagtaagaaataaaggttgcacttaagcaaggattataatacattggcatgacagcaccatcgtgtaaagggcacactagcctgacactcaggcctttgagggatggtgtgagttacatggtagccagcaacagaagctgaagacaatgagagggaagcaaacagctgatggtgtagtgggggactgactgcctcgctgagcctgactgcagtggtaacactggaatagccctctacatcctctagagtgtgtacaatcctgactgtagcaaccaacgtggaaattggtccctagatcctctttttaagtccccctcaagcaagaaaacaaacaagcaaaaaagccttttaaattcttaagaaactgcttcttaagcataagaagaaataaatctacatttatgaggggtggattgtggtaagcaaagctgtacttccagattcattttcaagaaaggactcactgcccagcagcaaggaataacaccatcagcctgcagccaccagcttcttcagaaccccacatatattcttttaaggttctgaaggaggcacccagcataggtaccttctcccagaatgttcctcccctgaaggaagcattgttaaatgaaaatcccagtgccagatgtgtgcttcctactccttggtcagggaggcccaagaggctccaaaacacgatagactattgtcagtgcttccagttgcccaccagaatgaggtcgtgagaacccgatggttggagacactacacacttgagtttcaaaacattgagaaatacaaccggatctgaactagaactctactccctgtttgccagtttcatggtgacagaaggtgccaagtgagctgctggggctgaaaaatcatctacacttctacccagctgtgcacctcatgagctgtatcgcaatagtggcaactattatgggggtgatcaagtgctttttgacagactgagatccgttccagaaagacaaactcatggctggccgagacactctagctgggaaggtcaaaagccctaggggagatgctacttcctttattattttttttaatgggtatgatgtctaagtatttacatctatacccatacattagtgctgatatcaaccttcatcaaagaaatttctttttgcagcagatggagattaacagtgacttacaagtaatgggtgaaagtgacaaatgaataaatggctgtggatttctttgccttaagtggaaaatatattgaggagtccattttcatattccattttatctccatgcagaaacctggccatggaccgtttgctgtctatcttgggcgaaaggcacactcttctgctattctgcagctggtctgcctgactgagtgctttaaggctggcttcttcagcctccagttagcacctcaaagagacacagtgagaggctaggtaaaagggaattgtgcttctctaagttgaaaaggggagggggacttatctctgcccttccccccaccccctacccccctctccgcagagcatgctttcacttggtaaaaagctcactgcaggtctgcacataaattcagccatatattgaataagaggttagaacagagaatgcctacatgcaaatacactaggagcacttatctggcttaactttcaccatttgttactagcttgcagggttacagaaaagtttaagactggaactaagccatccttgaagttttgacaatcttaatcagtatcttatctcctgtttttgcacctggggtcctgtggtgtatatcttctttatgacctccggagaatggtttctgtaaccccttgaaatgtgctctaagttttagaagtctgctgtaatctcagaagcaattaaacagtcgggttataaaaggaattggaatgtctctgtgggtgttgccatttggaaacaatagtaactcttacattgctaggtgtttctgcagaatagacaaatactatttgcctttccatacagtttgagtctggggtcttcctttattgattttcagacccatacaatgtaattccccacacctgcactaaaactcaggaaacaccatgaaacggatggacacaaacaatgtaagatccagagtttgaggagaagtgttgcaaaactcatctttattttcaggggtttcccacacagtgttatatacacttattatatcattaaatgtttgctgtagtaacatagttccccctttgtttctttttattgtgatttatttacttatttatttatatcatgtgtacatatgagtgtagggactgtgcatttggcatggtgtatatgtggaggtcaggagacaacttttgggaatgagttctcttcttccaccatatggaggcctgagggaatcacctaggtttcttaagcttgtattaggcaactttatactctgagccatttctcaggtctgctcctcagtttataaagcaaatatgtcacaaacattttaagacagtttaactctagagaattatttggttttcaattcattaaattcattcaattcattagactactttgtctagaggaagggaagaagggagagagggaagaagggagggaagaagggagggagagaaggaaggaaagggggagaggaaggaaggaaggtagatatgagggaagatgaggaaaatatgagaagataggaggaaaggaaagagggggaaaaagagatggggagacaagcaggaaatctacttacagaactaagtggcctgctattttataaccttagatggaaaagagttttttgttgttgttttttattggtcttcaaaacacatttccctgaaaa

SEQ ID NO: 1307 - DNA, 1310 bp, Mus musculus
gagcggaggcggtacggaccgagagttgagcgtggtgcagtgtacctatgatacatgctttagaaacagaatattttggttcaaagggaaaatggctctcagtccatctgtagttcctcaagaaagtaaagaagataatgcaaactgtgtagaaacaaaaccgccacaaaccgcttccattgcttcaggagacccccttcaaaacttatgcttagcgtctcaggaagtgctgcgtaaggctcagcaaagtgggaggtcccggtgtcgccaatgtggtggctcaaggatgttctactgctacacatgctgtgtcccagtgggaaatgtgcccaccgagcagatcccatgtgtgcagcttccattgaagattgatatcattaagcatccaaatgaaacagacggcaagagcaccgctgtgcacgcaaagctcttagcgcccgactctgtgaacatttacacatatccgtgcattccggagtacgaagggaaggatcacgaggttgtacttgtttttcctgggcctcagtctatctcaatagaagatgtctctttccatctacaaaaaaggattgaaagtaagggtagaaacaaagctgacaaccttgatgtgccacctcggaaactcaagaggactacggacgaggaaggctgggatctgcatgagagcacacgccaaggccccgagttgaaaagagttgtctttattgacagcacctggagccagacaaaccagatcgcctctgatgagcggcttcgggagttattacaagttgaactgagaacaagaaaaacttgcttttggcgccatcaaaaagggaagccagatactttcctttccacaattgaagccatttattacttcctagtagactaccatagtgccgtgcagaaagagaagtacagaggacagtatgacaaccttttattcttctactcttttatgtaccgcttgataaagaatgccagaggctctggagagaaggctaaaccgcagctcgtccagtagttctgcacacccgcttgtcctgggctcttgcagtcgagccttgtttactccggggtggtaaccatgtgttatgcccatgagagaacatggggaagattccagccttgttcgttttattgtatttttttaaagggaattttgaatttgggcaatttttaagagatgatcctgattgaaagacaaatcagaagctatttgctcaatttgggcatatcccactatactgtacattttaatatgctgtgttacatttatgtgattgtaattatatgtgattaaagagtgtctttatcttttcacttat

SEQ ID NO: 1308 - protein, 332 aa, Mus musculus
SGGGTDRELSVVQCTYDTCFRNRIFWFKGKMALSPSVVPQESKEDNANCVETKPPQTASIASGDPLQNLCLASQEVLRKAQQSGRSRCRQCGGSRMFYCYTCCVPVGNVPTEQIPCVQLPLKIDIIKHPNETDGKSTAVHAKLLAPDSVNIYTYPCIPEYEGKDHEVVLVFPGPQSISIEDVSFHLQKRIESKGRNKADNLDVPPRKLKRTTDEEGWDLHESTRQGPELKRVVFIDSTWSQTNQIASDERLRELLQVELRTRKTCFWRHQKGKPDTFLSTIEAIYYFLVDYHSAVQKEKYRGQYDNLLFFYSFMYRLIKNRSGEKAKPQLVQ

SEQ ID NO: 1309 - DNA, 44117 bp, Homo sapiens
tgttgacaagagggaagactacaacatagagcctactcaaaggacataagtatttatatacacactttcctcattgaaacatatttctgaaatttctagtcttaaagtttattctaagccttctaaatctccataactgatattttaaaatgatgtaatggcacataaaataagatgctttactcacccaattttgaaactttaagaattcttcaatgctctttggaggttcttgcattttctaataaagtaatatcaacattgttcattggcataaactcactagactgttcataatatttacaaataatttacttaaataaaatgatactctatttatcattttcagagcggtaagatatcataaaatgctcactttataccatccctccactttgaaaagggacacacataaatgtttaagttcttagcctccaaaccaaattttgtaataggcttccctcttatacactagccctagagaaaaactccacatgaatcttgctttaggtcctcatttcagattcctaaaagagttccaagatattttgggctatcatggatagcctctataataaatccagagccaaaaatataatatgttcttgctgataaagtattttaaaaagttaactagttacatagttaaaataaatttaaatgtttggatatttcagtctaatagataaaaatcacattttttagtagtttctttgtgatttcaaaatgtattcaacattacacaaactaattttaatccagaccacaactttctccttttcgccttagagactttgcctacattcttccttctgcccagaagtctccctttcccaaaccctctttcaatcctttcttggcctatttaactcttacttcaaataacaaattaaaagtcactttgtccatcaagcctttcttatcccccaaagttttctccgtggtaacatacagcagattatctctatgaggatagaaactatggtgcaatcatggctgaattttctttttttttttttttaatttggtatgtttattttgtagccggccaattccttggagaggctatttttttttattatactttaagttttagggtacatgtgtacaacgtgcaggtctgttacatatgtatacatgtgccatgttggtgtgctgcacccattaactcgtcatttaacattaggtatatctcctaatgctatccctcccacctgtccccaccccacaacaggccccagtgtgtgatgttccccttcctgtgtccatgtgttctcattgttcaattcccacctatgagtgagaacatgcggtgtttgttttttgtccttgcgatagtttgctgagaatgatggtttctaccttcatccatgtccctacaaaggacatgaactcatcattttttatggctgcatagtattccatggtgtatatgtgaatcatggctgaattttctaaatttcacacagtggctggttcatagtcaatgcataataagtactcgcagtgtgcataaattaaagcataaatgagtagatgaatgtcagaaatatataggtacttgaaaaataataaaaatacttctagagaatgaaaatccagtgagaaggcaaaaataagaggaattcagaagtctaatatcctaatatccatgatgatatcactgaaaagattgtactacatttttatttattaaaacacatatttcatatcaatatataaagtggtcaagattacagaatcacaagttcatgttttagaaaaaaatgctaaaaaataattacatatttgaattgggggatatttcattcatctaaatatatgatgaatataagaaaatatataactgataatacaagaagaagataaagagtgtatgtgacaaccattatagaaaatgagtatttagtgagagtcaaaaaattaaacaattgaactcatggagatagagatagaatgatggttgccagaggccgagaagggtagtgggaagtgaggggaaagtgggtatagtcaatgggtacaaaaatataggttagggtcaagcacagtggctcatgcctataataccagcacactttgggaggccaagacaggaggactgcttgagcccaggagtttgagaccaggttgggcaacacagcaagagccaatctccataaaaaattttaaaaaaaggtaaaacgaaacaaaacaaaacagagtggccaggcatggtggctcacgcctgtaatcccagcactttgggaggccaaggcaggtggattgcttgaggtcaacagtacaagagaccagcctggccaacacggtaaaaccccagtctcttataaaaatacaaaaaaattagccaggtgtcccagctactcgagaggctgaggtgagagaatcgcttgaaccccagaggcggaggttgcggtgagccaagattgtgccactacactccagcctgggtgacagagcgagactctctctaaaaaacaaacggacaaataaaaacagctagagagaatgaataagatctaatattcgatagcacaactggctaactatagtcaacaataatttactgcacattttaaaataaataaaagagtataattggaatgtctacaacataaataagtgataaatgcttgaaatgatggataccccacttactctgatataattattatatattgtatgtatcaaaaattatctcatgtatgccataaatatatatatacttatgatgtacccttaaaaattaaaaataaaaatttaaaaaaggaaagcaaatgtttagacagaagcaaagatgcatagagatgtgaagaacatgttatgggaaacagggaactctagagctagtcaaattgaaaagaatgagagatatgagagatggtgcatgcaaaaggcttacagacagaaaaatactcacgatataatatctctagcttcatgggtatagcaatttggctagaaggaactcacaatacatttacaaatatacagaatcaaacttaatgaaaacaatttaagcattgacttttttttcttgtaatggctgtcaaaccactccaagtacaaagcaccaaaaataatatgcacatttaaattaaagggaattagaaaagtgaagaaagtgaaacttgcatagtgaagttctaactaatttcaaaaattccatgtttcttttggggtaaaattaaaataaggtaaggtataaattaaacagatttctacttttggtaggatgtagaaggatataaaacacctacacttccatgataataataagacaaacttggacaaaaaaaaaatcatatttttctatggggttagtgaaaagtggtgaatgccaggaggcaggaccagttaaataacttgtaaacattcagagttccttgttcaaaattattgagtttgaagataataacatcagagcattaaaccaaatgcatgtacttctcagcataaggccctgtgcaactgcagaagttgtaaacccatgaagctaaaaacaagcctaactgtcccatagaactaatgtttatggtttctttaaataaatatagaaattaatccttctagtcttaaaacttgagaaagttacattggtcttatctgagttcctttcccagaaaactaaccatcaggcctcccagatagtgtcaaggaactaaaacataccaaatcactatatcttgacaattagcctctagactcctcaccatcacccatcatgattgcctaactgactacctgtttcctgttaaccaactcctccttcttaccaccactccctaatttctgttttcccacacatggttacatttcttccttgctatataaaaccctaattttagtcagtcagggagatggatttgagactgatctcccatctcctcggctgcagcaccctattaaagctttcttccttggcaatactcatctcagtgattggccatctgtgcagcgagcattaagacctagaccaaacccttggtgtttcagtgacaaagccagctctacctgggagccctgattacctgaaattccaagagaaatataacctttgtaagtgaacataaagctgtggaagcttccttaccccggggccagctctgctgctcctcctttgacatgttcgttggcctgccatggtacagtaactttgcagaaatgaagagaaatcagctgggtcttaggcttcaatgtgagttgggcgaccaaactggggtatgaaagacacccaaatgcaaaaataaatgactcagccaaacaatccctttcccctcacccacaaacctcacttctgacttttaccaagtcagatagtttggctctgtatctccactcaaatctcatgttgaactgttggaatccccagtgttggaggtggggcctggtgggaggtgattggatcatgggggtggtttctaatgattttgcaacatccccctagtgctgttttgtgatagacttctcatgagatctggttgtttaaaagtgtgtagcacctcccccttcacccttttcctcctgctccagccatgtaggacgcatctgcttccccttcaccttctgccatgattgtaagtttcctgaggcctccccagccatgcttcctgtacagcctgtggaactgtgagtcaattaaacttcttttctttaaaattacccagtctctggtagttctttatagcaatgtgagaacggactaacgcagcaggggaggaagggctggaaaatatattctgctcatgaagctggaggttctactacgtcacatgacaaacgacatgcatataacaagaaatggacaagggaaggctaataatataagctattataatgtttataagaaagattggcctgaatttttctatcttataatgtgaagatttggaattaaggctattatggtctcaaaaaaaatgagttgggaaatgcctctatttttttctattatctgaaagaatttaaaatctgaaagatcagtactatttcttcctttcttccttaaatgtttggtggacactgctagttatgttccctgaacctgaacctgaaattatgggggagttttaaattaaggatactgttatggacctaatcatgcccccaccccaaattcatatgttcaagccctaacacttataacaagatgtgactttatttgcagatggagcctttgaggagacaattaaggttaaaagagactaaaagagtggggctctaatatgattggtgtcattatgagaacagacaccagagagcttgcttgcttatactctctctccatatacacacagatattttatctgtgaaaatatctagaactatgaaataataaactttgtgttgttttaagccactttgcttgttggctgtttgttacagcagcaataagaaactaatatgaggagaaagagtgatttttttttttagcattttgcagatgtgaaaaatgccacacacttaactgatgctctgtctatataagagaagaggctttgtaaggacatggtgagaaggcagtggtctacaagccaggaagagaggcctcactagaaactcacactgatggcaccttggtcttggacttctggcctttaaaactgtgagaaaataaactactgttgtttaagtcatctactctgtggtattctattacagcatcctaggtagactaatacagatataagctatcaaaattaatataggatcattcagctattctattacttcttaattttggtaaattatctttcaagaaaaattgaaatgtcaagtattttgatataaatatttattcttaatatcctcctattatctttgcaatctgtagtgtctgtggtgatgtttcatttttcatttctgaaatttgtacttttctttatcttggtcagtctatctaaaggcttatcaattttattaatctttgcaaagaaccagttttggccttgttgcttttctttagtgcacatttgtttttaatttcattgatttattcttatctttattagtcccttttcttctttaaatgtttgagaaacttccaatgataaaccttgctctactatgaagctgaatgcttgacaattcctgttgagacaccatgaggctttctatcaccattttaatccttgtatttcaaaatggatagaaagctaaagattattatttatggactaattgtgaaataaaaaatatttttaaaaaatggaaatccaaacaagtgactaaaaataaaatctaggcatatacagacaatgtggggaacagaaggaaacttcaaaaaagtctttaagactcatagagagctataataagataatgcatccctgaaaccaaaactgcatgttataaatgaatacagaataagaaaaaatgcaaagtacaaatatgatataaattattcaacaacagtctagtgaaaaatagctgaagaaatcttctagaaactagaacaaaaatgttaaagtaaacaagaatcagaggataaaaaaacaataatttagaggattatgccagaaaatgactttcaatctgtaaatttaaatataaacagagcatcaattaaatgtgtggcatttttcagatttgcaagatactaaaaaaaaattcatctcatattagtttcttattgctgctgtaacaaacagctaacaaagtggcttaaaaaatcacaaagtttattatttcacaggtctagaggtcgggaatctgaaatgggtctgcagggctatgctcctttcatgttttgtgtgtgtgtgtgtgtgtgtgtgtgtgtgacagagtttcactcttgtcgcccagcatagtaaatttacttgtgtaacaaaaaaaacacaaaatatcaatggcttaatacacataattttttctcccagaagatctttttgtgagaaaaggggcttctagcagtcacctgctatcctttgctcagagctcctccctctatcttcaaagccagcagtgtagagtcttctcccctctcttgacatcttgtcttcctctcataagaactctttgattatgtccagccacccagacaatccagggtaatttagcccatctccttaatcacatatgcagttccttttgccatataaaatatcaacaggttctggaggtaaggatatagacatctttgggggccattattctatctactacactcctatttacctttttccaagaaggtattagagaatgtagttcatttttaaaaagggattaaacaaagaaaaaggaaacaagggatctaacacacaggagagcagtattatgttggagaaaccagcaatcctaaataaactaaaggctgtaacgctgtaggaagagtatctgtaaggaaaaaaaatctactggattaactgatgtatttcactgtgatgctttagcagtttgccagtgtttgagaacagataaataatacattaaaaatggcagttaagagaaaggaaagtaaaaagttgtattaaaagttaatgcgatcttagtatactatgtgccttggggttgaatgacatttacctagacagtagtgataacactaaatgttgatttagccaaagcctatgatatcactattgacaggtgaagggacaagaagagtgtatgaggtagagagggaatgttcacacacttggaggtggtgttgttacaaaagacctttatcactgccttccacaggagaaagtcagtgggtaatgtctgaaattggaaaatcaagaaactgcaatgtaagtatatttagacatgggggtaacagatgaaatatttaaaagacttgaattttcctttggtgagaagaattgagaatagagtagaagggttgggtactacagggttttctttaacctagaatgtggcaaactgttagtgctcaccaatatgtgtgtgtttctctacatttctcaggatccccggcagttaaagtgggggccttgggactaaattctggccaacagaatgtggccaaattgatacatgtcatttttagagttaaccttgggtaatttgccatactttctttcttgtcaaacaagctagtcctagaaggcagcagaaccattaaaaataaaaacatctggccttgaatttaacatttcgtctgcctagaaatagccacaatggatcttttgtgaggaaaaaaaaaagtgtattaaaccaccgatattttggggttttctgttacagaagtaaattcactatgctggttttaaaacatggacaagaaatctttgccaatcctttgagaagagggatctatgtctcctttcctaaaatggaacaggactttgacacatttgtaagcaaaagaaagtgggggaagtagcaccgcgttactttttgaggcaaggtcagaaaaggtcaggcaatttttgccttgttcattgcaacactccctttggagctctgagtttaagctaagaagtctgactaccttgctgccatactgtgaggaaaccccggccatatagttacagaagctctgctagcatgcccactctagtctttctaattgagttaccaaagaaaagctgatgactatgccctattgacaacaccacctgtgaacataataaaatggttgttttaagccaccatattttggagtaatttattacatacgatagcaacccaatgctcaatctaacaagtagtattatttgctttttaatctgtgcaatttaactactttgataaaatttagagttaaactaaaaaggaaaatggttgtgaattcttcttggcttatagactttgctattctactttccctacccagaaaattcacctttctccctaaatcactggctttcaaactttttaaggtttgaaatacagtaagaaatacattttacaaacaagccctagtgcacacatacacgcatatatacaattaaaagctccataaagcagtactttactaactaacactaaatttacttacatgcgctgatatttccaatctatattgtttcttttttttaagtttaaagagatttccttgcttacaaatgggtcaagacctccactaatgggtcccacacaatcccctttccagttgaaaaacactgtcctaaacctaaatcattcttcaaggccttacccaagtccgaaaaagaagcctttattgaccactccattctcagctttcttgaaattcctgtaatttattaaattccattttttatctcagtagtaagaatattgcattttctgtacttgaatttaacatgctttacttgatatcgtgagcacttctagggcattgtaatgtcctttatctaccacttgataaattcagagtagtcaataaaacattgctcaacatttgaccattgtgttttaaaatcttagttgttagagtgcacttccgtttgcgcattgtttggggagaggcacggacaaatgttctaataacttatccacatattatacttcaaagtggaaaaacacaaagtactcttaactctatatgcgtgtttttatgcaaactaaatcattaagatacaaatgatttttctaatagctttcattaccacacagcacacgaaataatgatattgatatagccacgaaagactaatgtaaccaagttctcacaatcaaaatatctttgaggtgggcaaaatgcaaacttttctctgggatcaacatttcttcacaactcactgcaactacgccttgacagtatgtttcgagaaccgcttcccaattttgttgtcccagcaagaatcgggaggaaactgggtgaaaggctgcgaggcttgaggcgggtcccggacgaacgcggccctgcccctcgccggagcctctcgggagaagtgcgacaccgccgctgattgagaggctgaggcggaacttcccgtctaaccccccccccgctgtcgtcccagcctgttgcttaagccgcgcggtgtgcggtgtgcgcggcccctgccttagcaacgacgctagtaactgcctggctcctccctctggtgtctcccggaaagcgctccgtctggtccgtgcgcgatcacggcccggcgcgtggctcgggctcgggcggagctggagacgtgtggagctgttcgaggactcgcgggtgtgcaggtctgagtaccactccgatccctggtggaggtccccgcgcctctctggagaccagtggtctggccccagaggtgcggccgcgggaagtggacattctttgtcaggaccctagcggaggtcgcgctgggtgtcgcctgtgagggggatcctcggtttctgcgcggtctcttgctttttttaggatcttgcgggccctttgggaaaaaggtttccaaatttttcctcaaaaaaaaaattatttttcctaccaatgattttcggtgcattccgccccaacgaaaagtatgtcctggcaaagtcagttccctaggaaccccatactttattttattttatttttagtatttggagtggtttgtgggggtttggttatcacggaaggggaagcgtagtacagacgtagaattagtgatgccatgcagtgtatttaaaatattgaggttgtggttacataataagcaaaagagcctgtttcttacgtctaaattatttattgggaatgtaggacaaataaggaagtatattaacattttcagtcgccaggcccacaaagttggatggtaaaatcaatactgtagatcgcagcatgtaaggactaacccagtgcaccatgaaaacgaaggcaagacagtttgttaccatatggcgggtggtgtgggagaggccattgatcctatatgaaaaagggtactactaccttggattatgaaaaatgaatgttggacctgtaggtcctatgtgaccaagttcttaaaaacactctaaagaaaattggaagtggtttttttctaatactgaattggtccacaatataggacaggggagtctgtatagtgttccattgggaggtgagtcagcttacaataatggaagaggtagaagctttttgttattattttggagaaaaaaaaattgccagcctgccacttgtgctaggctgcagacggcccataaaggtagtttgtcagatacttcagtagtgagatgcttactggatgtgttttgcagaatggttttgatttagttaacaagtgtttgttgagttcctgctgttgcataagaatcaggaataggtgagatcagggaaggaatctgctcttacagagttgaatgctggaggggatagattcactaaagtacctccacaataaatgcatttttccatgtcaaatatgtggaactaataataagtactcaaagaggtttaagacattgctgtggcccatctatgagttaataaggaactgaattagaatcctgactttgagagtgaagatagaggattatatacaaggtagatgcaacttggtgagtataattaatttggggtggaaattgggtagaaggaggaataaaaaattaatgtatttttagccttaagttccagaatgatggacgcaccatcaaggtgttaaaattgttagttccttaggaacagtctttatgttttctaagtctttttagcccccatgactcaaattgtacttccttgcacatatttgatgttaacaagtatgttttaaaaattttaaataaccccatttgcaataaaatcatttgcaatgattttctcacagtcgaggcaggctgttggctcggttaggacagatgccctgatcatgtagtttcagagaccactggagggagctgcccatgatttacaattgctggcctcttctacgtggccacctcagccataagtgagagtatataggtgaactaagaggtggagccataaacatttctcttttactgtcttacaggtatttgtggtggttgatttttctagaggaaggttatttatataaagcttcactaatatccatttagttatgtggatagcaggtccatgaactgcaaagtgatatttctgaggtatctctaggaggaatgcactttcagtgccctaggataactccaaaaactcaccagtagttttctgttaaatgtcaggcaaccacagtaactttcatgacatccacaggaactacatttttcagtcccactatgcctgggcctttgagtggtacatgcattcccactaaatagctactccattacccagggaaatgaagtcaggttgagctactccaatcaaatttcattttttaggatgaatcccatcatctgaataactcaggactattaaagcctcaaaatgtttctctgtaagaacctcaggcaacaccaggacaaacccaaagagagtttaggtgaaacttagcttcgtatgtgcagcaaagagacgccaacagagcatttgcaactctcatttctggggactattaggatctcttcccaagctttttttttttctctgttttagagatgggatctcactttgttgtccagactgttctcaaactcttgtgctcaagtaatcctcccaccttaacctcccaaatgctagtattataggcatgagccaccatgcgtggcccttcccaagcttggaacttccttacctgggtcgtagatggactctaggagatctccaaacctcctgaaattgtgtgcaaaatattgtgtctgtatatgcattttctagggatgcggtttaatattttcatgtgattcctaaaagaatctgaggctcaagaaaagagggcatcttaatatcctgcactttcagtcattgagggcatgatcacaaagatcaaagccatttttaggcaggtgagttggagtggcagtcagaagtaggtaagattttctatttgtgaggcaggaacaagggattggaccattgttcttaaatactgctttcttacccaaaatgcaaatctgtgcgtaatcagtacacagcaaaaatatttactgtattttgtttttccccttgggtacatttggcaagtgcctttttctactataaccggcgtttttgtatctctttatttgtatctcaaactcactgggacttacaatcttaaaaaaaaaaagaaaaagaaaaattcatttgatgagtaattaaattagtgccactaacttcttctcagcaaattatgttgtattttatgtttctctggactttttgttcactttctgtttgggagaccacaaaatgtttcctgctggagtcacagcatttctcttgtcgctgtttctacttaaagtgcctggagcttcgtagttaaaccacaatgccagaaggctttataataagagaattattttacagctgtggaatgcatatcgaatcaatagggcaccagtgttgtttctcccttgaaagatatcttccttacagggtatacagatagcaattttggcagccatcacccttctttgaagaaaatattaagtgggaaagttattttaccatttttctctagtactaaagaatctgaatgatgtatgtttttaaaaaacataaattcttagagtaagtggacattaatgttactctgtaaatttttaaaatttataggataatatattttaccttatgggatattttacaaattgtaatgagtagtagatgcctcttattttttattggatatgaagttttatatgtatatgcacacatgtacacagacacactcacacatatgtagtgtgtgtttaagttggagagggttatatcttttagaacataaccaactaaattttgccaattccactagaatcttctatttttcattaatgtcaattcaaagtcagagccaacagggttgaatatatccctgtctgatgctaacgtgaaaccattgcattcctaatatctggaaaacaaaactgccatctctggaacaaaaaagggttcttgaaaaatggattctcagtacctgaactttatatttgaaataactttcagtttattgcttttaatcttatgttttaaagtgtgccaatttggtggtttaaaacatgtttaataagtactaaaacagcacacaattgtgacttaaattgagtaattttctttgtagactgagtaaaatgttttctgtttttatttttccttctcttgatactttttttttacagtgcacctatgatatgtgttttagaaatagccgttaaactttggtttgaatgaagaatgtctctcaatccacctatatttctcaaacgaagtgaagaaaatagttcaaaatttgtggaaacaaaacagtcacaaactacttccatagcttcagaagatccccttcaaaacttatgtttagcatctcaagaagttcttcaaaaagctcagcaaagtgggagatcaaaatgtctcaaatgtggtggttccagaatgttctactgctatacatgttatgttccagttgaaaatgtacctattgaacagattccacttgtgaaggttagtaagaaatttaattgtttgaaagtatgaaaatagattttttaaaaacatctcatgtatacctactctaattgataaacttaataaataatgttattattgttagaaacaagtgcttgttgctgcaaagaaaaactagcacttagacagaaaatttctcagcagggcacatttacttctgcagaagggtgctgcgcctgatcgcaagagcacaccgaacaaaggaaggaagggatttttaaccctaatgcagttcctgtccctgtgtccttcccttattggctagggttggaccacacaatcaaaactgattccagttggctaagacttaaaattttccaaatagggtaaatgcacgatttgtaaaaggaggggttaggagtggtctgtccactatagtataaggcatgtctggacatgtttggccatgtcagggcacaacaagagtgggagggttgtttgcaggctggaaacgagagtacaaggagcttgggcttctgaacaaagaataagaacatcacacaattaaacattttgaagaggaatttatcattcctagcatgaaaaccaagtgtatttatggaaaatttagccctacagaccactaaacctctttgtttttcttgtctctgggtctgaaatggtgtttttaatgaaaccaattaatttttcattaatgattttaatttatttacaacatgggaaaaaatgtgtgatataaacttatgaatactaaaaaaaaagtttatagacaccctgaaggagctccaaacactcatgtctttggactgctccttgagaaaatactattctagtagaattagagttgattttcacctaagattttgtgacttatcctatacatggggatggagcagatttcattgaccaaaatgaaaataaagtaaaatttaaaaactaagaccaattccctgggctgtgttatcattagagtgattttaagcccgatttgattgcttacctttatactttttgggctcaccaacactacttttgtataggtaaaaggtctgtagaacgtcatgtctacataatcaaagaatttattatatatatgttaacttgtctaacattatcccaaactttaggaataaatcaattaatgtataaaatttgactgtgtaagactttagagagactaaattctacacatggactcattagaacttgccagtaaaaaaaaaataagttgtagctatattttaaaatttgttttgatgattttaaagttcatttgaatttgaagtaagaagagtactttgacactcatattttatttgaatttcagtttagcctatatcatcttggccagtccatggtctcctcagcatctaaaatcacatgtataggctaatggaaagtttactagccaagaataagtaagtgtggaatttaatatgatcttcacagtttgctccgaaaaaacaagaacttgagggtaataattattttcaagtttcccattatcttacaggaatgttacattttgaagtatggtttttgaagtatacgtagaattattctattttacatttctctcatagccatgtaaagaagggattccattaaaagttttatcctaaggtgtattgtattaaaaaatggattgcatattataataataataatcagtaatatagttacagggctgatattttcatagatatttaataatagagggtattttccaaatcagtggtctaatatacaccatttaatagaaatgactcaagacattagtgtttgatcatctctcaatggtctggactgtgcagagttttctaaagtgtttatattttaatggccttgtataaaatttgatactttaatatacattaatggtaataacagctctacaaaatgtcctttccaatttttactttatttttattttaacaaatcattcagcatttgcttttagatagcctacttgggaaaggaggatgacaatataatgagtaattccctcccaattttagtctagggaatgcattcataaatatagtcatatgtctcctaatgacagggatacatcctgagaaatgtgtcctgagaaatgagtcgttaggcaaattcactgttgtgcaaacataatagaatgtacttacacaaccttcatagtatagcctactatacacctgggcaatacctattgctcctagcctacaaaatctgtacagcatgttattgtactgcatactgtacacagttgtacacacaatggtattagtgtatctaaacaaatataagcatagaaaagtacagtagaagtacagtataaaaatagtaatcctttatgggcacttagcatgaatggaatttgcaggactggaagtttttcttggtgagtcagtggtgacttgtgagtgaatgtgaaggcctgtgatgttactgtacactactgtagtttttataaacactgtatacttagggtacactacatttatgaaaaatatttttcttcaataataaattagcttactgtgacttttttactttataaactttttaaaaaacttgtgataacacttacatttaaacacaaacacattgcacagctgaacaaaaatatttctttatgctcttattctgtaaccttattcctatttttattatttatttatttttactttttaaactttttttgttgaaaaccaagacacaaacacgttaccctaggcttacacagtgtcaggatcatcagtatcactgtcttcttccacctccacatcttgtcccactggaagctcttcaggggtaatgtatggagctgtcatctcctatgatagcaatgccttcttctggaatacctccttaaggacctgcctgaggctattttacagttaacatttcttttttctaattaggatgagtgtactctaaaactaaaaaaattaagtgtagtatagcaaatatataaaccagtaacagatttatattatcattattaaacattattgtatagcatgcttttatatgactggcagtgcagtaagtttgtttacatcagcatcatcacaagcatataagtactgcactgtggtgcaatgttacaatggttacacttcgctaggccataggcatttagagcctagaatttaaaaggctctcttggggaaagttgataatcccatgggaaaatgcttaggtctccttgtcagtagcattttgataaacttgggcagaaggatttgtggtaagtctcttttataaaacataagtgttcgagagcagattgatattctttacttgtttgaaaacagaatgtctctactcagactgccctctggtcaacactattttttttttttaaacacagttaagctttaatgtccatacgaagcctcagagcaaatgtttttgtagcttgtaaaaaagcaaattttttttctttcttttttaattatactttaagttcttggatacatgtgcagaacttgcaggtttgttacattgatacacatgtgccctggtagtttgctgcacccatcatctacattaggtattgctcctaatgctatccctcccctagctccccacccccagacgggctccagtgtgtgatgttcccctccctgtgtccatgtgttctccttgttcaactcccacttatgagtgagaacatgcgttgtttggttttctgttcctgtgtggtcaacactattttgttactctgtactcttgtcattatttaagaaataatcttcttttaacatgtgtgaactagaacacaaacatggatttccatgatttgatctgtttctgtgctttggttttatgatgtgagagatctcacgctcatggaaaactaacaataccttggattgtgtacaggttttgcataattatgcttgcagactttagttcataaagctttttcttttatcatataattaaaaaaataggctaggcacatgatttataaaatttgtcaataacactcctgtgttcttgatataaatgataccctccaagatagctagctgatcagaaatattgataacttttggaattttcagctttactcatcagccatataagaagttcacatttatgatctgctttctttttcttttcttgtcatgatctgcttttttttcttttcttacttcctaccttccctgggctaagataatactgatgtggtgctcagagaccctagggagagggaaggtagtttcaactgagaccgagcgtcatgaggaaactctgatgtagtgttcagccagaagtagactgatgtaaaatcatttgtgaactgcctacttaaatggtaaattttccataactagaagttggtttgatgattagaagcaattgggcctaacttataaatgatcattgggcctaacttataaatgattgctaggcctaagcggggagggtaggagatacagcatttgaaaccctaattgaaaactatttgaggaattcatttgtaggccaaggtcctccaggggtgtattatttatactgttctgtccccaacataattgtccaggaagaaaaaaatttgaaattgaaattatttagtagctgctccattcaaaaatagttttggaactaatgacacacacacacacacaacatggaagaacctcaaaataattattcttagctaaagtcaaatgaagagggtatattgtatgatttcatttatataaaattctagaaagtacaaactatagtggcagtggattactgattgcctgaggagggcaattgttgatggtgagaggagaaggaagaagggcttgagaagacttttgatagtggcaaatcattattttgactgtagcagtggattcaagaatttaacatatgttaaaacttattagattgtacactttaaatatgtacagtttaagacataagaaaaatagttttgtcctccagggtaaaatagtgtgcccagggtaaattcctagaatcctacttatttagcatgggatgggaacttggagatggtgggaactaccaaataaaacaaaaggtcatttaaaagctgaagtcaagaacacatctccagagggtttcttatatatagtaagggagatatgatttggcatttttttcataatcatggctgaatgcagtacttgtataagcattacaaagagagctaaaccaaaaaagccaaagtgaaataagaaaaatataatttacaaaatccaagagaatattatttttgcatagagacatgttacagacaacatctataacaaataatgaaacttcaagggaaatacttaggcaacaggggtccccaatccccagaccacagaccagtaccggtcctaaggaaccaggccgcacaccaagaggtgagctgctggagagcaagcgaagcttccgtctgtatttacagccgctccccatcactcgcattaccacctgagctctgcctcctgtcagatcagcggcagcattagattctcataggagcatgaaccctattgtgaactgtgcatacaagggacctagattgcatgctccttaggagaatccaatgcctgaagatctgtcactgtctcccatgtcctagatgggaccatcaagttgcaggaaaaccagctcagggatcctgctgattttacattatggtgagttgtataattatttcattatatattataatgtaataataatagaaataaagtgcacaataagtgtaatgtgcttgaatcatccccaaaccctctccccaaaccctggtctgtggaaaaattgtcttccacgaaaccagtccttcttggtgccagaaagattggggagtagttaggcaagatgattttgaagacagttttgtgatataaagattacacctcttaggtctattgttactattttttaattgataattatttaatttgtgctattgaaaatgtgatgccgaaaatcatgatgtttcctgcaaaggataacagttttgacttgaaagtatgtctaaggaacagaatttcaacttgaattttagatctgaagctttttgcccaaacttacatttctttttaaaatagcgtaagaggccaggtgtggtggctcactggtaatctcagcactttgggaggctgaggcaggcagatcgcttgaggtcaggagttcaagaccaacctggccaacatggtgaaaacctgtctctactaaaaaaatacaacaattagctgggcatggtggcaggtgcctgtaatgccagctacttgggaggctggggcagaattgcttaacccaggagacggaggttgcagtgagccgagatcacaccactgcactgcagcctgggtggcagagtgagagtccatctcaagataaataaataaaaataaaataaaatggcataaaataggcaaacctaaagtttataggatttattaaaatgtccttggcacacatggtgaaatgcaaagaattggagttaatataacttaagtgaaaatgacattggagctttgctttaagagaagattctctgttaaatgagttgaaaatagttgtcctaatacatgaataacaatgccaaggaagaaatttgggttggttttgtaacaatcaccattcttaatattatggtatatcttttaaaccatatgcatatttataggagtttattgtgagcttcctatttagctttaaagaccctttttattaacataaaaattaaaatgtttatatatttttttatttgtgctttttttacctttagcttccattgaagattgacatcattaaacatccaaatgaaacagatggcaaaagtactgctatacatgcaaaactcttagcacctgaatttgtaaacatttacacgtatccgtgtattccagaatatgaagaaaaggaccatgaagtaggcaacttagtttttataactcttcacattggatataaaaatgaattttaacctccattgcctttctgaacttactcaaacataatttaatatttttcttagtaaagtattatgctcaggtaatgttagacaatatacagtttatttcattgatatcttcaaagatcagatgtttctagactgctatgcgtttttgagtctttctgcattttatagctcttctgccttatttcttcaggtttttactccttgccaatactattgtgcctgcttttaccttttctcctctccttctcctgtttgtgctacatatagatgatctaatttgatgcaaactgggaaaccagattacaaatattgttggaatttctctaaaagaagaaagactgagttaggatattcaggaatcctcctaaattaagagctttagtgcatagcctttataacatttcttttggctgctcagaggccttccttgctcatttttagattcttaattggttttcacccagttgcaattgtcacattggtgagaaattatgggtcttcttgctgaaaagtaattttacaatgtgtctcaaaaaattaaggccttgggtactgaaagaagcatgtaaaagccttttggtctcttggaggccatttgttggtgtggctagtatagaaacaaaattaaaaattagtgcattcatttgttccaggaagaacttggtaaatttttactttcctatttatatctatatctatatatatatatatatatatgtatttttttggttgagtttatataaaaaattatgtttgtaaataatatttgagttttggatctaggaaaatgtttctttctctggtcagctagactccatttatgttgattaaatagaatgtagtgctatgttctgtaaggagatgtgatacgcttataatttaagaaaattcagaagccctggactttgctaactggatatagggggaaatatagacatgtattatgaatatttaaaaacttttacaactttgaaatgtataaaattcaaggtttttgctttttaagagtcgtgctctgttgctcaggttggaatgcattggcatgatcacagcttgctgcagccttaaatttctgggcccaagcaatccccatacctcaggctcccgagtagctgaggccatgggtgtgcgccactacttccagctaatatttttattctttgtagagacaggtctcactatgttgcccagactggtctcgaactcctagggctcaagtgatcctctcaccttggcctcccaaagtgccgggattacaggtatgagccactgtgcccggccaagattttttgtttcataattttattttattgtgattttgtttttatctttttattttaaaaatttgtgtgctcattgaagaaaatttgggaaatagagaaacatatggggataaaattcccttgattctccaacatttattcatttaacaaatatttacttggtgcctgctttgtgccaggagctgttcagacattggaagctctaacaatataaatctcagtaaaaatgtgcggaaagaaaagtggtatcatatttatgtaatttttcctggaaggttagattttttcattttaatttttcactgtaataaatatacttagatattgtaagtgtctgtgtttaggattattttattacattcacataatgagatcgttgaaccaaagggtatgaatattttaagactcttgatttaaatggtcaaattgcttccatgaagagttatgctatttaatcctgctctcagaccaccatttcctcaccagcattcactgtatcatttgttttatctttggcttatgatatagatgaaaatggcatttaatcattgaacagttttcagtggttcttttacgaagtatcatgtactttgctttttatcttatgaaaaattatataatttagtctttttatttcaagtatgactaacttggcatctatcagtcagtgaataacttattttgaaataatagttttaattattatattatgattataaattactaggggagagccaaaaactttaccatacatattaaagaaccatatacaatagaaccaacctaatgcttatttctcagatattcaacatatctttcttaaaattttaagtcaatcaaaatttatatattttgaagatcatagtagcacactgctaacccaattttctttgttttaggttgcactcatttttcctggacctcagtctatctcaataaaagatatttcttttcatctgcaaaaaaggattcaaaataatgttagaggcaaaaatgatgaccctgacaagccatcttttaaacgcaaaagaactgaagaacaagagttctgtgatttgaatgacagcaagtgcaaaggcacaacactgaaaaaaattatatttatagatagcacctggaaccaaacaaacaaaatattcactgatgagcgacttcaaggtaaaaaaaaaatgtttttttggactgctcctccctcagacttattttgaaaaaacttcaaacttacagataatttgaaagaggagttacactgaatacctatacattttgccatatttactttatttctctctttttattatatatgtgagtgtgtatttatatattatatattttttggttgatcaattgaaagtaagtttcaggctttgtaacacttcacccttaaatattaagtgtacattttccttttttttcttgagacagtcccactctgttgcccaggctggagtgcaatggcacaatcttggctcactgcaacctcctcctcctgggttcaagtgatcctcccacctcagcctcccaggtagctgggattacaggcgcccaccaccacacctgcctaaattttgtattattagtagagacggggattcatcatgttggccaggctggtctcaaactcctgacctcaggtgatcctcctgccttggcctcccaaagtgctgggattataggcatgagctaccacgtccagcctaagtgtacattttctaagaataagaatattctcctatattaataaagaatgacatctcttttataaacaccctaatggtgaatacatttactaagaagttagatcttctattttgttttttttgttttttgccttacaggttttttgttgttcttgttgttgtttgtttgtttgtttttgagagggagtcttgctctgttacccaggctagcagtggtgcaatctcagctcactgcaacctctgcctcctggggtcaggcgattctcctgcctcagcctcgctagtagctgggattacaggcacaccatcaccacgcctggctaatttttttgtattttcatagagacgggtttcaccatattggccaggctggtctctaactcctgacctcaggtgatctgcctgccctggcctcccaaagtgctgggattacaggtgtgagccaccacgcgcagccttccttacagtttttaaaaataacttttttgagtaagaattaacatgtagtaaactacatgtttccagagtattaaagttttctcatatgtgtacagctgtgagaccatcactacaagttaggaaatgaacctgtccatcccctgccaaagtttctgcctgaccttttataatctttctcatccagctttccccacagcacacttccacactctccaaccccatctctaatcaatgatctatatctaatcattatagattagatgcattttctgggatattatagaaattgaatcatatagtatgtactcttttcctttttttggtttggctttctcacacaaaataaataacttgacactcatttttgttgtagcatgtatcaataggtcatacatttattgccaagtagtatttcgttgtatggatatgctacaattagtgttatctatttatctgttgatggacatttacactggttgtttcccattttctactatttcaaataaagttgctatgacacttgtgtaaaaaaaaaaaaaaaggatgttctcctgtataataaatacagtaccattatcactcctaagaaaattaatgaaaattacataatatcatctaatatactgtccatattcaaatttccctaactgacccaaaaataccttttgtagcttccccccatatagcatttaaactcgtcacggtttatttcattattatgtatctttagtctcttttaatctagagtagtcctgtttttatttttcatgacttagacttttgtgaagaggacaggtcaattgtctgaatgtttcattgtgattagtttcagtctaaatatgttgcctaggatacttacaggtaaggataaatccagggttgtctatgtctagtttatatctatcgtttgggtataattattaataacatgtaattttactctcagaaatgaaccttttagctgataaattgtatggctaaccaattcataggtgaattcatactttattgttgcatcaaattaggaggcacataatgcaaattgtctatcatttgtgataactttcattacttgattaaagtggtgattaccccatctctccattataaaggtttattttttctctttgtaagtagtggtaatctatggggtgatgttttcagactgtggactgtttcccaaaaacttttcaccagtgattttagtattcattgatgatccctgcataaattgaataattacattgagaattgaaaaatagtgaaattttaattacatgatttcttcctacattagttagccagtattcttatgtaaagaagagcttttcctttttctcctgttctttatttctttctctttccacccctttttgagatcattatgatcttatggattttctttttaattcaatatgctataataaattatagtgtagcatcaataaagatgctaatctttttgataataatctttttgatgctctagttctctcaaattttgccagtggaaacccttcaagtacttcatggcatggcctcatttgtctttttggtgcaacaggcaagttcacttgtactttttttctgtctcagacctggaatcaattgtttttctaagaagctatagtttcttttaataggaaatggtattagaaactaagatctggtaaattcattacttttgggatgtcattgcttcaatggatagagccaggaaaaatacatagttatgtatcatgagttcacacagatagttccaattcatatttaacattataaggatttttatttcttttagagtgaaaaacttggttcctaataatagtgatttaaaacagttactttacttgtccatgtatgattagaaggcaagaaagctattcagttgatattaggcagttgctaaaacagtttgtttcaaactgggagagcttctctcaggctagtgttaaaaatgtgcattatctagaaaagaacattttgacactttttggagtctgattggtgttcattaattccaagctgaagtgagtgacaacactagatttaacgagcttaatttatatagtttatgcatctgagatcttcatacacattagtaaagttgctttgaaagtctaattgtgtgcgctttgtgtcttatgtgtgtgggagagagtgaagggcaggtactacggagcataagatctttaagaaattttgttgccgatgtttgatagaaagacaaacgcctaagccctaaggctgtgctctttgaaagagagaaagggaacactgcctgccacattcctgtggatgtttacagcagcaggttacttgccagtttgaagatttttctgagccatttttctttatagttaccttatatggtaattgaaaagataaatgaaaaaacataagtaaaaacccttgacaaaactataaaaggaattattgtggtattattcaaaatctcttttcagagtgtccaaatttggcttgcctaaaatcagatttgtacaaaagatttttgttattccttcccaattcacatggaaagtatcatatatttcagttctgtgctagatcaaaaatttttaaaggggcttcttaatctctttaaaatcataaaaggaacagatttctaaaggcaagttttctgcatgacctacttcaacccctgtcctttgtggctcttcattgcaccacaggaaacaattagggctctatacatatctataacctctgtatatgtgaaatactgatttctgaataaaccgagttacttccataagaaacaatccatggtttttataaattgttggctttaggctttaaaacttcgtcatttcgtgagattaatctgaacaaactgagtctatacctcaattaaaccctcaggtgtattggaaattatgtttccattattttactatgaatgctgaggttaagaatccctttaacaatgtaaaaccttactgttttgccaaatttttacagaaaaatagctctgtgtgttctaccagtgtcaaaataaaacacttgaaggtagagtgcctaatttaattataaaaggtaaacctaaacctacaggtgaagaatgatataacattcttaaagatttatcataggaagccttggcagaatgtagggggagacattgtttctttttgttggatgtgagtccaaattatatttaaatggcattatactgtaattggttataaaaattagccagctctttcccttcagtttgactgtattgatacaacttttaaagtgataactttattcatattataagctttgcctaaactacactccctgtcagtgagtgctgtgtcctatactaccttattcaatcctcacatcaaatatatgaggtaaaggatgtcaccctcactttgcaattgaagaaactgaggcagcacttttggaaggaaaagccatttgtaattatctactttaagtttctactgctaaaatattttactagttttgagccaggtgtagtggctcattcctgtaatcccagcactttgggagatgaaggtgggagtatcacttgaacacaggagttctagactagcctaggcaacatagcaaggcctacatctcaacaaaaaataaagtaattagcaaggcgtggtagtgtgcacctgtagtcttaggtacttgggagactgaggcaggaggattgcttgagcccaggagttcaaggatgcggtgagctatgctcatgccactgaactccagcctggacaacagagcaaaatcccacctcaagaaaaaatgtttacgatttttactataattttattataaagttactgattgttagaaatactagggtataaaaaatattttgcattcaagaaactgaaatatttaatgttgtctagaatgcatacatatatgagaatggtaaaagagactggagaaattcaaattatgaatgtcatattttattcagcatgcttgggcatttgttcttttatccatagtgctgtggcatcattaaaaaatttttaagcttgtcattgacatgattagattgtattttaagtctaatggaaagaattgggctgggacatgacttcaagctccaattccttcactaaataagcaaagaggttttgtttgtttgtttttaactgttttatatttttaaataaattgtgatacatatgaaataatatatacacacacacacgtatatgtaacattaagttataaagcatagtgatataatgaacaattaagaactcaagcaccagtatttctaacttccatttacctatgttttcccttgtgccattccccttcttcccctgacagttattttcctgaattatgcttttttagattatagtgttatatatatgttttcataaactatatatgatttagttttgctttattttgagctgtgtgttgttttcttgggacttgctttctaaagtcacattttgtttctagggtttatatatattgtcatatcactgtagctatagtttattctatttcactgctgaataatatctgtgatatactacagtttatctggtttcctgctaatgaaacactttggttatttctagtttttcctattgcaaataatgctactacacacattcttgtgcaagtacaagctcctctaggaaacatccctaggagtcacattgctgagttgttgagtatgagaatattcacctttacaggataatgccaaattgtttttcaaagtggacatacaaaggaatatttccatcattaatgtataagcgctccattgatccataatctctcctaccttggtattatcaaatgtctgatttttgccaacctagtattttaaaatggtgtctcattgtcatcttcatttacttttctctaattactaataggattgataattacattgtttgtttatttggccatatacgtgtcctattctgtgaaatatctatgcccatttttctgtgttttatcttaattgatttgtagaaattctttgtatattctagaatatagataatgttgcaaaatatcttcttgcagtttgtggttcatcttttcaatttcttttcttttgaggaaaaaaaacttttagtgtggaatttatcactatgtttgtgtcttgtttgaatccttctcttctgcaagatactatgtggctaatgatttgcctgaggttttttgtattttctgtgtaagtaatgccaattgcatttctttccagttcttatccttctaattaatttattgttctttattactatgttaaataagaaagacctctaatgcaatatttaattgaagccagttatttaattgtaggggtcatccttctcacgtttcaatctgataatctatgtcttttaaatattaagtttagtttatttacaattgctgtgagtattgaaataattggatctactttctaccatcttaatttttatttctatttgtccttttttataatttttgtttctttttttgattgaggttttttcttattctatttttattcctatttcaattattttagagaattgcccatatcacttaaaaagttcaaagccaaacaatgtttaacctctccttttttacattgtatggactttgtatgctgaagcttcattcagcctcctcctggttcacattgttattgttaatatcattatttttgtctgtcgtttattgtcagtctacaaattagatattattattgtttttgttttatacaggcaacatttatctggatttgcatagatgtttaccattttctttactcagtgttttatcaaatacatcctttaggaattcctttaatttggtctcttgttggcgtatgttcagttttcatttgtctattaaatgtttatcacttttttcgtgataggttgttctgctgggttcacaattttaggttgccagttctgtttttttgtttgtttgtttgtttgacacttggaagatattattctagtgtcttcaatattctgtctttggtctttggtcattctaattaccttttctttgtatatgatctgtcccttctccatggcttcttttaaaatcttctctttatctttggtgtttttcagttaaatatgtaatagaactaggcactgatttgtttatatttatcctgctcgagacacatgatgtttcatgtatctgtggctttttatagtttaaaataatttctggaaaagtcatagtcattatctctttaaccgctccctctcttccattctctttgttctctcttcctcgaactcctgttagtcatttgatcctccatatctctgaatatttttgtatttcttttattatttatttcttgtctctgctacattttacattgagtaaaagtgggatgtgacagtgggaaatcattagtgacttagaaattccagttggtcattgggccaattttgatgctaccttctctcttttatttctcactttaaaataaaatttgcaaaaacaaaaaattaaatatagtatgagtccagttactggcctaaggagctaaaagcattctgggtttgtatgaagacagctgagttataacaaatgagagtactgttgtgtgactgcattaattattccctttttaaatgtacaagagcaaggcattctacctgactgtgttattgagctctgcagcatacatgtgacagagctaaaacaaacaagcaaacaaaagaaaccacagctttaggatactctgttcatgaatatagcctgaaaatgataatcaagaagtaaacttttaccagtattaaggaacattaagctgcctatctctcagtgaatttcagaatgatattttaaaagttagtttaggctgggcactgtagctcatgcctataatcccagcactttgagaggcagaggccaaggcaggaggatcacttgagccccggattttgagaccagcctgggcaacatagcaagacactgtctctaaaaaaaaataaaaataaaaaatcttagctggatatggtggtgtgcacatgtagtcccagctatttgggaggctgagatgggaggatcactgagtccagagtttgaggtaactgtgagctatgatcacactgctgcagtctagcctgggtgacagagtgagacctcatctctaaataaacaaaaaagtcagtttgtcaaggaaatgaaacccttctgaaaattggtgaatgcagtcctgtcagagatttagatttttgaagatgctgatacatagaagattggaagacatgaatatcttaaatgttaactacttttaattcattggtctaagactcagtgttaactgtcatgtataagattttattatttgttttatgttgcttctgtatataccttgaggtgtttaagaaaatatcttgtttcaaactgggattgaaggaagttatctgcagtctttaaaaaaaaattcttagaataattaagagaaatcattattattgtaccaagcctgtggttaagaagaaatatttatattttttctttctttctttctttttttttttttttttttgacagggttgttacaagttgagttgaaaacaagaaaaacttgcttttggcgccatcaaaaaggaaagccagatactttcctttctacaattgaagccatttactactttctggtagactaccatactgatatattaaaagagaaatacagagggcaatatgacaatcttttatttttctattcttttatgtaccagttgataaagaatgccaaatgctctggagataaggaaacaggaaaacttacacattagtttttaacaagccacttatgtctttttattttgctaacattaataaacttatatttgtgctttgttttttcttaagaaataatcatatataatgcctgtaagaccatttgaaaaaattccagtttcatatatatcacttcatatttcttgaaggaaattgtatctgggggaatttttcagagatactgttgattgaaaaacttacttcagaagttatttgctcagtgaaacctcagtttcattactacattttaatatagtgtgttatgtctctgtgattagatataacatattccattagatctaattagctatttatttcaacatctttatatcttttcacctgtactcatgaccacctttagaagtaaatggggttacaatctgctggctgaaaaataggtcataagtgatttttcttgaggttagtagcaaacataggcagaactagaattagaattccggtatctagggctgtttctttaagtcctaaggttgttaaaagcagagactctggagctagactacctgaatctaaatctcagcctttctgcttatcagccatgtcattttcttccatttgtacaaagcaggcaatactgagcaactaccttataggaataactgagttaatatctaaggggctttcagcagtacctgaaatatagtaagtgttacatatatgtttactctttttattttatttggaattgtgaactgataataattgaagcctacctgctagtggccatctctgctgccaggtgaaaagagcctgacttagaatgaagtcagcgaaggaaagcagagtggagagaaaaagagagactgagtcctgatgacatcatttatttacctagacctagctgcttgtgaatagagccctactgtgctgaatagcttctgtctgctcttttctattctgctccctgctctgtgaggtaggttcctttgctctcttgcttttggttgggttcaacaaatgggaagcaccagtgggagattagaagttgagaggaaaatgaaatgatgttatttatttccctggctcctttcctgccatgtcatcatcagttggctgtgttcctctactaaatagtaccttatcaggaatcctatctcttctgttcccaagcagttaccccagttacctcactaggtttagttcctgctccctccctttaccccttttcacttagggttggtaatagcttacagttattactagccccagtatagttcactacaacttgttgctttacctaaaccctgctcatacatttgtaaatactgtagttgttttattacactcttctcaaatgtccccacttgaaatagccttctatttcttttggggactctgataaattcacctgtttgggtgaaataatagcacatttcctgaagtatatacagtgggacacatgatgttttatgggggaaagagttcttggtgaaattagtttgctgtacattacgttgtttccctcccagggattcagaaggcaaaacatattaaaggttctgaaaagtcctgaaataaacattttgaactttatttaagctgatatatcttaaacttacttgaatatgtagcacctattaacatgccatggaaataggacgtttggagtattgtaattaagaacaattcctattaatatacatggggcaactgagaattaaagaggtaagtaaattattgatagatcatacacctagttagtagcagagcctgttctagaatctggaacttctgatttggtttggttcagtaaggtcaccattatattatgctattcataaaaaggaatgtggattatataaggcttgaacattattagtcttacagtcttagccaaataaactaactggcttgcttattttagcagttattctacaagaatggaattaaaatagattttttttttcatgtttagaacttggccctgggaatagaggaaggcttgaattgatttaagcagggccaaagttggatttctctaggctaaatttggacttccctgagccaaaatctattgcatttaactggctttacaaaccaactaaacataacagttcagagggaaaagaaaaaaaaaagcgagagacagagaacaattctatcactcatttgcctccatctctcagctggcataagaaagatgacccacgtacttcataagagcctaatttacagctaaggccagataaaatctcaggttcttttcaaaagaagttagtaatacctattagaacaatgaattgactatacttgtcttagttttttttgtttgttttttgttttttgtttttttggtgtgatagatgtaacagtggccctaattctttatccttgcttgtattcatggtcatttttcaggttcctttgaagtactccccccactgtgattctgggtcatctgcattcagagatttagtgcatttttacttacacttgtgcttctgctgttgacataagaatatgcatggctgagttagcctgctggagcatgagactccatggaacagagccaggttgccctggtcaccctcactgaatcttgtctagattggctgatggccagccaaacccaagatatgtgaatgattccagccaagatcagcagagtcatctaactgacacctacctgattccaaacatgtgagcaaggaatgtctattatgccaccaatgtcttatagctatttattgtggctatagatatctcatctttggatgcattatcagatcatcttcttcaagtaccttagaagattctcagtctcatgtttcttgggctcttgaccacttgctttgccttagctaccacctcatatagtaacagattaccagcaggtttgtatgattcctctgcttgagatcaattagccatatgttcagaatccctggcctataacaacacttctgtgctttaaaaaccccatgccacaatgactgttaaaagggctaggcgatgtagtctggtaggtttgtgaagttaactgtctgaaaaacttggatcaatggactagaaaaagctgctgggtaaattgctcttcttctgatggactgtatagagacactgtttttcatcttgcctgtccagaagcgtactctgtggccaagcaagtgtacttgccacatgattggcagtgtctcttcatggcttttcatgaaacagcagcaagtgctacacagtaatttatcagtttgcatttgcctcccattattgccagcctcacttcctttcttcctcgctcttaccagcctggattgtacctttaataaagtagtggatatatttcctttagggtctctttttctagggaagtcaggtgttttagtctggatttagttagaaaagcagcatcgttacaagtattacatgaataaagaagtttagtaaagaaattaaggtttaccccaatgtgagaattactggggtaataaaggtctggaaggctgcagcagaagagatttagagaagcagtgactaactaggtcagccggagattctcaaagtactcatgacttcatttgtagaaacatgtatatcttaagcatatcaagtgtctcattcctctaatctttctaggagccctttggttcatcctgaaggtccccctaaatcccttcagaagtcttaaaaaggagtaaatggccacaccttttatttgttcttttctttgaggccatgttaatggcagtcccttgatttggtctttgtactaggctgtttttaatgatcacattttatttgatgagaaacaattttattttctagttctgcatatcctaggttatgtatttcatttcagttccatttccatacccattgccttaattttgagcttgtctgtttcttacatttctcattttgacagaataagctgactgttattaagtacaatagataaggtacctaagagcctcgaaacatcaccaaataccatgaatgcattaggtatattttttgtcttccatgttactggaagcattaattatagcaactttttatctccaaatactgacaattaaaagaccctagtgaaaactttaaccaaacacttactgaccctacattgaaggccaccagccaaaaatcaccacccatacataagagccaaacatcactagacacttggtgaaatccttcaaatataaaaggggaaaaggaggggagaaaatccaaaggaaatagacaaacggagaataatggcaacaaaaaaaaaactgtcttcaaaataagagtatattatattcacaaaacaagaataggagagtgtgaaaaagaacaagcaataaaaaagatctcagaaatttaaaaagtgattgctgaaataaaaattaaatataagagttgaagataaaatatagcataagaatagaaaattctgaattccaaatacctaaggccaatcttagttaaaagttgtaaatgcaaccataggctacatgttacattgtatttaattaaaaaccttaagaggaaaggcaatagagcttgtaacagctattacccttggttgtaaaggagaaggttggagattatttgtataccaactacttaagtttacaaaaaataatgagcattaggtagatggaatgaaagtctattcatacactgtatattaagctctatatacactgcatatcatcatcatgacattgagtttctagctggattgcagagatgagccaaagcgcttctccccaaattattatttattcatttttgagacagagtctcactcttgtctcccaggctgcagtgcagtggtgcgatctcagctcactacaacctccacctcccaagttcaagcaattatcatgccttagccccccgagtagctgggatcacaggcatgtgccaccacaccccgctaatttttgtatttttagtagagatggagttttgtcatgtttggccagccttatctgaaactcctgacctcaagtgatcctgcctttgcttcccaaagtgctgggattaacaggcctgagccacaacacccagcctaaattatttttaattatgacattttttgtattcccttgaggcactgacaactatagtcttattttatatgttatagtgaatcatatttatctcattatatattacagaatattttgtttgatggagaaaattcactgacctgtgctgtaatgtttataccagcaattagctgattgatttactatgacctcactctttattcagcagttctgccactattactagctaatccaacaacgaggccttattttggctttctttcgaaaggtcatttctgaccccagcttgaagtttgtttattttcacttgaagagatctctcagaaagtcaaagaaaataggaggaaaaaaacttaagattaagggccaatctaagaggtccttcatttgaataataggagtaacagaatgggaaaggcgtggaaaaaaatttgtgatttctaaaattgaggacattaagtcattagagtaaaaaaaagatgtacattaaggcttatcatcaaggaatttcagaacactgtggatagaaaatactaaaagatttcaaacagaagaaataggtcgtatatcgaccaataatcaggatattaaaggacttcttaacaacattggaaactagaagacatggggtgatgcctttagaactttaagtgaaaatagttttctatttggattctatttttagtcatgcaattaatcaagtatgaatatagtataaagacacagaaggtctcaaaggtattacctcccatatattcttgagataaagatgcttaggagaatactgaagatgttttccagtaaaacggagaaggaaaccaaaaaccaaaaaagagagcattaagaagtcagcaggccaggcgcggtggctcacgcctctaatcccagcactttaggaggccaaggcaggtggatcgcctgaggtctggagtttaagaccagcctggctaacatggcgaaactctgtctctactaaaaatacaaaaattagtcgggtgtgatggcatgtgtctgtaatcccagctactcgggaggctgaagcaggagaatcacttagaacctgggaggcagaagttgtagtgagccgagatggtgccattgcactccagcctgggtgacagagtgagactccgtctcaaaaaaaataaataaaaaaataaaaagtcagcaaagggaagtttcagggtttcaggattcattcatccattctaaaaaattttgagtgcatactatgtgtcaaattattgtctaggtgatggctatagcatgccgaggtagtaagtgctaagaagaaaataaagcagagtaaggaactgatagtgactggtgcaggaaaggggtgccagtttaaatagcatggtcagatggaaaagcctgtgataaggtaaaattgagcagagacctaaatgagagagagtgaaccatgcgaataattaagtgaataatgttttaattatagggaacaatatgtgtgtgtctatatatatatatacacacaaaggtactgaggcagcagtatacttggcatgtttgaggaataacaaggacactagtttggaacagtgtgtgggagggaaaaaatgatagaagatgacatcatagggagtaatggtgtggagccatggtaagatgttaagattttactctgagtgatgagataggaagccatcagagaatttaagcaaatgagtgacaggatctgacttatatttttaaaggattatttggcttctttatgaaaaatagactgcaagagagtaagaaataaaataggaagatcaattagaatgctatttcagtagtccatttgagagatgatatttgcctggacaagggttgtgatcatgggcgagtggtacagaatgacaagatcctgcatgtatttttaaggtagagccagtatttgcagatagtttagacattgtggtagatatgaaaatgtgctgcctatatcccccttctaggaaggacttgctaattagctgcagggagtgtgaagaacagaaatccaccagtatcagcacttcatctgcaacagctatagaaaaagcttcacctgaggttaccctcgtcttagatctcagggcagccctcagtggagatgtaaggccttgctacttcagcctcatttattacactgtcaggcaaaaccttcctcagagctccctctattacaacttaatttcttcttctgcccaatcctgcttcctccccttcccctgaaaggtgacactttctaataaacatcttacaccccaaactccatctcagcattcctctttagaggactcgacctgtggtaattgttagtaggagtgatctgagctgccaatgagaatcccatcacatgtggcacatggaacaaaagcccatggctcaaggtggtaacttttattagtggtaaaatgagaagatttacccacggaagagaatgtgccagcaagtgcagtatatcaggtatttgagactcatgaaggaaatagtaaatttaagaataacagaattgaatggccaagtgccactaatgctctgtagaaagagggcttctttggttgcatacaaatctcatctagaatttaatagtccaagtagccaaactggtatttgtccttaagaataaatactggaagatcaagcacagaaagtctagaatagaggcatgtgaatggacatacttgtgtcaagtatgtacatgaactgtgaaggtctctgtattacgtgcagtgcccaccagagagcattcagtactgaagagtctctaaacaataaagcaaactaaacacattgcctagttgacgtcatccttcctgcttcagttattcgccacccagtgctagcacagtgggcacatgaatggaatgtccactgtggaaaggatgaagactaagcatagggttcagtagcttgagtttcaacttaccaaggctgccttagctgctgctgctgttgaatgtccaacctacaagcaacacagacaatactgcacccctgatataataccattcttcaatatcaagttggttacattgggccccttccacactggaaggaccagcatttccttgtcatagaaatagacacaatttccagataggagtttgcttttcctctttgcagagcctcagtcagtatcaccatttgagtttacttagtattgtattgaccagcatgcgatctcacattatatcatatcagatccggaaacctattttatggaaaaccaagcgcaggagtggacccatatccacaggatccactaataatatcacttttttcaccacttggaatttgtcagcttgatagaacattggaacaacctgctgaaggtacagctgaacaccagctcataggcaaattctacaaggataggatgccatactccaagatacagagtatgtactggatcaattatccttatatagcatgtgccccaatatgaagaataaatgggtcttggaacccatttattcctaggggtagatgcaaagagagtagaagaagaggtgcctcccctccgtgccatcacttttaatgacccatatggtactttgcacctcttcataactctgaactctgcagtgagaggtcttggtcccacaaggggacacagttttgctgagagatatataaaaaatctcactgaaaaacataagctgcagcagctacctggatactttcggttccttgtgtctgtctagggagcagcagccaataaaaggagtcaagatcagttgaccctaatcaagaggagattggaatcctggttacacaatctgggcagaagtaataaatgtggtgcccaagtgataaacctaccaaattgagactaatgtgtaggtgtggcaacccatcctcaaaagggcatgatggcctggaactcaggcctctcaaggaatgtgggtctgaattataccagataaaccaccaggagcagcagaggtggtagcagaggctgagggaaatctagaattgatagtggaggatgaggggatgtgacaagtattgatggcattcccaagccccactgcagcagcaagcactgtaatttgtcccactaatctcccatcttctaaatttctgagaggtcaagaaaagaggtctcttgattcctttaggaactgctccctaagcatacagggagacatagatctatgtggagcaaagggtggattgtaataagcaaagagatacactgcctgattcactttaagaaaggactgacctcccagttgcaaggaatgaggtcagcagcctccaactgtcagctccttcagagtctgcttcaactgcagaaggacactgtgcttgaggtcatacccttcccatgtctggtgactgaagtccagctgaatgtagctgccaaagttaccttaatgcccatgggaagcaaaaaatcaaagagtttaaacagaattttgagaaatcccaaatcagttttttttcagcatatgacattttggagtagtttgttattcagcaatagataacagaaattggtatcaggagtggggtgttaccataacaaaaggttaaaccttacatggtaaaaaggactttgcctctgtcattaagttaagcactttgaaatgtagagattatcctgaattatctaggtaggctcaatataagcatgagtccttaaaagtggaagacggatacatgagaggatgtcagaatgatgtgaaatgagaagaactcaacctgctattgttggctttacaggtgagtgataggaaccacaagccccaagcagcctctggaagctggaaaaagcaaagaaacagattctttccagagtgtccagaaaggaatgcagttcagctaacatcttgattttagatcagtgagatttttgtgttggacttctacagaactatataagaataaattgtgttgcttaagcacactataatacatgtggcaagaagctgccagctaagccttgaagaatagtgaacaaactcttactggaggatgggaaggcagtaaataaattattgaattattgaaataaatggaggattgagttatgcattgacagaatgcttagcaataattttgcttgtcttaatgtggaacagaaaatgaaacttaatagcttgtagatgtcttaaggagatttccaggtgaatgttgaaagtactgatgaacttattatggctgcatctcataatgtacaggaagacatttactgagtgaactaaagaaggaactgttcaatttgaaagcagaatttagaggaaatttttcaacctagtacttgtcatttttttatagaaaaggaaaaatagatggaagatggagccaaaatcccagagggaggagccaagaagcaaggagagcaatggattaggaaaccactaccagagggatgaactgaaccacaatcaaggaatagcctcttcctttggtgtagggggaccctgaaaacaatttaattttatgcttcctgtttccttgtctccttttttgaatgatagtctctgtgtggtgttcctatcctagaaaaccttaactgggacaagctactctcaagcatcttcacttgagaaacagtaactgaggaagtttattgtatctggacatggtttagatgataagattctgaacttaaacttatgccataatggagtgagactcttagggtacagagtaagtacatttttgcatgttagtgagacaagaactgtggccgggggcagactgtgatagtttttgaagatgtccctcaaacaattccttcccttccttggactcctctcttcagagggtagagtccatttccttttccttttaatctggattggccttctaactcactttgaccaataaaatgtggtaaaagtaaggtctggcagttttcactttcactctcctgaaccttcatattagaattccaggatatccttctagagatatccatatctctagggacatggtgagtccctagagacaccacatggaaaggccacctagggaagaactgagatgccccagtcaatagcactgccttagtcagtttgggctagtataacagaaatatcatagattgagtgactttttttctttaaaaaaatgagattgtggaacctgaaaatacagtgtagtaagagtggagagaaaggccacctaaggaagaactgagacgtcccagtcaatagcactgccttagtcagttggagctactgtaacaaaaaatatcatagattgagtgacttaaacaacagaaatttatatcttacatttctggagactgaaaatatggaaatccaagatcagagtttcagcatggttaggtgtttagtgggcgctcccttcctggtttgcagacagccatcttcctgctatatcctcacatgatgcagagagagagaactctggtatctttgtccccttataagggcaccaatctcatcatggagggtcttcaacctcatggcttcttggaaccaaattacttcccaaagtcctcacctccaaatctagcacattgaggtttagggcttcaacatatgaatttcagtgcatagaaagcaccaa

SEQ ID NO: 1310 - DNA, 3038 bp, Homo sapiens
cgtgtggagctgttcgaggactcgcgggtgtgcaggtctgagtaccactccgatccctggtggaggtccccgcgcctctctggagaccagtggtctggccccagagtgcacctatgatatgtgttttagaaatagccgttaaactttggtttgaatgaagaatgtctctcaatccacctatatttctcaaacgaagtgaagaaaatagttcaaaatttgtggaaacaaaacagtcacaaactacttccatagcttcagaagatccccttcaaaacttatgtttagcatctcaagaagttcttcaaaaagctcagcaaagtgggagatcaaaatgtctcaaatgtggtggttccagaatgttctactgctatacatgttatgttccagttgaaaatgtacctattgaacagattccacttgtgaagcttccattgaagattgacatcattaaacatccaaatgaaacagatggcaaaagtactgctatacatgcaaaactcttagcacctgaatttgtaaacatttacacgtatccgtgtattccagaatatgaagaaaaggaccatgaagttgcactcatttttcctggacctcagtctatctcaataaaagatatttcttttcatctgcaaaaaaggattcaaaataatgttagaggcaaaaatgatgaccctgacaagccatcttttaaacgcaaaagaactgaagaacaagagttctgtgatttgaatgacagcaagtgcaaaggcacaacactgaaaaaaattatatttatagatagcacctggaaccaaacaaacaaaatattcactgatgagcgacttcaaggtaaaaaaaaaatgtttttttggactgctcctccctcagacttattttgaaaaaacttcaaacttacagataatttgaaagaggagttacactgaatacctatacattttgccatatttactttatttctctctttttattatatatgtgagtgtgtatttatatattatatattttttggttgatcaattgaaagtaagtttcaggctttgtaacacttcacccttaaatattaagtgtacattttccttttttttctgggtgacagagtgagacctcatctctaaataaacaaaaaagtcagtttgtcaaggaaatgaaacccttctgaaaattggtgaatgcagtcctgtcagagatttagatttttgaagatgctgatacatagaagattggaagacatgaatatcttaaatgttaactacttttaattcattggtctaagactcagtgttaactgtcatgtataagattttattatttgttttatgttgcttctgtatataccttgaggtgtttaagaaaatatcttgtttcaaactgggattgaaggaagttatctgcagtctttaaaaaaaaattcttagaataattaagagaaatcattattattgtaccaagcctgtggttaagaagaaatatttatattttttctttctttctttctttttttttttttttttttgacagggttgttacaagttgagttgaaaacaagaaaaacttgcttttggcgccatcaaaaaggaaagccagatactttcctttctacaattgaagccatttactactttctggtagactaccatactgatatattaaaagagaaatacagagggcaatatgacaatcttttatttttctattcttttatgtaccagttgataaagaatgccaaatgctctggagataaggaaacaggaaaacttacacattagtttttaacaagccacttatgtctttttattttgctaacattaataaacttatatttgtgctttgttttttcttaagaaataatcatatataatgcctgtaagaccatttgaaaaaattccagtttcatatatatcacttcatatttcttgaaggaaattgtatctgggggaatttttcagagatactgttgattgaaaaacttacttcagaagttatttgctcagtgaaacctcagtttcattactacattttaatatagtgtgttatgtctctgtgattagatataacatattccattagatctaattagctatttatttcaacatctttatatcttttcacctgtactcatgaccacctttagaagtaaatggggttacaatctgctggctgaaaaataggtcataagtgatttttcttgaggttagtagcaaacataggcagaactagaattagaattccggtatctagggctgtttctttaagtcctaaggttgttaaaagcagagactctggagctagactacctgaatctaaatctcagcctttctgcttatcagccatgtcattttcttccatttgtacaaagcaggcaatactgagcaactaccttataggaataactgagttaatatctaaggggctttcagcagtacctgaaatatagtaagtgttacatatatgtttactctttttattttatttggaattgtgaactgataataattgaagcctacctgctagtggccatctctgctgccaggtgaaaagagcctgacttagaatgaagtcagcgaaggaaagcagagtggagagaaaaagagagactgagtcctgatgacatcatttatttacctagacctagctgcttgtgaatagagccctactgtgctgaatagcttctgtctgctcttttctattctgctccctgctctgtgaggtaggttcctttgctctcttgcttttggttgggttcaacaaatgggaagcaccagtgggagattagaagttgagaggaaaatgaaatgatgttatttatttccctggctcctttcctgccatgtcatcatcagttggctgtgttcctctactaaatagtaccttatcaggaatcctatctcttctgttcccaagcagttaccccagttacctcactaggtttagttcctgctccctccctttaccccttttcacttagggttggtaatagcttacagttattactagccccagtatagttcactacaacttgttgctttacctaaaccctg

SEQ ID NO: 1311 - protein, 236 aa, Homo sapiens
MSLNPPIFLKRSEENSSKFVETKQSQTTSIASEDPLQNLCLASQEVLQKAQQSGRSKCLKCGGSRMFYCYTCYVPVENVPIEQIPLVKLPLKIDIIKHPNETDGKSTAIHAKLLAPEFVNIYTYPCIPEYEEKDHEVIFPGPQSISIKDISFHLQKRIQNNVRGKNDDPDKPSFKRKRTEEQEFCDLNDSKCKGTTLKKIIFIDSTWNQTNKIFTDERLQGKKKMFFWTAPPSDLF

SEQ ID NO: 1312 - DNA, 2627 bp, Homo sapiens
cgtctggtccgtgcgcgatcacggcccggcgcgtggctcgggctcgggcggagctggagacgtgtggagctgttcgaggactcgcgggtgtgcagtgcacctatgatatgtgttttagaaatagccgttaaactttggtttgaatgaagaatgtctctcaatccacctatatttctcaaacgaagtgaagaaaatagttcaaaatttgtggaaacaaaacagtcacaaactacttccatagcttcagaagatccccttcaaaacttatgtttagcatctcaagaagttcttcaaaaagctcagcaaagtgggagatcaaaatgtctcaaatgtggtggttccagaatgttctactgctatacatgttatgttccagttgaaaatgtacctattgaacagattccacttgtgaagcttccattgaagattgacatcattaaacatccaaatgaaacagatggcaaaagtactgctatacatgcaaaactcttagcacctgaatttgtaaacatttacacgtatccgtgtattccagaatatgaagaaaaggaccatgaagttgcactcatttttcctggacctcagtctatctcaataaaagatatttcttttcatctgcaaaaaaggattcaaaataatgttagaggcaaaaatgatgaccctgacaagccatcttttaaacgcaaaagaactgaagaacaagagttctgtgatttgaatgacagcaagtgcaaaggcacaacactgaaaaaaattatatttatagatagcacctggaaccaaacaaacaaaatattcactgatgagcgacttcaagggttgttacaagttgagttgaaaacaagaaaaacttgcttttggcgccatcaaaaaggaaagccagatactttcctttctacaattgaagccatttactactttctggtagactaccatactgatatattaaaagagaaatacagagggcaatatgacaatcttttatttttctattcttttatgtaccagttgataaagaatgccaaatgctctggagataaggaaacaggaaaacttacacattagtttttaacaagccacttatgtctttttattttgctaacattaataaacttatatttgtgctttgttttttcttaagaaataatcatatataatgcctgtaagaccatttgaaaaaattccagtttcatatatatcacttcatatttcttgaaggaaattgtatctgggggaatttttcagagatactgttgattgaaaaacttacttcagaagttatttgctcagtgaaacctcagtttcattactacattttaatatagtgtgttatgtctctgtgattagatataacatattccattagatctaattagctatttatttcaacatctttatatcttttcacctgtactcatgaccacctttagaagtaaatggggttacaatctgctggctgaaaaataggtcataagtgatttttcttgaggttagtagcaaacataggcagaactagaattagaattccggtatctagggctgtttctttaagtcctaaggttgttaaaagcagagactctggagctagactacctgaatctaaatctcagcctttctgcttatcagccatgtcattttcttccatttgtacaaagcaggcaatactgagcaactaccttataggaataactgagttaatatctaaggggctttcagcagtacctgaaatatagtaagtgttacatatatgtttactctttttattttatttggaattgtgaactgataataattgaagcctacctgctagtggccatctctgctgccaggtgaaaagagcctgacttagaatgaagtcagcgaaggaaagcagagtggagagaaaaagagagactgagtcctgatgacatcatttatttacctagacctagctgcttgtgaatagagccctactgtgctgaatagcttctgtctgctcttttctattctgctccctgctctgtgaggtaggttcctttgctctcttgcttttggttgggttcaacaaatgggaagcaccagtgggagattagaagttgagaggaaaatgaaatgatgttatttatttccctggctcctttcctgccatgtcatcatcagttggctgtgttcctctactaaatagtaccttatcaggaatcctatctcttctgttcccaagcagttaccccagttacctcactaggtttagttcctgctccctccctttaccccttttcacttagggttggtaatagcttacagttattactagccccagtatagttcactacaacttgttgctttacctaaaccctgctcatacatttgtaaatactgtagttgttttattacactcttctcaaatgtccccacttgaaatagccttctatttcttttggggactctgataaattcacctgtttgggtgaaataatagcacatttcctgaagtatatacagtgggacacatgatgttttatgggggaaagagttcttggtgaaattagtttgctgtacattacgttgtttccctcccagggattcagaaggcaaaacatattaaaggttctgaaaagtcctgaaataaacattttgaactttattta

SEQ ID NO: 1313 - protein, 302 aa, Homo sapiens
MSLNPPIFLKRSEENSSKFVETKQSQTTSIASEDPLQNLCLASQEVLQKAQQSGRSKCLKCGGSRMFYCYTCYVPVENVPIEQIPLVKLPLKIDIIKHPNETDGKSTAIHAKLLAPEFVNIYTYPCIPEYEEKDHEVIFPGPQSISIKDISFHLQKRIQNNVRGKNDDPDKPSFKRKRTEEQEFCDLNDSKCKGTTLKKIIFIDSTWNQTNKIFTDERLQGLLQVELKTRKTCFWRHQKGKPDTFLSTIEAIYYFLVDYHTDILKEKYRGQYDNLLFFYSFMYQLIKNAKCSGDKETGKLTH

SEQ ID NO: 1314 - DNA, 731 bp, Homo sapiens
cgtctggtccgtgcgcgatcacggcccggcgcgtggctcgggctcgggcggagctggagacgtgtggagctgttcgaggactcgcgggtgtgcagtgcacctatgatatgtgttttagaaatagccgttaaactttggtttgaatgaagaatgtctctcaatccacctatatttctcaaacgaagtgaagaaaatagttcaaaatttgtggaaacaaaacagtcacaaactacttccatagcttcagaagatccccttcaaaacttatgtttagcatctcaagaagttcttcaaaaagctcagcaaagtgggagatcaaaatgtctcaaatgtggtggttccagaatgttctactgctatacatgttatgttccagttgaaaatgtacctattgaacagattccacttgtgaagtttagcctatatcatcttggccagtccatggtctcctcagcatctaaaatcacatgtataggctaatggaaagtttactagccaagaataagtaagtgtggaatttaatatgatcttcacagtttgctccgaaaaaacaagaacttgaggataatactgatgtggtgctcagagaccctagggagagggaaggtagtttcaactgagaccgagcgtcatgaggaaactctgatgtagtgttcagccagaagtagactgatgtaaaatcatttgtgaactgcctacttaaatggtaaattttccataactagaagttg

SEQ ID NO: 1315 - protein, 109 aa, Homo sapiens
MSLNPPIFLKRSEENSSKFVETKQSQTTSIASEDPLQNLCLASQEVLQKAQQSGRSKCLKCGGSRMFYCYTCYVPVENVPIEQIPLVKFSLYHLGQSMVSSASKITCIG

SEQ ID NO: 1316 - DNA, 1085 bp, Homo sapiens
cgtgtggagctgttcgaggactcgcgggtgtgcaggtctgagtaccactccgatccctggtggaggtccccgcgcctctctggagaccagtggtctggccccagagtgcacctatgatatgtgttttagaaatagccgttaaactttggtttgaatgaagaatgtctctcaatccacctatatttctcaaacgaagtgaagaaaatagttcaaaatttgtggaaacaaaacagtcacaaactacttccatagcttcagaagatccccttcaaaacttatgtttagcatctcaagaagttcttcaaaaagctcagcaaagtgggagatcaaaatgtctcaaatgtggtggttccagaatgttctactgctatacatgttatgttccagttgaaaatgtacctattgaacagattccacttgtgaagcttccattgaagattgacatcattaaacatccaaatgaaacagatggcaaaagtactgctatacatgcaaaactcttagcacctgaatttgtaaacatttacacgtatccgtgtattccagaatatgaagaaaaggaccatgaagttgcactcatttttcctggacctcagtctatctcaataaaagatatttcttttcatctgcaaaaaaggattcaaaataatgttagaggcaaaaatgatgaccctgacaagccatcttttaaacgcaaaagaactgaagaacaagagttctgtgatttgaatgacagcaagtgcaaaggcacaacactgaaaaaaattatatttatagatagcacctggaaccaaacaaacaaaatattcactgatgagcgacttcaaggtaaaaaaaaaatgtttttttggactgctcctccctcagacttattttgaaaaaacttcaaacttacagataatttgaaagaggagttacactgaatacctatacattttgccatatttactttatttctctctttttattatatatgtgagtgtgtatttatatattatatattttttggttgatcaattgaaagtaagtttcaggctttgtaacacttcacccttaaatattaagtgtacattttcctttttttt

SEQ ID NO: 1317 - protein, 236 aa, Homo sapiens; identical to SEQ ID NO: 1311

SEQ ID NO: 1318 - DNA, 26514 bp, Mus musculus
  misc_feature (1)...(26514): n = A, C, G or T/U
tccacttcaattgcaagggtcccttactttatatggttgtgaggacccaaggacaaggtgatggaaagtgcttagcagggctcccaacacagtgggggctctctgattcctcatctgcttgatgtacacaccctagggagtcttggctggtgatatagcccagcctcccgcttgacagtaaacattcagtaagtatttgtnnnnnnnnnnnnnnnnnnnnttgcctccacaatataccagccatgtggccacccagctgggttagcaaactagttaccttgagctggctctgctcatctaccatatgccagggttcagaaagtccaccctcacattcatcccacaatcaccgactgagccttggtctagaagatacagcagtgaactgaacagccaaggtcctgccagggcaaactttgctgtcatctcaaagggaataaaagagtttattctgagccaccaaatatgagagttcattgccccaaacacagactcagatgagaccactccactgtggacaaacgtttcgtgagttattctgttgtttgcttgtctctgagacagggtctcacaataccaacctggctggcccagaaaactctgtgctttctaggacagctttgaactcacagagtgctgaaattaaaggcaggagccaccaagcccagcccaggttacacgagctcttactagtcatagaacaaaacaaaaataaaataaaataaaataaaataaaataaaataaaatgtaacagaggtgggcaaggaatggctaggaaggggaacagagacagcacaggatagtctagttctgaatctgcaacactccaactctctacaatcacagagcttgaatcagtcaatcaattttttaaagtaggtatgacttctctctggtaacttccattcacaaactccatttcaagaagctaatgctcaggaagggagagagagagagagagagagagagagagagagagagagagagagagagagagagagagagagagagagagagagagagagatgcagaggtggggacacacaacacagaggggagatatgacaaatggagatgtgtcatggctgtagtatcaaaggggctgccagaaaatcaaaccaggctaagggctagtgtgtgcaaatgtcctgagaatccccacagccccttggtccagcaacccttctcttatgtggatggatgcagcagctccacatgaggagcatcactggcaaccccacagagaagtaaagatgcgggggatgaggtcattcatccctccctttgcttcctagggcttcattccactgacaaccttacctggtacctgccactgaccctgcctcagtaagcagagacaggtcacaggtcacaggtcacaggtctggatcagggtcattgcacttgctgtgtcctctacctgcaatgctgactcacctcactcaaataccctcatggctcacccccttacctcctccccatgtctgttccagtgccacctcttcagagaagccctccctaactaccttatcctaaacggttcctgcatctctccctgtccaccttgcatcactggggaacctgtcaacacttatagccctgccaatggtcctctcccctgcttccccagcccgaaggcaggcatcacacccggctctgctcacagtaaactcatgaatctctaagcctgggaaattgctacatttttgtgacatgaatagttaggtaatattagagatatcccagagttcacaatctgttcattttgacccttggggatatgtgtgaccttctctgtaatatccaatgaccagatgtggcccccgagggtcagtcggagccaagaaatttaacatgnnnnnnnnnnnnnnnnnnnnacacacacacacacacacacacacacacacacacacacagtacagtacagacagacacataccatacagatacatggagaggcagacagacagacagacagatatcatacacacacacagacacagagtagacagagacagacagacagacacataccatacagatacacacagacacatggagagacagacagagagacagagagacagagagacagatatcatacacacacagacagacacagagagacagagacagacagacagacagacagacagacacacacacacacacgagcaccaggtggtcagatgagtggtcagataacaggtaagtggaagagtgagcagtcaccctcccagggttagatgttcttttctttatggggtccagtgagaatgttgcatccttcatcttcggtatattcagtaagtcctcaggcttggtttttctgatacggttttgatacacccacttgcccatatgttctcagtctactctgtaaggttttaggtgacacctctttctttggaggagtatgttctcagtctgagcctcatggctggtgcttcacagtgatgaggtctgtgcctcaggtatggtgcctcatggtcgtggggtctgagcctcctgcctggtgctacaccgtggtggtgtctgtgtaaataaccaagaatgcagcgtcatccttcctttgatactgtcaagtgcagccaaatgctacttgtaaaatggagtctcccgggccaagctgcagtctgaacccgttcacacagctttgagcatcacccagccccatctccacactcttcctttgcctagtttatttctagttatcctaagatctcagcttaaatgtcactttctcaagaagccttactccaccctagatttaatttaggaccctctacgcaatctcactggactgtgagattttatttgagcattttcacaattaggaaatggcacatgaataaatgccaaccacaggatgctcgtggctgaaagcccacagagctgagcacggtcttgtctcgtacaccactgagccttcaggtcccagcacagtgggacactcacaggcattgtcattaacaccaacacccatttcacagagggctgatctattcattcccaccttgacccttacattccatccttcccccagtggaaggaaggctacccgtgagagtagagtaaaagagtaggggaggaaaggggagagaagaaggggagacagagaaaaacccctggatcctggggctgaggatatagctcagctcatttgttaaatgactactctagcatgcaaaagccttgggctcaatccccagcactctggaaaacaggcatgcctgtaatctctgggggtgaaggcaagatcagaagttcaaggttaccctcagttatatatcgtttgaggccagcttgggctacatgagaccctatcccaacacaaaacaacaaactgggtccttaactcccttcaggatttttaggccatggtcatgctcagctttctggagcccactctgaggtccttgacccctgagaggaagttcctggaatccatgttccatatggcttctgtcctggtgagaatcccaaacacaggagggaagaaggccttgtccaaaacagggaaagtgggggaggccacaagtgagaccgaaacctgctatgggttgacctgatggctcaannnnnnnnnnnnnnnnnnnnnnnnnnnnnnnnnnnnnnnnnnnnnnnnnnnnnnnnnnnnnnnnnnnnnnnnnnnnnnnnnnnnnnnnnnnnnnnnnnnnnnnnnnnnnnnnnnnnnnnnnnnnnnnnnnnnnnnnnnnnnnnnnnnnatgtacgtatgtatatatgtatgtatataatatttagttgggccttacagtttcagaggtttagttcattgccatcatggtgggagcatggtggcatgcaggctagcatggtgctagaaaggtaactaaaagttctacagcctgatccacaagcagcagaaagagagaagctaactgggcctagcaagggcttttgaaaattcagggcctacttccaaagacacacttcctccaacaaggccacacctcctattccttctaaccctttcaaagagtcccaccccctggtgactaagcattcagatacaggagcctatagagcgccattgtaccagcgcttcctgtaatccacaactagaagcaccttagatgcctgcctatgagagcagcaaatgcaatacttagagccattgccagtgtcaagccgcagaagatggacacatgcagactggtgaggtgactcagaagatgaaggaaggtgtttgctacacaagcctgaagacctgaattccatcctcagaatccgtgtaaaggtggatctaagctggacttcttcatacagacctagaatctcaactgagcaatgttacccaaaatggtaagagcaggatcctaagtgcaaggtctgcctgggctgtccagtgagttcaaggctagcctgagcctcttagacctactctcaaaataaaaagtagaaagctgaagctcagtggtagggtgcttgctcagcatgtaagtttcagtcctggaggacagctgttaggcaataatcacagaatttaacagaataaatttaggattgagttcatagtaaagatttgctccccgaggcctgcaatttgttctggactcacactcttttggggtcatttaagatgtttcaagtcaagccacagagccatctgttgcctgttgaaaatctatgcagggggaattggagacatgcccccacctggtgtctccatctggctgcattacctcagggggatcccaccccctttcctggccttaatgtcctcatctgcccaatgggaatcatatttctgcgttatccagggacgtgggaggatgaagcaagggcacaggagacacatgaatgcaagggattatgctccgggtcatggggggagaggaagggaggcctctctgccacctgccaaacccacagaggaaggagagggaggagcaggggaccacccaggccagcaactcacattcagggcgagcgcaggggtgtgggcacctggactagccatggacccgagctggtgaggcagccacccaagctgtttgaagcattcggacactgatacagagctctgctgtgctctccacccccaatgcagctgcagctggtcacctctttaagggttaggtatcaagctcccacccctaacaatgcacccatcacagttcagatgaccacttgccctcctcagcctaccatcccaccagagtcagggaagggtcctctcccaggctgacctcctcatgtccatggttgctcaaaaccctccagagtggctcatccatcatttccttcatcgacagtgcctggtaggctgtgcctcttcctgctcccaaccttagcatctcagcacagggttacagttctgattcgtcacctcactcattcatcagaatccttgctgagcatctactctgagccacatactgttctgggacttatcagtagttcacggcctcccaaagtctcctttctggctcagggagatggacagatgacaccctaagtaaagtagagcacacaggacaaaggagtagagaaaactgtctaggagtgctggcaagaatggggtaccccaccccaccttctctgtatcccagactggccttgaattcttcatgatcctcctgcctcagcctcctgagtgctgggactatatgaccatcttcaaaaacaaaacaatacctcttgacttctgttacagtggtggtgggtgggtcatctggggtaggctaaggagtgagcgatactcatggagggttttaaagcatgaagcaatcagggagacagacagaagtccattatggctgtgatctcagccagaggcacagatggcagcttcatctgcctgctgcttggggggggggctccatctgtaagctagacatggatgcactgacccccacccctcacctcattcaaaaagacaggcctccaagtcccaaatgatggccttagctaggaaggcaggttcatcatcggaatggctgcagtagcctgaggaccatacttcccgaggagagttgtgggtgctatcattgaacatacagagattccaagggatggggagaacactattgctattggctgcagtccacaaacaccaagactgaagagtcatacccctaaattgatgtggttcaaattgggggtagacccagtgtgaccgggtgaaacctttagattaagaaagaacaaaagaaggctgggcgaaggtggtgaacacctttaatcccagcatttgggagacagagacagacagatctctgagtttgaggcaagagcaagttccaggtcagccatggctacacagagaaaccctgtctccaaaacaaaacaagaaggaggaagatagttattctcttagagctttaattgcctccacaatataccagccatgtggccacccagcctggcttaacagctgggttagcaaactagttaccttgagctggctctgctcatctaccatatgccagggttcagaaagtccaccctcacattcatcccacaatcaccgactgagtcttggtctagagatacagcagtgaactgaacagccaaggtcctgccagggcaaacttcgctgtcatctcaaagggaataagagagtttattctgagccaccaaatatgagagttcattgccccaaacacagactcagatgagaccactccactgtggacaaaagttccgtgagttattctgttgtttgcttgtctctgagacagggtctcacaataccaacccggctggcccagaaaactctgtgctttctaggacagctttgaactcacagagtgctgaaattaaaggcaggagccaccaagcccagcccaggttacatgagctcttactagtcatagaacaaaacaaaggtaaaattcaatctatgtgttaaatatgttggtgggactgaagttagacaaggaaatgcaaaatgggaaaagcttttacagggtttagatgctatctgctggcatccttagcagttgggtggtgtggtaccttctggtctacttaaaatatatttcaaaggtttttacctgatagccaaacaaataaaataaaataaaataaaataaaataaggtaacagaggtgggcaaggaatggctaggaaggggaacagagacagcacaggatagtccagttctgaatctgcaacattccaactctctacaatcacagagcttgaatcagtcaatcaattctttaaagtaggtatgacttctctctggtaacttccattcacaaactccatttcaagaagctaatgctcaggaagggagagagagagagagagagagagagagagagagagagagagagagagagagagagatgcagaggtggggacacacaacacagaggggagatatgacaaatggagatgtgttatggctgtagtatcaaaggggctggcagaaaatcaaaccaggctaagggctagtgtgtgcaaatgtcctgagaatccccacagccccttggtccagcgacccttctcttacgtggatggatgcagcagccccacatgaggagcatcactggcaaccccacagagaagtaaagatgcgggggatgaggtcactcatccctccctttgcttcctagggcttcattccactgacaaccttacctggtacctgccactgaccctgcctcagtgagcagaaacaggtcacaggtcacaggtctggatcagggtcattgcacttgctgtgtcctctacctgcaatgctgtctcacctcacccaaataccctcatggctcacccccttacctcctccccatgtctgttccagtgccacctcttcagagaagccctccctaactaccttatcccaaacggttcctgcatctctccctgtccaccttgcatcactggggaacctgtcaacacttatctacacttgactcgggatgcatttggttatagccctgccaatggtcctctcccctgcttccccagcccgaaggcaggcatcacacccggctctgctcacagtaaactcatgaatctctaagcctgggaaattgctacatttttgtgacatgaatagttaggtaatatcagagatatcccagagttcacaatctgttcattttgacccttggggatatgtgtgaccttctctgcaatatccaatgaccagatgtggccccgagggtcagtcggagccaagaaatttaacatggaacctttcttaacttctctccatgcaggaccacccagcaggggtcagaggtgtccgtttttccagccatctttggccccaaggtggagagacgatgcaggactagggtccaggccccagggattcctggaagactcatttttcctttggcaaatacccccacttctttcacagggcttgtgccttcatttctgaaccagaaggtgtttacacaaaacatcctgggtttggcgacaaattcaccctctatgaggaatccttaatgaagcttcctccatccccacaccacgcagctgcagagaaaactgtctgtctctagtaattgaaggtagcccaaagccagacaagaaagaggtgtttccaggcttcgtgaggcacagtttgtcaatgtccatagatagttgtgaaaaagagaccagcaccctccaccccggggaatttgtgactgattagcccttctctcagcctcagcctgcagctataaaactaaacaggcataatcctgtgagaaaaaaaaagtgtccgtgaaattcaagtgaggcaaagaatatgaatgggctaagtttcccagagtccaaaaaaggagactaaaaagtgaacctcagagttaggccttaggggaggtggctccgtgaatgaagagtgttcactttgcaagaataaggatctgagtttgaatctcaagcgcctacagaaaaacccagacatggctgtgtgagcagcaacaaacagcgacaggcagatccagagagctcaatgtctagcaagcctagcccaaaagtgagcttctgtttcaaggagaggctctatttcaagacaataaggtgagaatatcagggagagacagacacctgacaccctaatctgtctggcctctgcttgtgtctgcaggagcacagagcacccttacacgcatgcaacacacacacacacacacacacacacacacacacacacacacacacacacacacacaccacacaagaaaatagatgagatatagctcagtggtagagcgtggtgtttgagaggcactggggtaattccagtttcgcacacggaaaaacaaaagaggattggtgaggcagaaactcccaggcccagcgtctgagcctccagctttgcaacattgggggacccctccggttctgtcaggcagtcaccacacacacacacacacacacacacacacacacacgcctcctctgggaagtcctggatcctaattcactcttacgctcttactgacactccactgctcccctggacagtttccagctccttctgtgaatctcggcttgctactgtggacattagattcaacaaatgctgcagccagatgcaatttaaaataattactgcttcctttccatcttccggggagaaagagagagagtgaggggaatttctatcacccattatttacaaactggaagctgaaaacgtcgtggattaaaatatgagtctgtctgccacactcagtttctgggcgtcgttaaaccgggactttatgatctctgtgtctccaaatcccttatcactaccttccataatgtgtaattattttgccttcagtgttcgttgttttccaatgggacgacgttcctagagtcgggatgttttatttgcagccgcgttcctgacacccaatctggtatgtagtggatgcccaggaaccctttgaagggagggaaatggacagtgcgttgtgttgctccttcagagcctgtagggggcgcacctgccccgctcccaaagcctaccccgcccctctggagccccgctgcggcgcttgctcttttcactgcgcaggcgtgccggaagtcccagaacagcgcgtgcgcggaaggagccaaggtgaagttgtagcagtgtgtcagaagaggtgcgtggcaccatgctgtcccccgaggcggagcgggtgctgcggtacctggtcgaagtagaggagttggccgaggccgtgctgtcggacaagcggcaggtgagagacgtggcggctgcgagcgcgtaagtgcgcggggtggcagggagctcacccggtcttccggcgtcactggtcccagcggcctggcgcggagcgagcactggttctgtgctggatagtcgccttcctttcaccctgcccggtcattgctggtctcctggattctcactgtctgcgggaggctcccctgacaccactttccaaacgcagtccctggcccatcgtgaatcaggttactgagacatgggcggcatgtgtctgggcaatgcgctggggtgtgtgggtgtgatgtgtgggtgtggtgtgggtgtgtgggtgtcgggcgcgggggtgaggggttgagggcctcgtagatccgaaaggggtgcttggttctgtttctgtggtaagtggttagtccctaaagggagttcgtgctggggatcggttgctttagactctaaactttagagggcttactgtgttgtctaggttagccttgaacaatccgtggtctatccttgtcagtctcctgagttctgggattataggcgtgcatttggatgttaaatgcctctctctggctgcttcctagagagcggggaaccattcaggtgatcccgatggtctagagttagaccagatggtagtgatggggcgagacatatacttgatatatttgatggtcttcaaacgctgtcataatggccataatggttctttgtggtctatatttgagaaggcttggtggttcactagctgcggccccagatgtcacctcttgagtagttagctgtcatagtggtaccatgccacagctgttccagtccagtatggttgagtgtctggtgagactgtcagagttacctaacaagagtgtgtcagtagtcactgtctagagaagacactcagctcactccctggtgactctggtacactctcaaggttgactggatgacacaaaatgattcaatctgcaggcattttcctagcaccttctctggaggaaggaggtttgtgtcgaagcagaggagctggaagctgagtgggtaaagaagcaccttcccacctgagtcctccatgttaggcaagactttggaacttagccagaaatgataccttgtctcttcagattggggctggaggcagctgagtccccatctgctcctgttttcagattgtagacctggacaccaagaggaatcagaaccgagagggcctgagggccctacagaaggacctgagtgtctctggtaagttgcgacatccttactgaagccctggaagccggttcagttgtcttctgaaggacttcattatccctggtaaaaaccaggcaggaggctgggactgtgtgactcaccctcgtgggaaacttagacagcttgaggagaagagcgagcgagcgagcgttgcaggtcagacatatgctgtgactcagaattttagatgctcacttcagtgacaggccattagctcctcactcactgatggcagatgcagagagtgctcaccgcacataaaagcaatagttctgcccttatgttccacacgaggaaagcagcacaaacacataactgaaaattgtgagaaagctaaagatggagttggccatgggtgggtgtcgagactgtcttggagggaagagatggggctcagtagatgaggccaggtggctgctgtggctggtggcatgagcaagtcaagccatgccatgtcccactaaggggacaacatgaagcatttctggaaaggtgggcagcattccggccacagtgaagggcactgacatgtagggcttccattggcttatctcacctgaatgaaacccagagctgtttcgagactccacatgatccagccccacacaccccacgcactcactggtccctttgttgtttgcctggctctgttttcccacatgtttgtgggtgacatgtcctcgctttcctcaggtctcgcctggatgtcatatccacgatgtcacatccccataatgaacctgtcctctgatgctccctagcacttgaaacaactttggttggttggttggtttttaaatagcttgtccttttgctattctatgggttcttctctcttccacctttcaccccttttcttccaccttttcaaccccctaacatttgataagagagaaaaagggatagaggggaaaggaaaacgctccctgaataaagtctggggttggaaagggggcagcgttctcattagaccacttcctgctgattaggggcattgagtccttggggcaagtttgatcttcatcttcaggatatctaatttcttcttgttatttctttgcatatgtctacttaaaaaactgtgaccaacaaccctgcctctcatggccctagcaatgtttcaccttctcaaaagtcctcagaattccaaaaatcacacactggaagaaactatctgcagctggcaaaatcataccagagcatgaggcaaatcatagtcagctgctgtggacagtctgaagcagccccacatcgcacacctgggattgtaatgaaaacattttcttacagtatttctgtgttttgttttttaaagaaacaaaaatgcccaatataatgtcaatataatttttcatgctagttcttagcagtatgttgaaaaacccaaccttgttcattccccacctttgctataacatgagtcccacaagagcatggactgttttgttctgctatgttcttagcacaaatgtgccagtcaggtgataggtgcttcaaaaagaaaaaagcaaaacgtgataaagaaatgtctgttcgctgtttcagaagatgtgatggtttgctttgggaacatgttcatcaaaatgcctcaccctaagacaaaggaaatgatccagaaaggtaaggtgtcctggggctggaccaaggacacagctactttccccagcactcctgggtcataatccagcaatgaaaaccaaactgtgtatcaggctggggaaagacaaagggccttttccatatgaggcttttgctttctgtttgaaaataaggtcactctctaccaaaatctcattggccaaggccatccatagctgtaaagggtcatggataagtgaggtttttcatgagcctgtgtgtctgtctgtctgtgtggtgtggtgtgtgtgtcaatgggtatgtacatgcagaggtcagaataggatgtcaggtatcctcctctagcatgttccaccctacttactaccttgaagtggagttgcccaacctctttggctaccttggttggccagcaacgctctctgcatctgcctctctctgtcccctagtgctgggattataggtacactcagccatgtgttctggagattcagtcctcacacttgcagagcaagcactctgcctgactgagccatcaccccagtacccgagggagcttttctttttctttattttattttactttatttgttttttttgagacagggtttctctgtatagccctgggtgtcctggaactcactctgtagaccaggctggcctcaaactcagaaatccacctgcctctgcctcccaagtgctggcattaaaggcctgcgccaccaccctggcaagcttttatttttcatgtcccctgctgctgagactgtgctgaaagtggaggtgtgactggtggggggagggggggagagggacatagcctgtggtggagcatttttctagcctgtgtagggacctgggtttaattcctagcactgcaggaaaatggagtgtaggaagagtgagcctctatcgtctgcacagcttgtgcaggcaaagtactgctcaggtctccaaaaccatgaccactggagtctctgtggagaatctctgtaaggacaaggctgcagggaggcccttgcctgggaaaaaacagatggcacttgttctctcgttcacctccttgaaaccacatggatcaaaaggaccagtaaggctgtcttcctgaaaacagaaactagaacaaacctgcagaaatttcagttacggtagtgtggttaaaatgaagggccaggttggaaaggtggctcctattaagagtactggctgctcttccagaagaccagggttcagttccagtcagcacatagtgattcacagctggtgtgacttcaattccaggggatccaacacccttttctggcctctgtgagcaccaggtatgccatggtgcacaacatacaggcaggcaagacacccagacacatagtcatacattttaagaattattttaaaattaaggatcaatgtgcttgggtaatgggccagagactgtacagctgaaaacttaggggtcactccccgagttcaggatttggtggtgtgtcctgctgacccatagatgttgtctaatctctgtctatgcgggttctagttttctcccaaatccatatagactgaacaagttcataaacagtttcttatttatagtgagaaatctattaccaaagctgtgaaggaagcatggccaagcagggcttttcttcatcagggagggagagcaggcaggcagctgatggccagtagaacgttcctcacagcagttgtttgataagctttgaagggtgcctgtgtctcagtgtagtctgtggtgacgctaggctggtccttcctgtccactgtggccgactagtttatgccggagcagcaggctctcccattgtctacttaggccacattttcacaggtctccttgatggaacctaggtttgtaaagtttcttagccacccagcattctttgaataattgagtgacaggccttgttctgggccagctcagggacgtggacaggtagtatccctctagagtttagccttgactctcaagggtgttaggtggaaactggggtccttctctgtaacctaacctccttgtcctgtctgcctgctgcacttttttacagatcaagagcacctggataaagaaatagaaaggctgcggagtcaacttaaagtgaaagttaaccgcctctttgaagcccaaggtgttggcctggtggggctggaaggtgggaggggaggaacccattgagagagcagagcggtgtgcagagccactcaggtgggcagtgggaagtgaacagcgttgtctgtagcagcagagataggacgtgaagctcattcttgccacagctcctttcccaggcactgagagctgcctaggatgaccctgcatggtacagtacgagggaagctaggactggaggaactcagaagacttgtcagaggtcagagcttatgaggaacccagcagcacctcagatccaggtctgatggaacctggaggtcggggcggcagtcaggactgtgcaggttcttagtccaggaggagtgttggtctgcatcagcctgcgcagtgcagaacctgaagcccagccctgcacctctcaggctgagctggcagtataaatgcagtgttagccactttactgggcctggctccagagtcagcagtaggttgggcagcagggggccggatctgatcgtgactttctattccttgcaggaaaaccggagctgaaaggttttaacctgaatcccctcagcccggatgaggttaaagccctcaaggtcatcttgaaaggatgagactcacagaagaatgggggacctgtggtaggacttcccaactcccagccttgagacctgcaagggcaggattgtctgtttaaggggacaggcatcaggaatgtggcttctgtacaaatctttttctgtagtgcttggttgctttgtgcaagagagaacccttagtctgttctgtgggcttggcctggtcaccagagcttggacacaagacctattgacaaaccctggcagctgtcagtaggtgtgtgggtgtgtgagaatgtctgcagccgacacttctcaacagtagcctgctgttcacatgggcctggccggggatggagggaggggaaggtggactgggagcttcattccagctttctgcacagcgaggcattttcaggcagtgtgtgtgacaactggaataaagcaggacactgaccgttcacttctgcgtgaagcagacctagtgctcctcaccagcttcaggtagacacattcgtttccccactgctccagttctgtcctttttcctgctggctttctgtagtagaggtgctgccagtcaccctctgtgcttgctcttgaggtagaagtccttatggagttctggcccagggctggcaagcagtaaccttcctgatgtgactggacgtggagtatcgtcccgacctctgcgagcagggcctgcctggctggctcgagatcatagtgtgaatgtggcgtgagagcaaaactgacttccggtccctgccgctcaataaacatgaactgaacaaacaacagctctgagttgtcacccacctcattctgtccttcaccaaggccccacccttctacctaagaaatgggggtggttcttaccttaaaagtgtgtgacatcaggaatagacaagagacgactgtctgttaccctcactgcatttgacccatagttacatcagaaacgagctggtgtaactataatgtaagtttcttgaaagaaaggggtggagaggtggctctgggtttaagagcacttgtcattttcagaagaccaaattaagttcccagccccacatactaccttataaccatccgtaacgccagttctagggaattggtaccttctaatctccacaggcatgcatggtacatgtacacacatgtacatacacgcagaacacctattaaaaatgaactagtcaggtatagtggtatacacctttaatcccagcacatgggaggcagaggtaggtggaaatttctatttccaactgtaatacacattgcatgtgtttaaggccagcctggtctacagaggaagttccagggtggaccctgtcaaaaaataggaaagaaactagaaattagaaatattttttaataatactgatgccttcaaggaatattttaaaatgtgttgatgaagaaaagcatgtaaggcaaataaggtccgtgcctgaagatttgtttccttggattttacaggcattcccatggtatgaccaggccactgcactgggctctagttagaagaccacagcttcagaggaaggcggcagcttagctcaggatgaaggaggtacttgaaccttgagcaagggctgagcaatgtgtgacctcctgactgtaggcagaggctgtgtggtccctgaaggacaaattgcagggtaaaaggggagatgatactgtctacccaactcttttcataagctctgaactcccaaaccatgtgaataagatgcagacccaacagaattcactttgatggcagctacctggtgggtttgtggggcacattatttctccactggaatttctcctgcctgccagggtgctaagccaaagagcacatcggttctgtattctggaagcaagaacctcaagtcaatacttgggggttgtgggtttgggctaccagcctcccatggtcagttcacttcttgatttgctggtgattcccagacgttccttcgggcttactttaggtagccaggtttgcatttatggacaaagatgacccagaaggtagggagagctgcttgggccccctggaggccccttctccgtggggtaagttgccttccagcccaggctacctgtcaactggagccttgctttctggttttaaactcaaaagccccaaatgggaggtgggttttcccggggaccctggccaagcagccctgcctacccagttctcatttccagctgagacacaggagccctagctctggttttcacatagcagaggacaccatatatttggggcttggcactatcccagacctcctgtggacgagtttctcagcacaccggacccatgattaaagagacatcaaaacgtcagcagcatcccaagccacgcccagtgccgagtagctccaagcctgtgctttattagatgtggtattagacgtgctctctgagcagtggaacttgctgcttggcctctttgggcccagttgccaatcagtcaaggataagcccacccagttccgaagattggctgtcctggttcaaagatgcacagggctggagtggggagtccagggagtctggtccaagtacaagctggtcctgtccagtgaaacagctgccatgctggaaaaaggtgaagactggaaaaaggtgcgctgtgctggaatcgcgctgccagaggccagggcggcacctgccagggcctcatttcttctgactgggggtcagctaggggctttcctctgcgcttgaagggatcggaacagctgcctgagctgctccttccggtcattgacgcagcctaggaagaatatgaggtgttggttgcggtggcctgtatacccactagctggtacaagatgtgggcagcaggaattgtgtggccatgggtggcccactcctgtgctgggctggccctcagctcacctctgagtatctgctttctcaggatggcatcacccaccttgcagagtgagttcagaggtcagccaatgcctaagctaactgggaactcacctgctgcttcaggcactggcccatactggccccagatgagcttgctgagccctgtcaggagttcccagtagccagcaaactcagagtgctatataccccaagttgcaggagtagcagaactgggagttgatccgaggttgtgtggagccagagtcacgttcagctgcttcttcagatgacactgcccttggctttgctcagtgaaaacgcaaaagccagcagtgcctgatgcctcgtaagtgctgactaaacatctcttacccagcacgtccaggaagtacgtctccatgccaaatggctgcctctgcctgcacattcaccaggcaacctgttccctgcttggtctcagagctggttcttgaggcaataccagtttttaatcttacccaggcacatttataacactagtgagtgctactggaatgaggtgaccctccatgggcacaaggattgacctgcagattccttctgagtaaccctgattccacccttgcctccaaggctgccccagatgtcaaggcctctgcactctgccccgtgcatccttggcattttccagagtgattttaggataacctgctttagtgcttcagctctctcctcatgccaaatcttcaggtccagtgcaaaccccttcctggagttccaggttcatcaccggattttttgctaaccgttcacccagtgaccctgaacacattgctaacttgttctcaatcatcagccttcttcccctgcctgctcccaaaacagctcctctcgcttacaccaaacacaaaaccggaaaactcgaaaacgattctagggatttctatagaagtggtcctcctggcctatctgaatggctgcaaatcagccagatcttcgttcccacaggcatctacatttttcagagttcagtatctgctgttggagcaaccgtcttgcaaccagaagacaaactgagcattcagcagacctgctgagtgtggcaaaaagacaagagaagagtcacctaagcatctcgaacctattgtatcagtcccctagaccatactgaacacatgtgtggccctagacacaccatgccccaccccccaggcttgtgaatatcaggcaagcactctaactttttgataaccctctttgagacagggtttcaccaagttagactggccttgaacccactctgtggtataaacagaccatgaacttgtgagatttctccctcatcctccctagtggctgggtttacaagtctgtggtctttagattggctaggtcagccccgttctacttaaagtattagggtttgtttgtgcagccaagcctagtcttaactcatacaaaactctttagaatatactaaatcataagagaacaggatttttagcacccaggaggcagaagcaggtggatctctatgagttcaaagtcagactgatctacatagtaaattctatgccatccagagctacacagtgagaccctgtggcccaagaaaagttttaaaaggaaccacaaaacaaaattaaaaacaacaaatgagaaacttatgaaaatgtttactgtacgtttgatggatgaggatgggacaaggaccatgtcttcagccattaatgttgtgtctttataaatgtagaaaaaaaaaaactataggcaacccagagaaaactgggtacaagctgggcatagtagcacacacctttaatcccagcactgtggaggcagaaacaggtggatctctgtgagtctaaggccaacctaggctatatagtttcaggacatctggagatacatagtgaagctttgtctcaaaaagaagaaagaaagaaagaaagaaagaaagaaagaaagaaagaaagaaagaaagaaagaaagaaagaaagaaagaaagaaagaaagaaagaaaaaaagaaagaaagagaggggagagagagaaaagaaggaaggaagggagggagagagggaggctccgagggaggaagggaggggaaaaggcaggcaggcaagtaaagaagagaggcacatgccatcaatcccaacacattgtagggtgaggcacaaagattagaaaggacttcaagcccagccttagctccacagtgaactgaaggccagcttgggctatgtgtggctcagttggtgaagtgttttgtctaacatgcaggaggtgctaggttcaagtcctaatagcagaaaaacctggcatgttagctcaggaagtagaaacaggaggatcagaaattcacgaccactctaactacacagcgagttaaaggagagcctaggctacacaaaaacctgcctaaaccccaccaccaaactgacaaaaaagtaaatttcccatgagaactggttcacagtccttcataaaaatgatctactattaaagagaaatcagtccaaagctgggacggcttacaaaaaaggaaatgcaaatgagaaactgaagcctctttagtaatcaatggaattaaaataataatgaattcactaaggggcttgggcctctttctaagtaagcctatgcctgctgctcagtgattcttctacttccagggagccagaaggaaaagccaacttccgtggtttccaccggagaggaggctcgccacagggttatttagtaaaaaactgagatcacaccaaatgcccaacggtaggaagtcggcttgataaatgctggcacacacgtgggctgaaatgctctgtagctgtgctgtgctgtaaccactcaggaaactaaaggccggaattcaggagttagggttcaggctggctggcccatctctacaacagccttctgtggtctgtgcaagctttggagacaatttcctggtttgaggggcaatcacagaagctaccacatgccgtggtattgcgcatgaacaacccgcctaacacatgcttcccatgggaggtcctctgtattcctgaatggagggagggaagccacgtggaaagtgggactccaaacgccagtctggtgccagatttacaaaaaatatgaatatatgcattttttaaaactggaaggaaacaccagattgttaatgatggttgtgtctggatgtgttttaaattttccttctttagttttcaaatattctacaatgagtgtgaatttctataatcggggaattctttcacatttcacatactaccttgcagagtcctacagcctttaacttttctcatgataatttgttctccacctgagtcttgaaatccccctccagaaactcagaaatttctcactataacaggcagggtcctaccaggagtatccaaccgtttgatgttgtgaccagacattgtcatctacaaagttcacacttgagaagtgagcaaaaagttacacacacacacactgaataaaaaatctcataactgttttaagtgagtatacgattttgtgttgggccacattcattgccacccttagctgcattcggttcccaggctgcaggttggacatgacacctgtaagatactactcatctttatgttatggatgaagaacagagaggtcaagttgctcacccaagtcacacagctggtatgcttgctctgccaagggctggatcacactgctctgccaagcggccccagcccccctccacttcctatgatgtttctctcccactcacttcctgtctggctcaacgtacctaggtgagtgttggtcacaaagttccccatccctgataggtcagaaggcccatcctctcggctgacagggccatcattccacatgagatcgaagcccccgactctcttctcctttcctgtgagcctggggatgcagacggggagatagcatgcagtcggtgaggctcaaagacctgtcccaccaaaaccaagtggcagatctgcattggggccacgttcatttcctcctactcctcccattggtaatgcgcgtccaattggtagtgtgtgctttcaaatctgtccctccccctcagggattcacccactcctgaagctggccctgtgtgcctcccaggacttgttgttaggggtaagcagcctcttagtgaatgttgtaagccaggcactcaacagtgcgtcacctcggagtttctccaacagccccaggggagttatgacgctccctactctacagacaaggaaaccaaaaagaacctcagagagggaagtgaccggctcagggtcccagtcaggaagctttgagtacatccagctacactgagctcttgggcctatgaacatctcagtttctctacctatgaaatctaaatctcaagcttccgggtcctgttcccttgacaggcgtccatctgccccgtgtagggcacagacaggaccctacctggcctccatgtccaccacgtgcagggtatcctccagcagacaggtcttgagttcatagtcctcctggctgctggccgtcagggaaggagaggcattgacttctaggagccacctggggagagcatgggagaacgtggcgagggctgtcagggatcccgtctaccttctgctaagaggtttcaccatgcagggcaagcccaagcatctcacagcttagaaaaatatccaaaagatgtgcaagcacacccaagtggggttgggaaatgaacccacacaagatgcaagggctcagcacagctctaagtgctatgtatggttggatgatggtgatacccagcagagagatgcagaaaaatcctacagcaccccatgtctgtgagcattaaaagacagcagcaaaagagctgggagaaagttaccccacgtgggcagaaactaaactctgggatgctgtaagatcagtgagtaagattgtactgctggggtgggttacctccctgcgtgcttggccaggttactacactgctattgctgcaaggcaggactagacgattagaccctattgctggggacactgcactttgtttgcagggcgtggagaaaccagactgggcctggatgctccctccttgaagcatagcacttgtggggctgaaggcacggtgtggtgcgggctggtggagggaattgttaccagtttgctcccctgtaggtacaaaacactaggggcatcagcatgccacataaggtgtgcccactggcacaacagaggccccatgggccacaattatttttcagttggatccaagacctgctccgaggagagaacctgggtttgatactgccaggcaggaaaggcacaagcctattgttgctgttttgctaactggacacaaagcctataaaaacaccttctaaatctagatgctcatacaccccatcgttgatgagttagctccggtctgggaagcctctttctgcagatggctgcagttactggggagactcctgggtgctaagtaaggaataacaaggataacaccagcactacagcctgctgctcaacctgggtgggggagggaagtgaagagaggggaggagagagagagagagagagagagagannnnnnnnnnnnnnnnnnnnnnnnnnnnnnnnnnnnnnnnnnnnnnnnnnnnnnnnnnnnnnnnnnnnnnnnnnnnnnnnnnnnnnnnnnnnnnnnnnnnnnnnnnnnnnnnnnnnnnnnnnnnnnnnnnnnnnnnnnnnnnnnnnnnnnnnnnnnnnnnnnnnnnnnnnnnnnnnnnnnnnnnnnnnnnnnnnnnnnnnnnnnnnnnnnnnnnnnnnnnnnnnnnnnnnnnnnnnnnnnnnnnnnnnnnnnnnnnnnnnnnnnnnnnnnnnnnnnnnnnnnnnnnnnnnnnnnnnnnnnnnnnnnnnnnnnnnnnnnnnnnnnnnnnnnnnnnnnnnnnnnnnnnnnnnnnnnnnnnnnnnnnnnnnnnnnnnnnnnnnnnnnnnnnnnnnnnnnnnnnnnnnnnnnnnnnnnnnnnnnnnnnnnnnnnnnnnnnnnnnnnnnnnnnnnnnnnnnnnnnnnnnnnnnnnnnnnnnnnnnnnnnnnnnnnnnnnnnnnnnnnnnnnnnnnnnnnnnnnnnnnnnnnnnnnnnnnnnnnnnnnnnnnnnnnnnnnnnnnnnnnnnnnnnnnnnnnnnnnnnnnnnnnnnnnnnnnnnnnnnnnnnnnnnnnnnnnnnnnnatagattcagttaaaattggtagagatccctttagaagaggcctgcaccgattagatctcatttatccttaacaattcccttaaagaaagacatagtcaaacccaatttacagactggtaagctgaggcacaggaaaaggaagcatgtctgaatttacacagacatgcagaactgggattcaaaccatggtggtctgcactggagtgtatagtcaatcatgaccccccccaccccaccctggctctctgggccactgcccacttacggcttgaggtcctggtcaatgaggatgtcatagccatagagctcaaagcagtgcttatcactgatgatcaccttctgcacgctctgcaggctcttgatgaagatattgtccatgtcactgaagagtgtctccacggccttaggaccatgcttggaagccaggtactgcctgaagcgctgaagcatccacttgcaaccctgaggcccaggtagttgggttgggagaggggccaagttcactggagcctacctgatggttcttgaatgaacccatgcatacggtccctcaagcctggcaggagggctccacctgagtcctggggttaggaaatttgggtatgcccctctctctggagtgaatagttacatagctaagaagacaggctgtctctggccgatggcctatacaggcggcttctcctggtagccttcactggtaccctcttagggtagaaaggcaaccagtaagcttctgttcctaggattatgtgagataagtgtgaactcatccacgcccctggcttggctcttaacgctaagaagtctaagaattctatagttgtactgactttcaggctatcaaatggattgatggtaggtagatatgataacagatggtagatagatagagatttatagctagattgatgattgataggcagaatatctgtttaatatactggctgataggttggttgaccagtaagggacatctaagatatgaagatagatcacattttgtttagaaggtacattaatttgatattcaaatattgaggttcatgccaagtggctccccactgtagccttgtcttagcgctgcggatgggaaagggtgatccttccttctctggtaacttgtggtctatcttgggttccatgtcgctctgtttgtccctccccacttggcccaggagagggaaggtgcgcagtttcctcaccttttttaggtggtagtcaggcgatgtcttctgcacagcaacattggtgaggtgaacatctggcagaggttggtggtcaagggctagtgtggacagagaggggcagccatagtccctgctgccccaaggactgaactgagaccctggcctgggagttgacaaggaaagcaaaaacaaaacaaaacaaaacaaaagcaagacaaaaaccagccaaagttcacatacttgggctttgcagtcagatgggcctgggtgcaaattctagatgcatcttaggggctgtggattcctgaaggatccgggtgatctctttgagcctgtttaccaggtgttctagctagtcttatgtcagcttgaaaaaagctaagagttatctgcatggagggaacctcaatggagaaaatgcctccataagatccagctgttgggcagttttttagtgatcagtggaggagagcccagcccattgtgggtgcttccatctctaggctggtggtcctgggttctataagaaagcaggctgagcaagccatggaga

SEQ ID NO: 1319 - DNA, 597 bp, Mus musculus
gcgtggcaccatgctgtcccccgaggcggagcgggtgctgcggtacctggtcgaagtagaggagttggccgaggccgtgctgtcggacaagcggcagattgtagacctggacaccaagaggaatcagaaccgagagggcctgagggccctacagaaggacctgagtgtctctgatcaagagcacctggataaagaaatagaaaggctgcggagtcaacttaaagtgaaagttaaccgcctctttgaagcccaaggaaaaccggagctgaaaggttttaacctgaatcccctcagcccggatgaggttaaagccctcaaggtcatcttgaaaggatgagactcacagaagaatgggggacctgtggtaggacttcccaactcccagccttgagacctgcaagggcaggattgtctgtttaaggggacaggcatcaggaatgtggcttctgtacaaatctttttctgtagtgcttggttgctttgtgcaagagagaacccttagtctgttctgtgggcttggcctggtcaccagagcttggacacaagacctattgacaaaccctggcagctgtcagtaggtgtgtgggtgtgtgagaa

SEQ ID NO: 1320 - protein, 111 aa, Mus musculus
RGTMLSPEAERVLRYLVEVEELAEAVLSDKRQIVDLDTKRNQNREGLRALQKDLSVSDQEHLDKEIERLRSQLKVKVNRLFEAQGKPELKGFNLNPLSPDEVKALKVILKG

SEQ ID NO: 1321 - DNA, 728 bp, Mus musculus
aggcggagcgggtgctgcggtacctggtcgaagtagaggagttggccgaggccgtgctgtcggacaagcggcagattgtagacctggacaccaagaggaatcagaaccgagagggcctgagggccctacagaaggacctgagtgtctctgatgtgatggtttgctttgggaacatgttcatcaaaatgcctcaccctaagacaaaggaaatgatccagaaagatcaagagcacctggataaagaaatagaaaggctgcggagtcaacttaaagtgaaagttaaccgcctctttgaagcccaaggaaaaccggagctgaaaggttttaacctgaatcccctcagcccggatgaggttaaagccctcaaggtcatcttgaaaggatgagactcacagaagaatgggggacctgtggtaggacttcccaactcccagccttgagacctgcaagggcaggattgtctgtttaaggggacaggcatcaggaatgtggcttctgtacaaatctttttctgtagtgcttggttgctttgtgcaagagagaacccttagtctgttctgtgggcttggcctggtcaccagagcttggacacaagacctattgacaaaccctggcagctgtcagtaggtgtgtgggtgtgtgagaatgtctgcagccgacacttctcaacagtagcctgctgttcacatgggcctggccggggatggagggaggggaaggtggactgg

SEQ ID NO: 1322 - protein, 127 aa, Mus musculus
AERVLRYLVEVEELAEAVLSDKRQIVDLDTKRNQNREGLRALQKDLSVSDVMVCFGNMFIKMPHPKTKEMIQKDQEHLDKEIERLRSQLKVKVNRLFEAQGKPELKGFNLNPLSPDEVKALKVILKG

SEQ ID NO: 1323 - DNA, 1160 bp, Mus musculus
cggtacctggtcgaagtagaggagttggccgaggccgtgctgtcggacaagcggcaggtgagagacgtggcggctgcgagcgcattgtagacctggacaccaagaggaatcagaaccgagagggcctgagggccctacagaaggacctgagtgtctctgaagatgtgatggtttgctttgggaacatgttcatcaaaatgcctcaccctaagacaaaggaaatgatccagaaagatcaagagcacctggataaagaaatagaaaggctgcggagtcaacttaaagtgaaagttaaccgcctctttgaagcccaaggaaaaccggagctgaaaggttttaacctgaatcccctcagcccggatgaggttaaagccctcaaggtcatcttgaaaggatgagactcacagaagaatgggggacctgtggtaggacttcccaactcccagccttgagacctgcaagggcaggattgtctgtttaaggggacaggcatcaggaatgtggcttctgtacaaatctttttctgtagtgcttggttgctttgtgcaagagagaacccttagtctgttctgtgggcttggcctggtcaccagagcttggacacaagacctattgacaaaccctggcagctgtcagtaggtgtgtgggtgtgtgagaatgtctgcagccgacacttctcaacagtagcctgctgttcacatgggcctggccggggatggagggaggggaaggtggactgggagcttcattccagctttctgcacagcgaggcattttcaggcagtgtgtgtgacaactggaataaagcaggacactgaccgttcacttctgcgtgaagcagacctagtgctcctcaccagcttcaggtagacacattcgtttccccactgctccagttctgtcctttttcctgctggctttctgtagtagaggtgctgccagtcaccctctgtgcttgctcttgaggtagaagtccttatggagttctggcccagggctggcaagcagtaaccttcctgatgtgactggacgtggagtatcgtcccgacctctgcgagcagggcctgcctggctggctcgagatcatagtgtgaatgtggcgtgagagcaaaactgacttccggtccctgccgctcaataaacatgaactgaacaaacaa

SEQ ID NO: 1324 - protein, 131 aa, Mus musculus
VPGRSRGVGRGRAVGQAAGERRGGCERIVDLDTKRNQNREGLRALQKDLSVSEDVMVCFGNMFIKMPHPKTKEMIQKDQEHLDKEIERLRSQLKVKVNRLFEAQGKPELKGFNLNPLSPDEVKALKVILKG

SEQ ID NO: 1325 - DNA, 1238 bp, Mus musculus
ccagaacagcgcgtgcgcggaaggagccaaggtgaagttgtagcagtgtgtcagaagaggtgcgtggcaccatgctgtcccccgaggcggagcgggtgctgcggtacctggtcgaagtagaggagttggccgaggccgtgctgtcggacaagcggcagattgtagacctggacaccaagaggaatcagaaccgagagggcctgagggccctacagaaggacctgagtgtctctgaagatgtgatggtttgctttgggaacatgttcatcaaaatgcctcaccctaagacaaaggaaatgatccagaaagatcaagagcacctggataaagaaatagaaaggctgcggagtcaacttaaagtgaaagttaaccgcctctttgaagcccaaggaaaaccggagctgaaaggttttaacctgaatcccctcagcccggatgaggttaaagccctcaaggtcatcttgaaaggatgagactcacagaagaatgggggacctgtggtaggacttcccaactcccagccttgagacctgcaagggcaggattgtctgtttaaggggacaggcatcaggaatgtggcttctgtacaaatctttttctgtagtgcttggttgctttgtgcaagagagaacccttagtctgttctgtgggcttggcctggtcaccagagcttggacacaagacctattgacaaaccctggcagctgtcagtaggtgtgtgggtgtgtgagaatgtctgcagccgacacttctcaacagtagcctgctgttcacatgggcctggccggggatggagggaggggaaggtggactgggagcttcattccagctttctgcacagcgaggcattttcaggcagtgtgtgtgacaactggaataaagcaggacactgaccgttcacttctgcgtgaagcagacctagtgctcctcaccagcttcaggtagacacattcgtttccccactgctccagttctgtcctttttcctgctggctttctgtagtagaggtgctgccagtcaccctctgtgcttgctcttgaggtagaagtccttatggagttctggcccagggctggcaagcagtaaccttcctgatgtgactggacgtggagtatcgtcccgacctctgcgagcagggcctgcctggctggctcgagatcatagtgtgaatgtggcgtgagagcaaaactgacttccggtccctgccgctcaataaacatgaactgaacaaacaacag

SEQ ID NO: 1326 - protein, 133 aa, Mus musculus
MLSPEAERVLRYLVEVEELAEAVLSDKRQIVDLDTKRNQNREGLRALQKDLSVSEDVMVCFGNMFIKMPHPKTKEMIQKDQEHLDKEIERLRSQLKVKVNRLFEAQGKPELKGFNLNPLSPDEVKALKVILKG

SEQ ID NO: 1327 - DNA, 27917 bp, Homo sapiens
atgcctatcttgttcaccactgtatcctcagcacttagtggggcccagcatatagcagatgctcagtgtgacagaaaagggcaccgcactacaattcaggtaatagccagtcctagttctgccattacctgcacaggtgatcttgagcaattcacctcgcctctgtaggcctcagtttcctcattcggaaaaaagggaatcactaagacatcttcaactcaacaagcctgggatgtcttcttcatcccaatgcctctttcttacccatagagtcagaaagtcctttcaataaacataattgtatttatttatctagtgaatggtcaatatattcacatgcttaaaaactcaaaggtacaaaagggacacactgaaaagtgtctctcctaccctatcctccagccaccagctccccttcccagtggcaatcaatgctattagtttcttgagtctgtctctctccctctctccctctctgcctgtctcttctctctctcatcttcctatttgtatacctaccaccaccattttaaaacaaatgatagcataattatatacagtcctatactttgttttccccacataacagcatttttggagactgcttcctatcagtgcatagaggggcccttattctttcatggtatggcaacattccattgcatgcatacaccacaatccacttcatcattcccctaaatcacgggcagctaggttttctccagccctttacaacaatacttcagtgaatgactttgtggacacaccactttggatatctgtagaagaaatttctagtgatagacttgctgattgaacagcatgtgtgttttataattttgatagttgccctctataggggctgtaccaagttatcctccatacaccagcattgagtgagggtgcttgtaaaaggcctttttaaatggcctgcaataagtcctcaagactcctcaaggtgggtaaatcactacaccttgctaagcctcagtttcctcttcaataaaatgggtatcctgcttcatagggtggtggtgaggatgaaatgaaatagtgcatgcaaatagtgcatgcaaagtgctcagcacagttcctggcacatagtagggcctctataaaggttagctattctttctctgtccccagggagctccgtggggacagggactttgtcatgttcactgctatagcacagcttctggctaatagtgggcatccaataattatttattgagtgaacgagtccattttccagttttactttgttgaccagggctttctgtctatctttacagcctctcttcccctttttttctgttctccttggactccagacacactggtcttcccctggctccctcctgccacagtgcctttgcacttgcagttccctctggcagaagcactttctctacccccgccccaaccccccaccacccatagcctctccatttgcttagttcatttctactcatccttaaatcttgcttaaatatcactttctcaagaaagcctcctccatctccatccctgatttagggtaggatcgccctctatataatttcactggactctgagcttttcattcaagcattatcacaattaggagggtgcatgcatggtgtcaatcttgtccccatggctgaaagcctgtgaggtccaggactgggcctgtcctatgtaccactggatcccagggcctggccgagtgcaggtactaatagccattgacctgagggaataagtgaggcccacattaactttccagatgggtggagctgcctgtgcccacccaagagagggggagtcttgactgaatgttccatcctctttccagtggaactagctactcctgaaaagttctggttggttaaggggtagggatgagaggcaggagagaggggagaagaagagggagagagagaaagggagaatgtacccttaattcccatgattaggtcatggcttcagtcattcgacagacctctcctgagcccccctgagcaccttcgaggaagcttgtggaacccctgggctcaatgggcttttgggctggtgagaaagccaaaaccatgaacaacaacaaaaaaactgctcttgtccaaaacaggaaagtatctgatgccaggagaaaagggaatgaaagtccctctgggagagctgaggaagagcaaccctcttggtggcaggggtggggcagggccttctaggaggagggtccttaagggaagagtaaacacttaacaaaagatatttctggcagaaggcactgcctgagctcagggaaagagctgggaaagttaggatgtgtttaggaactggcgttcaagaagagtggaggaagatgaggcagaaaagaaattgaactcagagaaaagtacaaagaagcatgtccctgaaggatgattgcagcagtttgtatcatctgcaaaggtggaaacaacttaaatgtctatgcacaagagacgggctgagtaaatacattacttacagccaccacactggcaggccatagagaggtggaaatgcccaaagttggcgaagatgtgcatcactggtaggagtgaaaatgaggaagccatcctggagagaaaggtggcagcatttaggaaaaagaaggctgggcacggtggctcatgcctgtaatcccagcactttaggaggccaaggtgggaggatcgcttgagctcaggagtttgagaccatcctgggcaacatggtgagaccttgtctctactaaaaatttttaaaaattagccaggtatggtggggtgtgtgcctgtaatcctggctacttgggaggctgaggcaggagaatcacctgagcccgggagtttgaggctgcagtgggctgtgatcagggcactgcactcagcctgggcaacagagtgagaccctgtctcaaaaaaaaaagaaagaaaaaaaaggaagaagaagtgtgtgtgtgccctatgacaaggcaataccacataggatgtccagtgtggcactgtgtgtgttgataggggcagaaagcaactcaggtgtccataatcaagagagtggacaagtgaaatgaggtagaggcagctctgcagttctctggagctggaggagtaaggagctagaggtacctagagtgctagagtgcatggagagatctgagaaacatcaggagaggcaaaaataaaaaataaaaggaggagacgaacatgacttacaactcaataatgtttatgtggattcaaaacacatgcccagggtcaggagcggtggctcatgcctgtaatcccaacattttgggaggccagggcaggaggattacttgaggccaggagttcgagaccagcctggccaacctggcgaaacctcatctctacaaaaaatacaaaaattagccaggtgtggtggtgcatatctgtagtcccagctactttggaggctgaggcacaagaatcgcttgaacccgggaggcagaggctgcagtgagctgagaacatctctgtgtgtgtctttgggtacatgtatgtatgcgtttctattgtgtggaattacacccaatgataggactggaattgtcaggtatgctcagttttagttgatactaataaaccgggtatgtggtttggtatttatttatgtatttttgttttgagacagagtgtcgctctgtcacccaggctggagtgcagtggcacgatctcagctcactacaacctctgtctcctgggttcaagcgattctgcctcagcctcctgagtagctgggattacaggcgtgtgccaccacaccaggctaatttttctattttcagtagagatggggttttgccatgttggccagcctggtctctaattccttacctcaggtgatccacccacctcggcctcccaaagtgctgggattacaggcgtgagccactgctcctggtcccgctaagaagttttaaaacacagaaacacataaaacaacatgacgcattttgcaagaaattctgagtatttaaggacatatcaaatacagtagagagggtttcagtgaggttaaaagtgagtggaggtgggagaaaatgatataaacaagaaagagtccttgcagactaaatcatgaccacgtgctaagaactgagaggcaggattaactcaacccactgtactacagtgtatgaaaatgaaacgtaaatttcaatgtagaaaatgagataaacaaatggactatatggctaaaatactacagaatatatatatatatatatatatatatatatatattacagaatatatatatatatatatatatatatattacagaatatatatttatatatttgaggcaggatcttgctctgttgcccaggcttgaggggagtggtgcaatcttggctcactgcaacttctgcctcagccccctgagtagctgagactacaggtgtgtaccaccatgcctggctactttttgtattttttgtagagacagggttttgccatgttgcccaggctggttttgaatttctgagctcaagtgatatgcccccctcatcctcccaaaatgctgggattataggcgtgagccactgtgctggcctcactatagaatattttgcagctattagaaaatagaaaagagatctaaatgtcaatcaaagctgtccaagagcaatgctgcgaagcactaggtttgtgtgcaatgccctccacctgccttcctgtcctaccatctcacaatagtcctgtgggttttctctgggttgacagctatgtctttaaatgcatatcacagttttgaaaagacacacccaaactgggatactagagggaactgagaagagggggaggggggtaaaaaagagcttagtcttctctgtaatgttttgagtttccgtaagaagaatccatttatagaaattaaaatgaatgaatttggtattaaaaggtagtagtaaaaaccagctcaaggagggctggaatgttctgggcttgcactctctttgggatcacttaagatttttcaagtcaagccatgggccatctgttgcctggtgaaaatggaggcgtggggagttgggagacatgtccccacctggtgtccccatctggctgcatgaccttgggagggtcccatccccttgcctgacctcaatgtcctcatctgcccagtgggattcagatttttgtgttacccagggatgtgggaggatgaagtgagggcgcgaggagaatcacatgaatgtaagggattattctcggggtcggggaggagacagggtggaagcctgtcttccacccaccaagcccacaagggtgcaaaggaagtggagggaggagctagggaccacccaggcgagcacacagcccatctgcagcataggagcatgttctcagcagctgggaggcccagccagagctggtagggcagccacccaggctgcttggagaatccggacattaaaggggttcctctcactgctctctcagtgcagctccagccctgtcacctccccaagcccccattttcaccctcctgtccgctcaacacatacacacgtatctcagaggaatgcactgcacttgcccctcttcacccatcctatcaccagagccacaggggctttcacaaggtaaacccaatcatatctgtgcctgctcagcaccctccagcagcttcccagcatatgagaacaaacccaatccccgtactttagtggataaggcatgatcccagccctcacctttaagaatctggcctcagagagaatctgccttaagtagaattctgactctgctcattaattcattcattcaaaattgtttatcaagcacctactgtgggagccaggcactgttctagacatttgagagacatcagtgaagaaatgaatgaaagattcctgccctcaaggagcctctcttctagcagagggagatgaacaataaccataagtaaattataaggcatgctgggaggtgacaaaagttatgatgaaaagaaagaaaaagaaaaactagagcagaggaagttgatcaggagtagcaggaggggcagaagttgcattttaaacatggtggtcagggcaggctccattgaaaaggtgccatttaagaaaagactgggccagacgtggtgactcatgcctgtattctcagcacttcggaaggccgaggcaagcaaattacctgaggtcaggagtttgagaccagcctggccaatgtggtgagacccctgtctttactaaaaaaatacaacaattagctgagcatggtggcacacacctgtaatccaagctattcaggaggctgaggcaggagaatcacttgaacccaggaggtggaggttgcagtgagccaagattgtgccactgcactccagcctgggtaacagagtgagactccatcttaaaaaaaaaaaaaaaaaaagctggtagatggtgagggaaggaaccatgtagacatcagggaaaagtgcaggcagaggcagcagccagtggaaagaccctgaggcaggaccacgcctggcttgtgtgagcagcagcagggaggtgggtgatgacccagagagggggacacttttccagtgaacaagacagacaaggtctctgccctggggagctcatgattacaaagcaaggtgtttagagaacaaagatggtatgggaagtacagagacaagggaagtccaaaaaactgtgggggcccagagaggactcttgaccctcaggaggaggtaaccccaagctgagcagtgggggatatggaatagtgacacgtgaataaaggcatgggagaaaattaatccagaacgatgggggagtatgtgcaaaggccctgagaatcccaccactggtcaccacccccactgctatctcttggtgcagtggccaccctctcctgcctagatgattatagcagcctcctcttgggtctctcacagaggggcaaagaagctagagtatacagtcactaacgactctcttttcttggtaggagttcacactcgtggatattaattcactgcattcccctctcaacctgcatccatgagcagagagaagcaggaagccacaggcatacacagcagtgtctgcaggtgacctctggggaggccctagtggattttgggtggggcactgccagcaccttccacagccctgtgtgctcaatgtctccttctcctctctgtcctaccctctccccctcactaattctattcaaatacactggctgttccctctgcctggaatgctcttcccctagatatccacaaggctcaccccctcatctcctccacacttctgttcaaatgccatctcctcaaagacaccctctctgaccagcttatctcaaatagcccctccattattccacctccaccttgtcctgtgctatcttttcttttcttatcttttcttttctccttccttccttccctcctttcttccttccttccttccttccttcctttctttctttctttccttctttctttctttttctttctttctctctttcttttcttttcttttttagagaaagggtctcactctgtcacccaggctgggttacagtggcacgattgtagctcactgcagccttgaactcctgtgctcaagtgatcctcccacctcagcctcctgagtagctgagacaacagccgcacaccactacatctggctaactttttaatttttatttttttggtagagatgggggtcttgctatgtttcccaggctggtctcgaactcctgggttcaagtgattctccactttggcctcccaaagtattgggattacaggtgtgagcccccacatcaagccgctatttttttggtagcactttttaccacctgacatatgatatatttacttgttttatgttgattgtttctctcaccagactgggagattcctgagagcagggaccatgtccagttttgctcatggcagaatccctatcacagggcctgggaagtcaatacataattgtgaaataaatggctctgaaattgaaatgctctccgagagtctttctgggtctgaccatttcaaagtcttggaaatgactatgattcccctccccaacatttccagtggccaggggtggcctctaaaggccagttaccgccaagaagctgctaatgtgggagcctccctcagcctctccccatccaggcccatgtggtaggggtcaagggtcaacctggtccagccctctgtgggtcccaaggtggaggagacgcagtgctggggtccaggccgagggatgcctggtgagccccatttctgctttggcaaacatccccctttccttctcagggcctgtgcctgcatttctgaaccagaaggtgtttatacaaaacatcctgggtttggcgacaaattcaccctcagtgaggaatccttaatgaatctccctccttccccacaccaggtggctgaaggaaaaattagctctgcctctggtagttgaaggcagccaatggctaggcaacatagaggtgctgctggggcttctggggccacaatttttggggagggttttttcagggtccggaaatggcatggacaccaggcactcctggcttgctgtgtgatgaggcactgcctttctcctggcctcagtctgcagctgtgaaatggggcagtaataatcccatccatacaaaggttgctttgacactcaagtaaggcaaggggtgtgaaggggcttggttacaagaggtcaaaaggagagaataaaacgctggaatcagggaggcgagacatcagagtgataatatcggttctgctctttagactttcaaagtcctttcccagcgccttttacagccatgtgggctcaatgcctccttccctctgacctcctgcctgcttcccccccgcccattctgttccacatacgctggctgttccctctgcctggaacactcttctcctaggcatccacatggctcacccctcaccttcttttcaaagccttgcctctctctgaggtttgttttttccagctatccaatgaggagtttgggcgtgaagacctcgtgggaaccctctggttctgatggtaaccattttccacctgcctgccttctctgggaagtcctcccaatcctaccacccacacccacctgcttttctgagctagcacttcattgcttactgcccatagttttcaagtcccttccttatgtataggccagctactctggacattgggcccaacacaggggctcaagtgaactctggttaaacggaattaaaagtgattactgcttcctttgttttttgagacagagtctcgttttgtcacccgggctggagtgcagtggtgccatcatagctcagggcagcctcgactccccagatgcaggtgctcctcccgcctcagcctcctgagtagctgggaccaacgggcgcgccccccctcacccagctaattttttttttttgtatttttagtagaaacggaggttttactgtgttgcccaagctggtctcgaactcctgggctcaagtgatccccccgctttggccttccaaagtactgggattacaggcatgagccactgcgcccagctgattcctgcttccttccgatcctgtggagagacactgaggcggatttttattcaccccctttttataaattagaaactgaaagtgtcagagattaaacataagtcacactgccacatgggccttcttggtgtttcttagccaggggaagaataatatttcccagatcctaatcactacctgccacggtatataattgttttgccattaattgtcggtgtttcccactaggatgaagttccatgagggcagggattttgttgtgttcactgctgcatcctaagcacataaaactgcttggcacataataagtgctcaagaagcatgaaccgagggagtaacgggtcagaggcagcccgaggactgagctctctgagcctgcagagggcgctccagccccgcccccaaagctaggccccgcctctcgcagccggctggcgcactagtgttagagcctgcgcaccaccgttcttttaactgcgcaggcgcgccggaagcacctagagagcggcgcgtgcgcagcgggagtcgaagcggagatcccggggtcgcgcgagagccgcaagcggagttggtgggcgctatgctatcacccgaggcagagcgagtgctgcggtaccttgtagaagtggaggagctcgccgaggaggtgctggcggacaagcggcaggtgagaggcccctccgcggcgctggggcctggcggccggcgccgtgggaaagcgcgcggggtcgcagtgagttgacctggacaggcggttaacggctccgaggcgacagacctgggccgataaatattcggccgctactaagtgagcgcctgcgctatgctggacattcctctctcttcatcctttctctgccccttgccatgctctgtggatctcgacccatcatgctctgggccgtttccctgagcacctgtttcaaaatgcacttcccggccccatggttgatctaggggcaccgccctgtaaaggccctcaggggagagctggaaccgaaaagaagcctgagggggccttgtgaccgggcaggggtggggacgtgggggaaggtggcgccctgtttatggggtgtcttgttttaagtgccaagtttttgaggggagttcctgggggaaggagggtgacgtaattggatttaggttttaaaaggatcccccctggctgctgtgtggaatacagaatataggtgggcaagggcggaggcagggagatgggtgaggggccattggtatggtccagaccagagatggatttggactaggtagtggtggtggagagaagtgaaggggtcagaaatgtattttggagacagactcagtaggccgtggtagtggagccgggggagtcgtgactccctctcatctccagttagaagggtcaggtatttactgagaaggggaaaacttgggcaagatcctgtcaaattaagtactggatcagggtgtgctggatgagaataagagcagttaaagtttatcagctacttactatgtgccaggtactgtgttaagtcatttaattgctggctcaataacctgtaaggtaggtactgtccgtagctccattttgaggaggagtaaataggaaggtgaaattacacagcttgaggcagatagcaggattcgaacctgggtattccaaatccagaaccagcactcgtgcagtatactgtactactgcgtcacttccttagtagctattgtgttgttaccactgtctcagtgcccccaatcctgctgttccaatctagtattgttgggtttctcatattactagttcagaatcagctggagaagtttgtccaaaaataaacattaggcctgcttaatcacagtgtgtaggggaagggtttccactcccctggtgattctgatatgccctaaagttcgagtggataatgcagaatttcccatttagtcagcacatgttttctcagcatcttttctggggagagggcagctgcacaaagcattgtctttaagaccaggaagctgagtgagagaagaaatacattcacacatcaatccattttaggcaggacgttgaatgtaatcaggaataatgcattgcctctgcaacccttgtctgtcaagaggtgacagcttggggcaagagatagctgagttccctcctgtccctgtggttttcagattgtggacctggacactaaaaggaatcagaatcgagagggcctgagggccctgcagaaggatctcagcctctctggtaagttgaaattttctcagtgcagccctggaggcctgttccgttttcctttaaggcctttaccttgttcctgatagagatcaggcaggaggtcacagctgtataactcagccttgtgggaaattgaaacagtccggggagatgggggagcaaattttgcagttctggcacagactgtggttcaggattttgcctgctcacttcagtgacaggtcgttagctcctggcttatcaacgatggcagacactgagagagtgccgggggtgtataaaactgatggttcctgcccttgtgctttacagatgaggaaaacaacgtaaaatgcgtaattgaaaattgtaagaaagccagagatggaattggacttggggtgggtgttgagaatatatatccagaagaatgggacactttagatgaggccaagtggctgtggcagtggaagcaaatggggagtaagtatggctggagagagggacagagaccaggccataatgaaaggtcttgggggctaagggaggaagtttacattttgttgaaagtacactagaatgtgcagaatcttccagttgcttctcatctcacctgagtaaaatccagaggtcctacaagaccgagtaatccagcccccatgaatccatgagtgtgccaatatcatctctactccccccacccccaacatgactccacctacactggtctccttgctgttcttttatttattcatttatttatttatttggagacagagccttgctctgtcacccagactggagtgcagtggcatgatcttggctcactgcaacctctgtctcccaggttcaagtgattcttgtgcctcagcctcctgagtagctgagattacaggcgtgtgccaccacacccagctaatttttgtatttttaatagatacagcgtttcgccatgttggccaggccggtctcgaggtcctggcctcaagtgatccacctgcctcggcctcccaaagtgctgggattacaggcgtgagccactgcgcccggccccttgctgttctgaacaccccaagcacactactgatctttgctgttcctgttgtttcctctgtttggctcactctttccccagatgtctgcagggctcacactctcactttccttaggtctctgtgtagatagcatataatcagtaaggccttctcagactacctgctatgattaacaaggtcctcctctggcattccctagccatcttagcctgctttatttttctctacaactcttaaggtctgacaaatcatatctttattctctctcctccactgtaacataagctccaagagggcaggaactttttcttgttctgctctgttgtctgtatctaaaacaatgcctggcagataataggtactcaaaaaaaaattgttgaaggaattactatttgctctttcagaagatgtgatggtttgcttcgggaacatgtttatcaagatgcctcaccctgagacaaaggaaatgattgaaaaaggtaaggcctcctggggatgggtcaggggtgtgctgcctctcccaccagctttggtcttaacccagaacagggagtcaggcttcaggcagcgtaaggagaggcagttctgtcacagggttcagactgctgtgggttttaattccacctctgccactgtgggttatttcctcatctctaagagggggatgcatctgtgtagcatagctgtgcagttgaggtaaaacaatatgtgtgcctagcatagtgctttcttattagtgaggaatcagttgggctgcagataacaaaacccaacaaattgaggcttaaggaaatatgcttcttttactcttgcataagaaattgtccagaggtgtgtactccagtcctggcatagatgcccagcagtggcaccttagcatattctcctggttgttgtttcatcgttgcaggcctcatgtcctcatgccaggctggaggaaagacagaaggctttcgccacatagagctttgccttctattttggaagtaaggccatctcctcagggacttcctgccaacatctcattggccagaactaagtcacatggtcacccatagctgcaagagagcctgggagagtgagcttttcttttttacatgccctgcaatagagactgggttgaaaatggaggtttggggagattaaacctctagggtctgccatagcctaggcactcagtgtactcagtttccacaaccataatctggaagctctttggaaaagcatcttaaagcaagtcaggctgcaaatggattattggctagaaaaagaacaggctacacatactttttcttccataaccttgaaaatggccaaaaggacaagcaaggttgcctcagtccctgaagacaggatgtcttcatacctcatgaaataaaacttttttttttttccttgagacagagtcttgctctgtcacccaggctggagtgcaatggtgctatctcggctcactgcaacctttgcctcccaggttcaagcaattctcctgcctcagcctcctgattagctggaattataggtgcatgccatcatgcgtggctaatttttgtgtttttttagtaaagacagggttttgctatgttggccaggctggtctaagtgacctcaggtgatccacccaccttggcctcccaccaaagtgctgggattacaggcgtgagccactgctcctggccagtgacataaaactactaacaggaagctatatccagcctggagaagtttccagctgttgtgttgaaaaaatacactaatattatggttataaaattaaactgcacttggtggtgggctggaggctaagctttcagagggtcccttgcctgggttcaggatcttgttggcccttttggcccccaaatgtcgtcttgtcactgtacctagaggggttctgagacattatcagatttcttggggatcaacataggctaaacaagctcatggacattggggttactcattcacaatgagaaatagaaccaggctgtaaggcttggccattcagggtttctcccccatctgaaagagtgagtctgtggggaagacaggctagccagaatgtcactcatgagcaggtggaattggctgggtgacttcagtcaattggtcaatcaagctttgatagccacctctgtcatcacaccaactcttctcaggggcagtccatgacactagaagacccttttctgttcacagtggctaattaagttaagcttgagcattgcttgcgtgttgattgtttacgtcacatgtttacacaatcatgtttttctaaaaccccctcaccttgatggacttgggtttgtaaaatttcttaggcatccattttccagccatctagggtgggctgaatctagagatgcttattttgtttgtgcatttgaattttccataatttcattgtgggagggcagcctaaagtcctgatgttgccttctccatccactgaccaccccaaggtactttgcataatgcagaaaaggccagtgtaatgggagttgggactgctgtgtcctgggctctctgagtggtcctgagcaggtcatgtcccttctagactttaatccttcctcagttggcctctgatgtccccttttccttcctgaaagctacacgcccttgctggggagaggctggcctctccactactgggatcaagtctgtctggtacaatcttatcctctgcttgcccccctcattttttcagatcaagatcatctggataaagaaatagaaaaactgcggaagcaacttaaagtgaaggtcaaccgcctttttgaggcccaaggtattggcttagcagggactggagataagaaggggagggaatcatcagcatggactttgaagggcagggatgggaagtccgaccctcagagatgggcagtgtccggggcagcctgtgagtggccctggaggtgtgcacagtggttggttgtagctgcccagggacagaatggacagggggacttctacagtcctagtcctgtcatagtttcttttccaggtcccaggaaccgcttggggtgatctcacgttatacatcggggcatggcatggggatcagatagctctgactgaggaaactcagaaggcttcagtgagtgagtgaggtcagagctgaaattcttgataaatgcaagcactctagattggtcacaggtcttggaaaaacctgaggttctttgggcagcagagttacgcgtttgcaggctcttggtgacacaggagcagtggtgatgcctcatctggtgcattgcagaattggaggcccatccctgccagacctccaggctgagtttggcagcattagtgcagcgtcagcccctttcctgggcctggctccagagccagcaggaggcccgacgtgctgatggatcatcttctctcctaggcaaaccggagctgaagggttttaacttgaaccccctcaaccaggatgagcttaaagctctcaaggtcatcttgaaaggatgagactcaagaaccaagatgggggaccagcaaccccccagggtcatggaggacccaggaccctccaaccttgacacctgtaaggacaggatctgccctgtaaggggccagccgtcaggaatctggccatgaaaacctctttgtagtgcttggctactctgtgatggcaggagggaaccttcagcctgtctggctgctggacctggacaccagggctcggtggacacaagatctattgacgggccttggtagccaccagtgggtgtgtggggcagtggctgtgggggtgtaagaatgactgcaacaggcacttcccaacaatggcctgctgttcacatggaccctgagcaaggaaggagggagggaggggcagagtggagtgtcattccagcattcctctcagaagggagagaggttttcaggctggtgccatgcgattggaataaagcaggaggctcatgggtggttgctgaatgaagaacagaatcttggtgctttgtggctcaccacagccatctgtggggcaggcacacacacctcccgccagctccaattttgcactttttccctgcttgattccaagagtaggtgctgcctagcagcccttcgtggccactctttactcaggagggccttgcagagtcctgcaccaggcctgggtgagtggatgcgcctcttaccatatgacacgtgtcaagatgcccttccgccccctctgaaagtggggcccggccagcactgctcgttactgtctgccttcagtggtctgaggtcccagtatgaactgccgtgaagtcaaaactcttatgtgttcattaagggctcaataaatgttagctgaatgaatgaatagcagcaactagtctttatttgcctcatctagtccttcagtaagggcacgccactccatttagaatacaacctatgaacatggttcttgccttgaaataaacctgtgatttgacaggcgggtgataacaaatggcagcatggcaggggcacacctctcctggtccccccgctccttggctctggctcatagttacatagaaacacaggctgtcatggccagttcttacgtgttttcaagagaagctagacatatgggttgtgaagttgaatctccttttaaatatttttgactaatgcagaaacttttaaaacatgagtgtgggtcacaggtgttagctccagatagtgcaataccatacaactataatcaagaataaggaacaagctccaagatacatcaagtgaggaaagcaaggggaaggctggtgtcttataagctaataatttttgtgcaagcacagtgtgattccctcagaacagcacctgcagggttggggcgcacaggtgggagggaaggagatgtcaccctatacccttttgtaaactttggattttaaaccgtatgaatatattgcttattttaaaatgtaaataaagtagggagttgcagaattcaccttgctagatgttgtccagtgtgactgcctgattcacaatttcatcactggaaaattgccccttcctccctggcagggtgggtgctgggccaaaaaaagctaatcgcattccttctggaaatagggaacctggagtccatgcctggacctgtctgggttggtgtgcctcaggtacagggatgagtgggagaagtcctcatgctctgaaggcagaaggtctagagtagcctggcttctggctttcctaaagtcggctggttcacttcttggatttgccagtattttccttccaaaagtcttcccttcgggcttgacctaggcaggcagattcaaccatttgcagccagagaaactactctgaagcaggcggagtggtagagggagtaagtcccccctggaacagttaccccaacagccccgagtcttgttgcaacccctcttaaaccaagaggaagcttagcaatgtaagatgtgaaaaggcagatttttactcacactcaactcccgaagctgtcctgcccatgagcccagggttttccggtttctggctcagctcccaatctcaaacacaaggcctagagaagcacttaagtcacccatctgacttagataaatgcacctttgcagagaccctcactaagctctgcctccctggtctgtcttgtccatctgagaaatggggatgccctgtcccactggttttcagatgatggtcagggagccccatgggctcccctgacatgcaaggagaagaggatgtgtttagggctcagtacttccccaggcccccaataaacacacaatctaataactgcttgctgtgtaagcacagcttaaagacgagttccttagcctccaaactcttgctcctgaaggaccttttcagcactgacttgggaggtatccaagtgtcaaagccaggaggacttggctgcagccaacagtatccccggaaccaggcctggtgcccagtgactccaagtagggcctgtgctcatttattagatatgatctcctgggggtagcagaacttgctgtatttgttctctttgggcctaactgccaagtcagtttgtcaaggttaaacctcccccagtcccagtgattggctgtctcctggtgcaaagatgcctggggatgggctggaggtatccaaggggcccaattcaggtagtaagctgcagctgctaagccagcaaagctggtgccaggctggaggtggggaggcgaatgctgtgaggtgctgtgctgggatctgggagtgggggggaggcctgggtggcacctgctaaggctgatttcctcctggcagctggggatcaactggaagctttcttctgaacttgaagggagcagaagagctgcctcagttgtttcttccgatcgttgacgcagcctggaaaggaagtggggtgttggctgggatgacctatgcttgggaggagtggaggggcctgtgccccaactccctgctgggaagaggggacagcgggagtcagacaaccacacacagcctgtggtttatatcctggctccattcctaaactgccatggccctcaagcaggtcagttacccttttcagcatcggtcttctcatctgtaaaccaggatactactgcccaccttatggagtgaacatgaggactgggggcttacctcaagccaggaactgctccagatgctgaatgtggatggatttgtttggccctcgcaggaatgatgtgtagaagggaaaacaggctcagagaggttaaatcatttgaacccagactacctggtgccagagccacactcttaaccactaccccacgctgctgcttctcctggctttgctcagtgaaaatgcatttaaagctagcacagtgcctggcacctcatagctgcccagtactgttagctttcttcccttacccaacccatgtgccaggcacaactggctaagagatgagttttccgtacatgtggcccccaatcccaggcagttcgtgctgaggctgccgtgagctgctgagacgtctctcccaggacgttcatggtgctacatgttggctgtttgctctcagagctgatccttgaggtaactatggtcatttaacctcatgccaggcacattgctggcactcaaaaatgctgcttgaatgactgaatctctgtggccactagttctgacctgtgggtgtctgccatcttccacatccccccaaaccctgtccctgcttcccagacactcactcagccattcactgagctgagagcctacgatgcacatcctcagggttttccagagtgagttccatgcagccctaacttaaactctatttggctcattcctaactctcgagtcttcttgtccagtgcaaacttcttggagttctacactcatctctgagttatctgctgaccctttcacctggatgtccctgaacgcttccctaactcagttcatcagtactcttcctaccctaaccagctacccttgtgtttaccaccataaacccaaacacttgaaacaggaataattctagagacttctaaagcactggctctcccagcctggtcaatatagtgagattttgtctctacaggaaaaaaatcacacacacaaaaataaaattagccaggtgtggtgtgtgcctgtaggcctagctactcaggaggctgaggtaggaggactgcttgagcctgggagtttgaggttagttacagtgagctatgattgcaccactgcactccagcctgggcaacagagcgagactccgtctcaaaaaaaaataataaaaaaaaaacagtagctctcaacttgggctgcatattggaatcacctgggagctttaaaagctactgatgcccacaccaaccatatcttgatctggcaggcgtcagtagtctttaaagctcccaggtgattccaatgggcagccaagatagagaaccgccgctttccatctttgctactcaaatgggggtccaggaagtagcgcattgatatctttggtgcactgttggcaaagaaggctgcaacaatgttcctatatgcacacctctgtgcaaggtgactttgctgctcctctcatcaaaaggtggggtctattttcttttttttttttttttttctttttctgtgtgagacagtctcgctctgtcgcccaggctggagtgcagtggcgcaatctcggctcactgcaagctccgcctcccgggttcacgccattctcctgcctcagcctcccgagtagctgactacaggcgcccgccagcacgcctggctaatttttttgtattttttagtagagacagtgtttcaccgtgttagccaggatggtttcgctctcctgacctcatgatccgcccgcctcggcctcccaaagtgttgggattacaggcgtgagccaccgcgcccggcgaggtggggtctattttcttacccagtgactgggctacaccagcaaatgctttgattgtagcagaatgactttatgggacttctgagtccgggccgcaaaaggctttgcagtgtgttttctcaccctcttagaaccccgagtctaccacgtgaagaagccagggccagactgttggaagacgagtggccacatggaaagagaggcccaactgacagccagtatcaacccccacacctatgaatgaggctgtcgtacaccatcaagtctccagtaaatctgccaggtgcctgcagccctataagtgaccccaggagagacctgaggaaggatgagcaaataaaatagttgctttaagctgctaggttttgggagggcttgttacacagcaatggttaatcaatagagcatcacccaggagcttgttagaaatacaatcttaggccccaccctagacctatggagtcacaatctatagtttaacaagatttccaggtgattgtatgcatattaaattaagcttggacagtgttatatagtcatctgaagccttatacatttagaaaactaaacaacccatagaaaaatggataaagagtatggacagcttacaaaagaagaaatgcaaatttaaaaaacggaaacctcaccagtaatcaatggaatgcacataaaacaacgagtcagtatgttttacctcaccagttggcacagatttcttttttctaaaaattcaaatctgacaaattcgtataatctttctggaaagaaatttggttgtaataatcccatccctttggcccaataattctgcttctaggaatctgtcctcaggaaatggccagaatttcagccgagcttaatgtgaaaggatgttcatcatggtataatttataaaagtaaaaaaaaaataaaatgcaattgtgccaaatgtccaattataagaaattggtttagtaaattttggcatatgtacaaactgaaatattttgcagccatatggtaatttttttaaactctgccaagaggcaggagagtctagcggacaagcactcaagttttggagccaggcagatgggagtttgagtcctggctcaccacttatggccaaaaccttcattcagcaagttacatagcacctggatatcatttcctcatctgtaaaatgacaataaaaactccttaaagataaaatgagataatgtatgtaaaagatttcatccggactggaccaaaaagtgcattcaagagggaggctcttaatatgcttgaatgaaaaatgccaaggggaaaagagggattcaaaactctagcccaatgccaattttataaaagaaaaagtatgaatatatgcattttttaagaactggaaggaaatacaccagattgttaaagatgcttatgtctggatgtttttatttctttctctagttttcaaatattctacaatgagtgtgaatcccttttttataatcagggaaagttttcactttttagaaaccaagtttaaaaacgaggaacagaggttaagtcccttgcccaaggtcacacagctggtaagttgcagattgaattcaaacaatctaaccactatcccaagctgcctcctagactacctggtacctcccatgaccccatcccttgtgcccactccccacctggccctacataccgagatgtgtgttggtcacaaagtttcccattcccgacaggtcaggagccccctcctctctgctaacagggccatcattccacatgaggtcaaagcccccgactcgcttctcccttcccgtgagcctggacaggaaggaggcccacagggttaatgaaggtgcacctggcagagccctaagacccaagtgaggtccctgatctctccctgagcccaactgatgtccgtccctcagaagtcctttttcccaaccattcattggctgtttcccaggtgcctatgtaggtctctgaggggttgttcccatttttcccccaaggctcctcctacttgctcttggtaacatgcccctatttgttttttttgtttgtttgtttttgttcttgttttgagacagagtctctctctgtcacccaggctggagtgcaatggcacaatcttggctcactgcaacttctgcctcctggttcaagtgattctcctcactcagcctcttgagtagctgggactacaggcgcacaccaccacacccagctaatttttgtatttttagtacatatggggtttcaccatgttggccaggatggtctcaaacgcctgacctcaagtgatctgcccgcctcggcctcccaaagtgctgggattacaggcgtgagccaccacccccggccgctatttgtgatttctggtttaaagtctgctttcctcctcagaccttaaactccataaaggcagggactagttctgttgtgttccttactgtgtccgcagggtatggcacagggcctggtacagagcagggctcaaatgtttgttgaatgaataggtgatggtaggaatagtggatacctgaggtttctgcctgctcagcatccatttcaccttctttcagtccaagagtaccttgggttttcctctgagaaccactcctccctccctccctcaccccatggctcacatggggttgaccccactccctaggaggtgggcacaagaactatacctggtcaagcagagtcacagtgagtggtttaggaatgggaatgtgtcccagttaccagcaaggagaatcagccctcaaacttctgctggaataatcggggaaaagctaatacagaggaaagagaagggagggagggagagggagagggagggagggagagggagagggagagggagggagggagagggagagggagggagaaagggagagagagagaaacagagagagagaaagagagagagagaatagaccagccaacattgagcacctggattcacccattcctaaaagtagctctgggtttttttttttttctgctattgcacattgttaaaacaatagctttgtattgagcacttactgttagctaagcactagatagtaaattatctttgtaaattaacaactctgagaggcagacatggcatttcctattttacagatgaggaagctgaggctcagaaaggtgatgtgactagtccagagccccacagtcaggaggtttcgaggaaatcctgctggactgtctcagaaagctgtagttggccctgctctgccctggagaggtcaagtccttgggtcaggaccccaccctctgtggacatctcagcttctccatctataaagtggtggggcaggccagagccatcgctgagggccactcaggccccaaggttctaagctccccctcttccttggtgggagcctcagttgtcatgtacaaggacatgtgatcaaggctgccctccctcacctcgcttccatgtccacaacatgcagggtgtcttccaggaggcaggtcttgagctcatagtcttcctggctgctggctgtcagtgatggggacgcattgacctccaggagccacctgggaagggaggggagtagagagtcttagggttactcggtccctggagcccctaggatttcactgagaggctagatggatgcatggaccccaccgtcaattcaatccaggctactctctctacctttctatttttttttaattatttttatagagatagggtcttgctaggttgcccaggctagtctcaaactcctggcctcaagtcatcctcctgccttagcctcccgaagtgctgggattacagatgggagccactgtgcccaggcccctcccacttttttttttttttttttggagagggagttttgctcttgtcgcccaggctggagtgcaatggcatgatctcagctcactgcaacctctgcctcccaggttcaagtgattctcctgcctcagcctcccgaatagctgggattacaggtgcctgccaccacgcccagccaatttctttgtatttttagtagagatggggtttcaccatgttggtcgagctggtctcaaactcctgacctcaggtgatccacccgcctcagcctcccaaagtgctgggattacaggcatgagccacctttccactttgaagaaaggtaactcaaatgtagaaagctggcataggaatgattatggtgctttcgtggtgttattgttttcccttcttccaatagagatgtgaatgcaagaaaaacttccctttcttagtgaaaatttgcacactgtaggtggcacccaacctgctgtgtcagggggtgggaagcggtggggaggggtggagactgtggtgagctggagagggcattccaagtctaaaggggtggctgtggccagccccaggagagtgccgccctgtgggaatgtgagtccagaattgcgagatcatctgatttttccagaaaagccaaaaatagactttttttttttttaaagagtcagaatccagttctgtcactcaggctagagagcagtggtgcaatcttagctccctgcagccttgaacccctggcctcaagtcatcctcctgcctcagcctcctgagtagttggtattattattataggtgtttgagtcactgtacttggtaattctgatttttatgtaaacatcttccaaattttagagcctgtcaataaattgaaattaaaaacaaaaacagtctaaaggccaaattcgaagtatctgcaggccaaaagcagcccaaagacctcccgctagccacctcttgtcttgttcaaccccatccttttacagacagaaagctggggcccagagagggaagggctcacccagcaggtctgtgggagaccaagcccctttccactacacagcaaattatcttggtaaattactctaacaacttggagaggtagacatggtgtttcccattttacaaatgaggaaacaggctcagagaggtgacgtagccatctgtggtcctgtgcagccagtcctcttggacctgcagaatttttgcccatacggaggggcacagccggagtcatcctaatcacaacactcagggctggacccctcttgtccaggcctaagggcagcactgagggcaattgtttaggggtctcagcaggccaggtggcgattaactgaggtccctcccctaacctgactacccaggccccagggctgcaagtggatgctccagtgcttcctgcagtagctggtgtccaagcatgggccagagcttattcctccaccacgtccaccttaatgccagcagtcacatcctgctgcaggggacaaaggagagagacctgctggtgccaggaccctgtttccgttgagcaagggcctgacttaggtcttgctctagggctcctcctcctggcttagaaagcccctcaacacttacatggtgaccctgaatagggggttggctcctggagctggcagtgctggtggggagcagctcagcccaggtccttggaccctgggcctggctttgcccttgacttgctacatgacctcaagctccctgaccctcactgggcttctgtgtcctgttgcatcatgtgaggccatcgtggtggtccctgccaggtcaggcttgttctattcgtcagctcaacctcctccacgggcatcttgggagtggatcaaagtcttggcagagatcgacattgtaacaatattccattatatggctctttgcatcttcaaagctccaagacttacagaggggaagtttcttgcttggtataggggagaattcctgactcagcagatgatcaggaagggcctcccagtgccaggctcggtcctcagtgctccaaagactatatctcacttattcctcataacgatcctctaatgacctatggatagatcctgtcatgaccaaccccatttacaaatgggcaaattgaggcacagtaaatgtaagtgtgcacaaggttatacaactaggaattggcagagctgggattcaaacctgggcagtctgggtgccgagtatgcaaactatgacctcctggctctcccacccacccacttacggcttgaggtcctggtcgatgaggatgtcatagccgtacagctcgaagcagtgcttgtcactgatgatcaccttctgcacactctgcaggcttttgacaaagatgttgtcgatgtccctgaagagtgtctccactgcctcgggcccgtgtttggacgccaggtactgccggaagcgctgcagcgtccacttgcagccctgggccccgggcagccgggtcgagagaggagcctcagttagtcaggacctggcctgctaggacccttacacaattgctctcagtgtttcccttagacctgggcaagaggggcccagccctgagccctgtaattaggatgaccccaggtgtgcccctctttgaggggcaaaaattcttcatgtctaagaggactggctatgcaggaccccagaagtccctgcccacatggcctgcgtaggccccttttctgagcctgacttgctaaggacagaccacactgaccatgtgtgcatcccaaggccaaggagtgaccgacaggctgccattttcagggctgtgtatgcacaagggccccactgtgggatggagctggggagggaagagaagggaacaggtgtgagctggggacctgctctcctgtgtccccttgatctggcccttgactctgagaagtctgagaattctgtatttgaacctggccttgcaggttattttacatagacagagagataaa

SEQ ID NO: 1328 - DNA, 2164 bp, Homo sapiens
gagcctgcgcaccaccgttcttttaactgcgcaggcgcgccggaagcacctagagagcggcgcgtgcgcagcgggagtcgaagcggagatcccggggtcgcgcgagagccgcaagcggagttggtgggcgctatgctatcacccgaggcagagcgagtgctgcggtaccttgtagaagtggaggagctcgccgaggaggtgctggcggacaagcggcagattgtggacctggacactaaaaggaatcagaatcgagagggcctgagggccctgcagaaggatctcagcctctctgaagatgtgatggtttgcttcgggaacatgtttatcaagatgcctcaccctgagacaaaggaaatgattgaaaaagatcaagatcatctggataaagaaatagaaaaactgcggaagcaacttaaagtgaaggtcaaccgcctttttgaggcccaaggcaaaccggagctgaagggttttaacttgaaccccctcaaccaggatgagcttaaagctctcaaggtcatcttgaaaggatgagactcaagaaccaagatgggggaccagcaaccccccagggtcatggaggacccaggaccctccaaccttgacacctgtaaggacaggatctgccctgtaaggggccagccgtcaggaatctggccatgaaaacctctttgtagtgcttggctactctgtgatggcaggagggaaccttcagcctgtctggctgctggacctggacaccagggctcggtggacacaagatctattgacgggccttggtagccaccagtgggtgtgtggggcagtggctgtgggggtgtaagaatgactgcaacaggcacttcccaacaatggcctgctgttcacatggaccctgagcaaggaaggagggagggaggggcagagtggagtgtcattccagcattcctctcagaagggagagaggttttcaggctggtgccatgcgattggaataaagcaggaggctcatgggtggttgctgaatgaagaacagaatcttggtgctttgtggctcaccacagccatctgtggggcaggcacacacacctcccgccagctccaattttgcactttttccctgcttgattccaagagtaggtgctgcctagcagcccttcgtggccactctttactcaggagggccttgcagagtcctgcaccaggcctgggtgagtggatgcgcctcttaccatatgacacgtgtcaagatgcccttccgccccctctgaaagtggggcccggccagcactgctcgttactgtctgccttcagtggtctgaggtcccagtatgaactgccgtgaagtcaaaactcttatgtgttcattaagggctcaataaatgttagctgaatgaatgaatagcagcaactagtctttatttgcctcatctagtccttcagtaagggcacgccactccatttagaatacaacctatgaacatggttcttgccttgaaataaacctgtgatttgacaggcgggtgataacaaatggcagcatggcaggggcacacctctcctggtccccccgctccttggctctggctcatagttacatagaaacacaggctgtcatggccagttcttacgtgttttcaagagaagctagacatatgggttgtgaagttgaatctccttttaaatatttttgactaatgcagaaacttttaaaacatgagtgtgggtcacaggtgttagctccagatagtgcaataccatacaactataatcaagaataaggaacaagctccaagatacatcaagtgaggaaagcaaggggaaggctggtgtcttataagctaataatttttgtgcaagcacagtgtgattccctcagaacagcacctgcagggttggggcgcacaggtgggagggaaggagatgtcaccctatacccttttgtaaactttggattttaaaccgtatgaatatattgcttattttaaaatgtaaataaagtagggagttgcagaattcaccttgctagatgttgtccagtgtgactgcctgattcacaatttcatcactggaaaattgccccttcctccctggcagggtgggtgctgggccaaaaaaagctaatcgcattccttctggaaatagggaacctggagtccatgcctggacctgtctgggttggtgt

SEQ ID NO: 1329 - protein, 133 aa, Homo sapiens
MLSPEAERVLRYLVEVEELAEEVLADKRQIVDLDTKRNQNREGLRALQKDLSLSEDVMVCFGNMFIKMPHPETKEMIEKDQDHLDKEIEKLRKQLKVKVNRLFEAQGKPELKGFNLNPLNQDELKALKVILKG

SEQ ID NO: 1330 - DNA, 16454 bp, Mus musculus
  misc_feature (1)...(16454): n = A, C, G or T/U
ggggggtctggagggggagaggagggtggcaggacaagaggagcagtttcaccatggaatatgaagccaagaaagggaagaaggtgagtggggggttgagagggccagggttgggaaatgtctctgaaggtggatacagaggtgagcaacgtggagttagcaaacagcacagggaagggagactgccttctcttttggaaggaagtttctttctgcccctgacagccagacggacatctgggctccggtctaagcttcagtcttagtggcctctgtcatacgtctactgagagactgatagggtcttcctgcttcttggacattctggtggtagcttcccgaagcctctcagagaaagggacagacagacacacagcagacaccttccctccccgatcacccagacagtaaggcccagccaagatgattatagtttggcagattgcccatccaggctggggcctcgcacctgttccctgccccctgcccgctgtttcccaagcctacacctgccctcccctacccttgtgcaaaaactcactcctgagacctcagtttaagccaacccaagtcctttctccaccttcctcctcttttgaatttgagaggtttttccacttcccagttcccactgcaccctcatacacatggggctccctccacctaagaaacggggttcagaatgttttataaggaactcacatgaggtcagtacggtggcacaggcctgtaatcccagctattctggaggctaaggcaggaggattacaagtttaaagttagtgtgggtaatttactgagaacctgtctcaaaactgtaaaagtgggctggggggggcactcgttccttggcagaatgcttatctagcatgcaaggtcccaggtttgattccctaacctgcaaactgataataagaattgtaagtgccaagagagctggaggtatccagctcagaagtatttatgtgaagctctggataaaatccccagtacagacacacgtcaacgtgcccccatgtgaatcattggggctgacatgcacaaattctcaggggtctatgtatttatttaggggacaaggtctaaccatgtaacccaggctgatcttaaatactcactgactgtgtagctcaggctggccttaaacccacagcgattctcctgcctcagcctcgtgagtgctagaattcacccagtgaggtccatctgattaggctcctaggtggccgcccatcctgtttgtgtctgtcttttggggaagctaaatagcatgccacccgtgtcaccagaattgatggtttgctttagaaactgccaacgtagttctagaatgccgctagattgctgcccccagggcttcggattccataggctcaggatgggatccaggaaacagcagttctctcagattccctcgatccatcctgggtgtctttgtatcggtgtctctggattatacttacatttatttattgcataattctaactcacaaacaagcaatagcctaataaatgcctagctatcctccacttagccctggggccttggccgttctttgaatctggctggcaggagcttcaccctccctgggtacttaaaatgcagctttacgatgtcctacctgctggtgttctttctagctctcagcctggagtctctttgcttctccacctgagggggggagggcggacctgcagggctgcacctcccgcagtttttaggaggattannnnnnnnnnnnnnnnnnnnnnnnnnnnnnnnnnnnnnnnnnnnnnnnnnnnnnnnnnnnnnnnnnnnnnnnnnnnntaactgaggttgtggaagcaaaccagagctcataaagccagtgctatagttactgggactttcctgtctctaccagggctttgtgtcccccatccgaatactggtgttcccgaaggctgcacgccaggctgccttcagaagcagtgtcagtcgcaggcccctgcactctatgcctctttatccccctgactacctcatcgacccccacatcctgctgtgtgactacctggagaaagaggtcaaggtgagcatgggacaaagatggtagggcaggggtggggggagcctggaggcacaccaagccacactctgtgtcacatgacggaagcctcctgccttactgtcatgggctgcaccctcagcaggtgacatccacccaatgagctaccataggagactgagttacaggaaactgtgctgtgttcccaaaagctcaactactcatgagactgatgtctgcaggctccctgattattcagtgtccaagttaggagcaagcgagaggctgggagtgcggcttggtgctcgagcactcacctggcattctgaagaccccaggctatacagccagcacaggtctgggggcgtgaagggtggagataggtagataccataatggaccctcttgccaggcaagagcttttcttccattttaaaaccaccgtgaaggagcattgggtaggttaacaggtctccatcagccaaagattggtgtgaagtaagattgaggcactgaacaaacaggctgcttggtcaaatttgaattgcagatgagcagtgattatttcctcagcataaatatgctccaaatgttaaatagaactaaataggtacaaaaaaaatcctaaaaacaaaattgttgttgagctgacatcttgtattttatctggcaactctataaataaagaaaagctagaaaaagaattgttttaaaaccaagggctgaaagtttacagaataaaaagatgtgagtggtgaaattcacccagattcctgcaattaaagtaataaaaagttaattctcatacggaataacatttaaatgataatgttgctataacttggaacacataggagcctgtatattgactgggaatgtctttttttttttgaaaaaatgatgtattaattcagtgcttccttccatttaatctgcaatgaggttgttaaaaggattaataatgcgtgaggtggggagagtcactgggcaaggaaattcccagggttcctttgagctttaatagtagatcccggcctgggccaggtgtggagagggaatggttcgatggataaagtgcttgctggcaaatttggggaccagagttcctatcccccaaacccttgtaaagacaggcacatgcaaagcatgcatccatagtcctgaaaaacccactgtgtggaggtgggaggtggagatgggaggacctctggaagctcaggagcctgagtctggcatgtcatgtacagagaagaggctctggctcagacaatgtggaagggcaggagctcattccctgactgccgcacaggggctgcagcagcatatgcctgcagtcactcacaggaacacacacacacgcacacgcatacacacatacacacacacacacacacgcacacgcgcacacacacacacatacacacacacatacacacacacgcatacacacacatacactcacacacatacacacacacacacacgcacacacatacacacatacacacacacgcatacacacatacacacacgcatacacacacatacgcacacacgcacacacatacacacacacacacacacgcatacacacacacacatacacacacacatacacacgcgcacacacacacacgcatacacaatgatagactctggtctatcattcaaagaggctccaaatctcatcttcaacgtggcagtggggttgggggggggggagaagcactatatattagtgacttttactttcctgaagggccttatagagtgagatgaccatgtgttagtgtgtatcagctaactgttggaaatgtgaactctgacacatgcattcaaggtttctcactacctcataaaagtctaacatagcccagggaggtcttgaatttgctaagtagccttggactctttgtttgcttgtttgtcaagtcagagtttctctgtgtagccctggctgtcctggaactcactctgtagatcaagctgacttcaaacgcagatttacctgcctctgcctcccaagtgctgggattcaaggagttcgacatgcccacactcccatggctgaccctggactctaaacttcctgcttccacctcccaagtgctgggttacaagcatgctccactatgacttgcctagtcttaccctttctagctataatcctgggccaggcttttagttaactgtaccatgctgaaccttttaagccttaaagtaaaagtgagtggatgggaaaatatatataaactgggcgccagatcaacaaatttgttatcaggttgtattggccagggttctttagggcaacagaaccgatggagggggcagggaggcttacagggtgtggtccagccattccgacataggctgtcttctaacaggaaagagtctggtagttgttcagtctatgagactaaatgtctcagctgctccacagtctttgtggatctaatatcattgaaggaaagcctgggcagcagaacagatgagtttgccatcaagaccgagggaaagcaggctaaagtgaaagtgtccttccacgcccctccaagggctgccaccagaaggtgtggctcagatttaagatgtgtctctcacttcatatgaccatccaatcaagagaatccctcatcggtgtgccaggtgcttgggtctgacaagttgacaaccaaaattaaccatcatacaggttattattaatttgagtatttcagcctgtcctgcattaacacagaggctagaatctcccatttctcatccagttcctgggtcacctcacctgggtgacttcctcactgaacccctccagccgagacgagctcctgcagcttctggacactgccagggtgaggtcctgggaagggaagagggcggggtctctttccctttcccctctcctactccgaattcctggggactcaggtgatccgacccatcccgcagcagctgaaggagttgcctctgaagaccacgccagagcaggacagcatcctgagcctgtccgcacgctgcctgctgctcacctggcgcgacaatgaggagctcatcctgcgcatcccgacgcacgagattgctgctgcctcctacctgcaggacgacgctctgcatctgctagtgcttaagactggtgcggcgcgggtaggacggggtgggaagccaacctgcagtgctgggacatttcccagtgttgggcatcaggggagggacccgaggctgggaaagggatggcagaaaacctgagcacactattctgagaccaagggcaggcagaagaaaccacaggtaagaccaaagagctggggatttaagatgaccagatagagaaggttgggtagggcagagatgttggagtcaagaattcaaccccagttcaacgttaaagggggtgagaggtggttacaagacataattgcttgactctgatctgacagtagggggcgccctggctaggggaccagtcaggtcttggaggtttcaggtcagcaacttggagatgggactgaagatagcaaggaaagtcgtactggaaggtgggatgcttagaccaaggtcgccgttcaaatgaagggtatggataaagaggacaagttgactacctctctcaactcagaaagcaagtctgaggagggcattagggtgtgttggggagggtggaaactttgtggctgccacctggaggtctaggacagagccaaggccggaggcagagtcataggcctggggtggggaccgaatgccccggagccagcagaaccgcctggaagcttagtgctgggcagggccttagctcagggaacctcagaactgcgaggtggccctccgggtggccccagaaagcgatatcctgctactgagcccccaaaccccttccttccccaggtctgggggtggaccctgtgcccgcgggcatggatggcagcccgggaggttcgggtcgcgatcccggccctccgggcgccgcgcccgagaaacgacgggtaggcacagccgagcgacgccacaccatctgcagcctggactggcgcgtggcgtggggcgggggcgcgggcgccgaggcccgggcggcgggaggcggtggcagcctggagcggcagcgcgcgggagcgagggcgtcgggcagctgggagcggcgacagacgttcagtggcagctgggagcgacggcacgcgggcggaggtgcgggcaagccgggtggcagctgggagcggcggcaggcgagtggcggcgtcggcggcagctgggagcgacgccacccgggccccaacccgctggatccccagaaccacagccccgacgcctactgcaacctggtcattctggctgtggcaaacagggtgagcacctggcggtgttggcaccactgctgacagtcactatcatactaatcacagcacatgtgaagcgccgaccctagacagacagggcacaacattaacacttaatccccacagcagcccctagggcaaatatgacatctattcccattcctaagaaaaggaagctggctcaaagtttaggtaactagaagtcctgcggaaagcagatgggttcaagattcgaacccaggaaattcaaagcctttctcttggtaaccacccaaggcagaagctttgccgtcattcgtgcctgtcctacctgtctgtcgccttcctgtactcattcacccttgctctcactaacgtgatcatgataatttagttgtttttgttgtagtctttcgagataggattcctctgtgtagccctggctgtcctggaactcactctgtagaccaggctgacttccaacttagagatccatctgcctcagcctcctgaaaaatgagtttaaaggtccacaccgccatgcctggcttgatggtatttgttgagtgccagctgtgtgctccgcattgggccagatgctgtgggtgaggaggtgagtgagccgtttggtgtcctcccttcaggagtacccagtctagccggtactttcagcatttcctctgcgccaggttccagggatctgagtaatgagtgtgcctgtctacagggagaggaggtcaatcccagggatgcagctcagtgggccccacccccacctgagatagataccatccagccctccttccctgctcccccactctcaccctgtgctcctttctttccagcctcttttccagcggggtggtccaggagttaacctcaatcttttctcctttatccacannnnnnnnnnnnnnnnnnnncttccctgctcccccctctaccctgtgctcctttctttccgcctctaaagtcggggtggtccaagagtaacctcaatcttttctcctttatcccacttgtttctaggtgacttctactctgctgccttctaaaacccagagtacactctgaatttcacctctaaccaaatctctgctcctcttgtcttttccagggtctccttctcattatgaatgaatttgtttcaagctgagcccccaatctcctctcaaacctgaagtgtcttcacgtgcacatttcattgaatggtttccatccttggtggctcaggctgaaaccttgcagtggtccttggtctgtctctcttctctctctgtctctctctttctgtctctctctctctctctctctctctctctctctcagtctactctgtcaataaattcattggtcttatttttaaatatatccaaaccctatgcccacaccattcactgtccatacccagctccatcgtctctcttggataacatcgctgtgcccccaccccattgactcagtccttcctcacattctgtactccactgtctcatccaacacagcctcatcctggaaccttgactagggagggcgatgaggtcatgaaaagggggcggggcgtacagatgtgcagaaaagctaggatcacatgggtcatgctggctctagtagaagtgagtgttctgtgtgacaggggatggaggaagagaccctgttacaacaggaaaggttagtttgtactgtttaaaccaaagcaaggagaagaaacagcctgtagatccacgggcctgaaaaccagacagaggcaacactgtgccttggctgtcccactcagccatggggtcctggcctggtggtagaatgaataagtaagtgagttgctctccaagtgtctgagcctctggcctcctgtctgatgctcagtgatctcacacacaatggtcagagttaaaattcccaatgccagcattagctgacgccttgggcctgtggtgaagccaaacaaatcacacaagtccataaagcctctgagcattcaactataaaacgagcatcctccctgacctgtcctgtctatggtaaggttcaatcctggtttaaacagcagtacctgcaatgaccacagatacccatcctgagttacagttgaacatttaccttaggatttttagagccagattttcgtaagcatggtctttgtctatcagttactgctttctgtgtctctcacttgaagaggcggatccctcctcctcaaatgtgcactctccaaagctttgcccaagccactcttgcttctaccagggacactattattgtttcgcttccacaatggcattgggcacagagcagcccatagccatatcctgcgtccagtaatagtaacggcactgagcctacaattttgattctttgaagtgtccctcctcctcctgctcccatctccagacaggcacttcagcttctgtgcctgtacatttagttaaacgaacccttatgttagataaatttcatgataggccatgactcccctggaaatctgaaatttgctttcatggcagagaagttcgagttgcctctagattctataaaaaggccataggaacaagagaggagccgtataattttgaggggaaatgtgtttgaagttggcttatggtgtggttgttagcactggctcacgctgcatctgaggacataggcatgtcctgggggagaggggcaggtaagagcctgagctctcctcctgcccctggaccaggatgccgctgaggaatcctgtgcgctcatctgtcaagtcttccagatcatctacggggaccagagcatcgagtgtgtagaccgggccggctaccactacagatccacaccaaagcggccatggctctccagctgcagtgcgtatctaaactcccacaaagcactgggagaggctgcatgtcctgatagtcagagctgatgaaggcctttgggagttctgagctggaccccgggtctaggggtccacttgatagaatgtcattcttcttgatgacctctttagcgatgacctgatgctcaggttgtcaagtttgggatgagtttgaacttaggcacttgaacgtctctcttgttttgggtgtccctgctttgcagaaagttcagcatgtgtactgtcggctagctgagccatctcaccccatgagattcctagggctgacatttccagattagtccatgtatgcaatcaagggttggaattaaagtgagactaacagggacatttgttgagtgccagttatatgccaagcacaatagccaggtgccaagccttcttgagtctttatggcatcttacctttcacattcacttagcacagacgtggacacctcacagatgctagagaagtagtcttcagagaaatgaaaactgctcagtccccaggcaggtgagctggctcagtggggaaaggggcttgctgccaaccttgacaactgagtttcaaaagtttcccccacgacctccacatgggcaccatggcacgtgcaaactcagacctaagcacattagttaatagtcccaagcttttgggacgatgaggcagaaggatccgagtttcaggtcagcctgagctgcagtggagaaactttatctttaaaaagaagaaaaaagatctgtgcatggtggtgatatacatctttcatctcagcacttgggaagcagaggcaaaaagatctctgaggtcaacaccaacctgatctactgcaagttccagtccagccagggctacattgagaaaagggggagggggtagaagagcctctctgatgtcccgtgaatctagttttacagatagtaagcattgaggctcaagtagtcacaggtcacatggttggtaggtcagagtcagaatccaagctcagtgtgtctaagttccaaagcttctgtctgcatctctccccctgcagcacacttggatactaccttaccctggggcatttagtcctagcaggtctaggcacatcctctcccactgaagaccaatgggagaggcaaccactgatactattaacgatactctgctatgcttgcaaacaggaacctagcataactgtctcctgccatacttcatccagcatcagatagaggcagataaagagactcatagccaaaattagtcacatttttttacactgacatcgtgaatgttttttgtgtaattattcagtttatgcctggtctccaccaaagttcaacctgcctcttctattttgcaggatgaccaaacatagctcttggatatagaatgnnnnnnnnnnnnnnnnnnnncctccctctccccctcctccctctctctctgctcccctcacagacattacatcaattccctcctccacagcctgctatggagtagtctctgtttgcgcagctccagcagctgtgtcactggccttgtggagaccctgctacccgcaggaacagcgcctgttgggaaacctttgctggtgacttgttgactcccaccaggatgctaggcaaccggatgagagagtctgttcattcaaccaatatcgactgagtgcttactgtctcgggcccagctgtaatctgtaagatatcttgatggcgggcaaactgaggcaacttccaggcgctgccctcctgcaacttgcatggaataaatagtcacagagataaccgtctaaccacggcgttatgagaacctggaatgaggaactggcctctgagaagtcagagtgagagtgacccccactgagctgacatgagaaggccctgtctggacagatgaggggccgggttgaggaggaaccacattctccacaagtaatgctgctttcctttcacgttccccaccctcttcctccttgctacatcttcctgtcttctctccctctccctctccctctccctctccctctccctctccttcttcannnnnnnnnnnnnnnnnnnnnnnnnnnnnnnnnnnnnnnnnnnnnnnnnnnnnnnnnnnnnnnnnnnnnnnnnnnnnnnnnnnnnnnnnnnnnnnnnnnnnnnnnnnnnnnnnnnnnnnnnnnnnnnnnnnnnnnnnnnnnnnnnnnnnnnnnnnnnnnnnnnnnnnnnnnnnnnnnnnnnnnnnnnnnnnnnnnnnnnnnnnnnnnnnnnnnnnnnnnnnnnnnnnnnnnnnnnnnnnnnnnnnnnnnnnnnnnnnnnnnnnnnnnnnnnnnnnnnnnnnnnnnnnnnnnnnnnnnnnnnnnnnnnnnnnnnnnnnnnnnnnnnnnnnnnnnnnnnnnnnnnnnnnnnnnnnnnnnnnnnnnnnnnnnnnnnnnnnnnnnnnnnnnnnnnnnnnnnnnnnnnnnnnnnnnnnnnnnnnnnnnnnnnnnnnnnnnnnnnnnnnnnnnnnnnnnnnnnnnnnnnnnnnnnnnnnnnnnnnnnnnnnnnnnnnnnnnnnnnnnnnnnnnnnnnnnnnnnnnnnnnnnnnnnnnnnnnnnnnnnnnnnnnnnnnnnnnnnnnnnnnnnnnnnnnnnnnnnnnnnnnnnnnnnnnnnnnnnnnnnnnnnnnnnnnnnnnnnnnnnnnnnnnnnnnnnnnnnnnnnnnnnnnnnnnnnnnnnnnnnnnnnnnnnnnnnnnnnnnnnnnnnnnnnnnnnnnnnnnnnnnnnnnnnnnnnnnnnnnnnnnnnnnnnnnnnnnnnnnnnnnnnnnnnnnnnnnnnnnnnnnnnnnnnnnnnnnnnnnnnnnnnnnnnnnnnnnnnnnnnnnnnnnnnnnnnnnnnnnnnnnnnnnnnnnnnnnnnnnnnnnnnnnnnnnnnnnnnnnnnnnnnnnnnnnnnnnnnnnnnnnnnnnnnnnnnnnnnnnnnnnnnnnnnnnnnnnnnnnnnnnnnnnnnnnnnnnnnnnnnnnnnnnnnnnnnnnnnnnnnnnnnnnnnnnnnnnnnnnnnnnnnnnnnnnnnnnnnnnnnnnnnnnnnnnnnnnnnnnnnnnnnnnnnnnnnnnnnnnnnnnnnnnnnnnnnnnnnnnnnnnnnnnnnnnnnnnnnnnnnnnnnnnnnnnnnnnnnnnnnnnnnnnnnnnnnnnnnnnnnnnnnnnnnnnnnnnnnnnnnnnnnnnntcatcccattttacagatggagaagctgaagattagggaaacaaagtttagcatcccaagggtcagacagacttggcttgtgagcagaagcaggctggaatgcgaactcaggagtctacgcccttgctaggtctgtgttcccagacttctggaggtggaagtcagagtgttaaaagttcaaagcccaagcccagtgaggtcatcttattttaaaagtagtgaataatgagaacttcctacattgggctgggggtgatccagagataagagagtgtttgcctaggatatcagaggctttcattccaaccctgtcactgcataaacctggctgggtggttcatgcaacaacgtcagccctgggaggttggaagcaggaggatcagaaggtcaaggctaatctctgctacatagagagcttaagaccattctaggacatgtgagaccctatcaaaaaacaaaaccctggggctggtgagatggctcagtgggtaagagcacccgactgctcttgtgaaggtccagagttcaaatcccagcaaccacatggtggctcacaaccatccgtaacaagatctgacgccctcttctggagtgtctgaagatagctacagtgtacttacatataatgaataaataaaatctttaaaaaaaaaaaaaaaaacaaaaaaacaaaaaaccctgcacgatgatccgggcagcctagtttataaaaaagaactcagcggagagaaaggagaagggccacacaattcagcagaggtggcagccagcagtgatgacgccacactgacaaggagcttcctgggctatgggagagtcagaaggggactctaccttatctaggaaccaggagggcttcctgacaacagctgagctggaaataaaggggacaggtcattccatgcagaggggaacagcgagaattcagaataagcaggtagaagtcctgtggctgtgacatcagacgtgagagagacagtggcggagagagaattccaggcagagggagcggcgtgtgcaaaggcccaggatggggtaagggaaaggtgacccgagtgcccagagcaggaagggacttgaaaggttgctgggctttgatgagcaagacgaggtctggatagccttgagcactggtatagaggcccaaccacctttagcctccctagggaaaggagcagaggttggtgaggctacttccatcctttctgtgcagcaatggctcccaggacacatttgaagcgtgctacagtggcgcatccacaccgtctttccacggctcccactgcagcagtatcgaccacagcagctgggccttcgagcagctacaggattacatggtcacggtgagcgtgagtgggtggcagagctccgcagcaagcatggctcagagatcagggaaggaggtgtgaccaggagaggccagcttagagaagcctggactggtgtcagcctgcactgaatgtcttgggcacctctcctgcatcttgtctttcatctcttcagcaacctcaagagggaggctccctcctcaccccaagtacagagaaggaaagcaagggtcagagagataatgacctcctgccaccacagaggaggtcaccaaaggattgggactcaggaagctggacccatatcccatttgttttactgctgtgaacagacaccatgaccaaggcaactcttataaggacaacatttagttgaggctggcttacaggttcagaggttcagtccattatcatcaaagcaggagcatggcagcatccaggcaggcatggtgcaggaggagctgagagttctgcaccttcatctgaaggctgctagcagaatactgacttccaggtagctaggttgagggtcttaaggcccacacctacagtgacacacctactccaacaaggccataccttctaataatgccactccctgggctaagcttatacaaaccaccacaccattctgagatgcaaaggaccagatgttgccccctccagtaggcagtggaaggttttgcaggcaggctgggcctgacagaatgccagaaagaacctcagcatttttagcagaagtcaggtggtgttgcaatctggatctggtccccaaggggtatccttcactcccacagctgcggagtaagctgggtcctcctgagatccagcagtttgcattgctgctacgagactatcgcctggggctgcctatccaggactactgtgcaggtctgcagaaactctatggggaccgacggaagttccttctcattggtaagccccactcccccttggctccaggcattcccagctaggcaccacctgggagcactttgttttttgagcccctaaagcccaagactttgagaacctggacctgaggagagcaagaaagagtgcagaaaannnnnnnnnnnnnnnnnnnngaggagggggatggggaggagagggagagggaggagagggagagggcctatctcagcctcagaggggcaaagcaacttgtctggagtcacacagctagtgaagagggttgctaagcaccataggaatactactgacagcataggagcatgtgtctggtagttgtcgtgagccaagcatgatctcatagactctccccactcctgagaagtaaatattactatctcgtccccatttgcatgcgaagagactgagattcacagtagcaaagtaaagtaaagacgttaaagatccagaaagggacgtaagtaaatctaatgtttatggggctcagcatgggaagaaacttagtacacttgcatcaaatcaggcgcaaagacctgttgtacaggtgagaaaggtgaggcttgagtagttatttaactaaggttgtatagccgataaatgggagtatattcttaagactatattaagctagcaaacatgcagggagtcttgtgtcatctgctgttttgagaggtaaaaatcttgggtagggctggagacatggctcagcggttaagagcacagactactcctccaaagatcctgagttcaaatcccagcaaccacatggtggctcacaaccatccacaatgagatctgatgccctcttctgtggtgtctgaagacagctacagtgtacttacctataataaataaatctcaaaaaaaaaaaaaaatcttgggtaaagccacccctgcagagatgggatttgaactcagacttccagagaccgcactccgtagcaggctagctggatgctggagtcgccttgccctgtgtcctctaggaatgcggcccttcatcccagatcaggacatcggctacttcgagggcttcctggagagtatgggtatccgcgagggcggaatcctcaccgacagcttcggccgcatcaagcggagcatgagctccacgtctgcctctgccgtgcgcagttacgacggggcggcccagaggcccgaggtgcagaccttccaccagctgctggccgacatcactcatgacattgaggcgctggcccctgacgacgacgacgtctacgaggatgtctccccaagcgggggcgaccaggttgaagacaactacttgtagctccgcggcacacttgcccatacgacaccatccccagtgtgcctagactcctgggttcccatctgtgccttctgggcttctttccttgcaaatgggttcccttgcaaatggattcctagggcttcagtcctgcaataccgagaaaatcctgcagggggcgggatagtcagactctacagtgttcttcaagataaagaatcgctccacctactggcagacagaaaagatttccaattcacgcctcactttctgcaaacctgcccaaccccaaaccagaaacatttccagaacctagagacctctcttcaattttacaggctaagaaactgaagagactttggggggagttgtttgtttggttgtttttaagggaatggatttgagggaacaccaggttcttggatatcgatacccatttccacatctctacgataatttcagctccacccacctcacaggtggtcattggggtgaatggagggcaatagcttagtgttgggcctagcatgctgtaggtgctcaataaatgctgtttctctc

SEQ ID NO: 1331 - DNA, 2238 bp, Mus musculus
ggggggtctggagggggagaggagggtggcaggacaagaggagcagtttcaccatggaatatgaagccaagaaagggaagaagggctttgtgtcccccatccgaatactggtgttcccgaaggctgcacgccaggctgccttcagaagcagtgtcagtcgcaggcccctgcactctatgcctctttatccccctgactacctcatcgacccccacatcctgctgtgtgactacctggagaaagaggtcaagttcctgggtcacctcacctgggtgacttcctcactgaacccctccagccgagacgagctcctgcagcttctggacactgccaggcagctgaaggagttgcctctgaagaccacgccagagcaggacagcatcctgagcctgtccgcacgctgcctgctgctcacctggcgcgacaatgaggagctcatcctgcgcatcccgacgcacgagattgctgctgcctcctacctgcaggacgacgctctgcatctgctagtgcttaagactggtgcggcgcgggtctgggggtggaccctgtgcccgcgggcatggatggcagcccgggaggttcgggtcgcgatcccggccctccgggcgccgcgcccgagaaacgacgggtaggcacagccgagcgacgccacaccatctgcagcctggactggcgcgtggcgtggggcgggggcgcgggcgccgaggcccgggcggcgggaggcggtggcagcctggagcggcagcgcgcgggagcgagggcgtcgggcagctgggagcggcgacagacgttcagtggcagctgggagcgacggcacgcgggcggaggtgcgggcaagccgggtggcagctgggagcggcggcaggcgagtggcggcgtcggcggcagctgggagcgacgccacccgggccccaacccgctggatccccagaaccacagccccgacgcctactgcaacctggtcattctggctgtggcaaacagggatgccgctgaggaatcctgtgcgctcatctgtcaagtcttccagatcatctacggggaccagagcatcgagtgtgtagaccgggccggctaccactacagatccacaccaaagcggccatggctctccagctgcagtgcaatggctcccaggacacatttgaagcgtgctacagtggcgcatccacaccgtctttccacggctcccactgcagcagtatcgaccacagcagctgggccttcgagcagctacaggattacatggtcacgctgcggagtaagctgggtcctcctgagatccagcagtttgcattgctgctacgagactatcgcctggggctgcctatccaggactactgtgcaggtctgcagaaactctatggggaccgacggaagttccttctcattggaatgcggcccttcatcccagatcaggacatcggctacttcgagggcttcctggagagtatgggtatccgcgagggcggaatcctcaccgacagcttcggccgcatcaagcggagcatgagctccacgtctgcctctgccgtgcgcagttacgacggggcggcccagaggcccgaggtgcagaccttccaccagctgctggccgacatcactcatgacattgaggcgctggcccctgacgacgacgacgtctacgaggatgtctccccaagcgggggcgaccaggttgaagacaactacttgtagctccgcggcacacttgcccatacgacaccatccccagtgtgcctagactcctgggttcccatctgtgccttctgggcttctttccttgcaaatgggttcccttgcaaatggattcctagggcttcagtcctgcaataccgagaaaatcctgcagggggcgggatagtcagactctacagtgttcttcaagataaagaatcgctccacctactggcagacagaaaagatttccaattcacgcctcactttctgcaaacctgcccaaccccaaaccagaaacatttccagaacctagagacctctcttcaattttacaggctaagaaactgaagagactttggggggagttgtttgtttggttgtttttaagggaatggatttgagggaacaccaggttcttggatatcgatacccatttccacatctctacgataatttcagctccacccacctcacaggtggtcattggggtgaatggagggcaatagcttagtgttgggcctagcatgctgtaggtgctcaataaatgctgtttctctc

SEQ ID NO: 1332 - protein, 332 aa, Mus musculus
DWCGAGLGVDPVPAGMDGSPGGSGRDPGPPGAAPEKRRVGTAERRHTICSLDWRVAWGGGAGAEARAAGGGGSLERQRAGARASGSWERRQTFSGSWERRHAGGGAGKPGGSWERRQASGGVGGSWERRHPGPNPLDPQNHSPDAYCNLVILAVANRDAAEESCALICQVFQIIYGDQSIECVDRAGYHYRSTPKRPWLSSCSAMAPRTHLKRATVAHPHRLSTAPTAAVSTTAAGPSSSYRITWSRCGVSWVLLRSSSLHCCYETIAWGCLSRTTVQVCRNSMGTDGSSFSLECGPSSQIRTSATSRASWRVWVSARAESSPTASAASSGA

SEQ ID NO: 1333 - DNA, 41752 bp, Homo sapiens
gcccagagggtccctgagggttccttaagccacctgccctccacatccattagacaggagaaagtgagacccagagaggaccaaggactcaccaaaggccacacaggaagtcagtggcagttaggatttccctggggatgagaggtagttgggtgtgtcttaattttgccaggaacagaagagaacaggatgctttgggtaccaaatatggcaggccctgccctcagttacctctaaccccaggagaccagtgtccccatctccagggcagacttctgtctacctgttttcttagaactgacccccacgctgttgactgtgttccccaaacctctgcaggcaccacacacacccacatcacggcgcctcctggcactgatgtgccatgtgccttgtaactgtcaccccagctgaacagcacagacctccccactcccccacacagggctccccaatgagggagccttgcttgatcccctcctgtcatctgcctcattcttgtgtctcccccaaatctgccttacccccagccagctccctgctacacctgtgtcccacagaggcatgtcacccatgagagtcgggaaagacagagggcagggaaggtgaggcctggggaaagtccaggcctctggataagggctgagggagctgggaatatccagggaaggtctcgcttgcagtcaacaccctcctaagtactcgagttctgcaggttcttcccttggaattaatctggacctggagtccacagaagcctcagacaatagggagaaggttttctgggacgaaggctgcatgggatgcaaactcaaatgcctcgagataatgaaactaagagtaatggagacaatagggagtgttggggactctggcagacaggagagtgagtgtgtgccctgcctgtaggtactaaaattcaaatgtttgggaaactgctggccactcatatttggcccacgtgccaccagtttgagacttacggttcaaaatgttgagaaggttctggagtgtcctgccaagtggaaacccctcagcggaagtcagggacagaggctgtggctccctctgagactttgctagtccaaccctaaatccccatcacctggctatctgagaactgagcccactgccctctcagctgaaaagggaaatctggggggtccacagggtccctggtttgggaatcatctgataagggctacaggcccctccagtgcctcatggggttagaggctgctggagtcttctccagcttgggggcccctggttaggaggaatctacattgggttgcaggggagtccaggtgcaggatgtggactgaaagccaggacccaagagtcccattctgtgctggcccctgccacctttggcacctgtctccctcccagttcaagctgtggtggggcctgcagtagaggttggtagggggagctgtagtttctatattaaagtgctttgcagtgtctcaatggaagggaacaagtgggtgtcaagccgcatgggcagtagtagggttggggtttgagcccccttcccaaccatagaggcttctgagacctggggctggggaggaaaggagcttcaatgtgccattctggttggggagaggataggacatttctgggtccttggctgctgccggtagaggtatggggaggaaaaactctagagtgggagatgtggaagtggaaaaggaaggccctgtccaggcctggcctggtttctggagacagaaaactccccaggggacagagaggttacccccttgtgcttagcttctgccacccttcccttctctggaggagaaggctgccctctcctcagcaaccctggcctttattctatgcataaccactgcaagggcacccctggccaggctgaatgggtgggggtcccagggcacctgcaataatctcagaatggagggtatcctgggacaaagagggggtacagaaggtgccaggggggaaaaggtgattcctccatctctctctcacccaaatccccccagatcgaatctgacccttttccctggtctccattgtgctaaaccaccgaacttggaggagcctcatataaacatagcccccagccccactggctttccgaacccatcatgaaatagctggaaggtatctgaaccgttcccatagctccctcattattttcttccctgaggatcctgtggtttaggagatttttctcccaaaccagcctcatttcttgaagaagaattcattttcccatattaaattaactcaagctgagcttctgattgcagataaatgtttctaaggcctcaagtcaacttctagggcttgaaggtgggggaatatatgtattttattgagttgcttaatacaaaattctcaaaagcacttgtgggcactcattcctgccttcacaggccctcagggtctgggaccccacgttgggaatcaatggtttagacatccagcatcctattttactgaaggggcaagcccagagatgggagatggccagcccaaggtcacacagcaagttggtggcagggtgagaccagaacccggttcttttgagggtcccaccagaatatccccagccctgatcctcccctccatgcccctggaactctaggaatcactagccatgcctgaggggctaatctccctctgtcagcacaattccgagtgattcttcccctccctgtcgtctcttcctccctaacgggccctcacccctgtcctcttctgtttccttttcctggtcccacctcctggtatttactacatctgtgccatccctcatccccctgacccccattcaccctccgagcttcccccaggagggggagggggagggggccccgagctggggcctctttactgagactcttttgtacaccacaaactttttgtatatttttaattttgctgcgacatgagatattaaaagtcatttcagtacgtgctgcttgtgtcctattgttttggctgttctgggccaggggaaggagatgaggaaggagggataggtagggtaccacttgccacaatctctgtggctcaagagagaaaggcctttggctgggagagggtgggacattacacaacatctcctgtttattgggcagcatttcaatcaatcaaccagaatcctcaggccaaaagttctacagattatctccaaactcattttacagataaagtgggtggggggagataaagggtggggatacttgtcagagatcacagaatgagtctatgacaaaatcagggcccagactgaagttcctaactccactacagccaatacttattgagaacctactgggtgccaggcagttcttggcatagtgaacaagaaagatataaaacaggcaaggtccctgccctcaaggagcttacatcctatcctagggggtattgcctctaagagggcctctgtctccagggcttccatcctaatccagtggttctcaaacttcaaagtgcatgagaatcacttggagaagaggggatatgttttaaatgcatatttctgcctccataatcagggaataggtagaacatgcctggaaatctgcatttttaaagttcttcaggtgtgtttaaagaacatgcctgggaatcctgcattctggtgcaagcggatctgaggacctggaccttgcagatcttttcttttcttttttttttttttccagagacgagtctcactctgtcacctaggctagattgcagtgatgcaatcatagctcactgcagccttgtactcctgggctcaagcaatcctttcgcctaagcctccagagtagctgggactgcaggcacatgccaccatgcccagctaatttttaaaacattgttatagaaatgagggtctccctgtgttgcccaggctggtctcgaactcgtagtctcaagcaatcctccagccttggcctcccgaagtggtgggattacagatgtgagccactgcacccagccaaggaccactactttaatgtaccctccataaacctgatcatggcatttccttgctttagaacctcccatggttccccagtgccttcaggataaaggtcaaactcttctgccaaactctgacttttggaaactgggcctaaaaccatcttgagtctcatctctgacataacccacctggcccccatagcctctccataccacccattttcctgtttccataagactctcctgattgccatccaacaggctttctcggccatgctttcatgcaggtggagccccagtttttcaagggtccccctccaaagtgcccagggaatgtaaccctgacctggccccaggagacaaatcatgattgaccaaagacagtggtttccaaactgtggtctccagaatagtagcaccagggaacttgttataaatgcagattctcaggcctcagatctattaaatcagccaccatgtgaatggggcacagcaatctgtttgacaggccttctgggtgattctgatgcatgcctacatttgaggacaattggtctaagataattcccctgaccagggattgatgggggcaggggcatgtgacccaattctggtgaggtagggactgctaagtgtccaccagtatccatgttcctccttttctataaagagtttttagctaggcacatagccactcagaataaaagactacatttcccagcctcctttgcagctaggctcagctatgaaccaagttctggccaagaagaaatttgtgctacttacatcactttaaagagacagatcatgttctctgctttgttaaccctgctggctggactgcagctgggtggagagagccatcttgcagttgatagcagaaccactgcttggtggaacaaaataggagacttcaaggtccaggacccagggagctaccacacccacccttgactgttacctgaagaagagagaaactctcctgtttaggtccgttattcggtctttgacacagccaaatatgtcctggcaaatgcatctggcccctggcttcttaagggaaatcttttgaagattcccgggaaaggtttttctccatgaaagaaagacacacaagaaggggaaacccttggccttatctcgggatggtatcatgtgccgctcccaaggccactgcagccatcttgccaggttcgtgagtctgctcaggctgccataacaaaataccacagaccgggcagcttaaacaacagaaatttatttcctgacagttctggaggctggaagtccaagatcaaggcattggcagagttggttttgttacaggaaagggctccccatccagaccccgagagacggttcttgtatctcacgcgagaaggaattcagggcgggtccgtacagtacagggaaagcaagtttattaagaaagtagaggaataaaagaacggctactccatatgcagagcagcccaaaggctgctagttgcccatttttatggttatttcttgattatatgctaaacaaggggtggattattcatgcctcccccttttagaccatatagggtaacttcctgatgttgccatggcatttgtaaactgtcatggtgctggtgggagtgtagcagtgaggatgaccagaggtcagtctcatggccatcttggttttggtgggatttagccggcttctttactgcaactgttttatcagcaaggtctttatgacctgtatcttgtgctgacctctgtctcatcctgcgacttagaatgccttaactgtctggaaatgcagcccagtaggtctcagcctcattctacctagcttctattcaagatggagttgctctggttcaaacacttctgacagtttctcctgaggcctctctccatggcttgcagatggccgtcttcccactgtgttctcacatggcctttccctgtacacaagtgaccctgctgtctcggtgtgtccaaatttcctcttttctttcctttttttatttttattggagttggagtctcactctgtcactcagtctggagtgcagtggcgtgatcccagctcactgcaacctctgcctcccaggttcaagtgattctcctgcctcagcctcctgagtagctgggattacaggtgcgtgccaccacacccagctaattttgtatatttagtagagatggggtttcaccatgttagccaggctgatctcgaactccaacctcaggtgatctgcgtgccttggtctcccaaagtgctgagattacaggtgcaaatttcctcttcatataaggacaccagggagattggattaaggcccaccctaactgcctcattttaacttcatcacctctttaaagaccctatcttcatatactattacattctgaggtactgggggttagggcttcaacaaataaattggagcgacacaataacaccagcaaagtaaaaaatataaaggaatttgatgccagtgttgagctgctcaaataacctgaaaaccctcattattggacttgttttaagagagaataaatgttccttcttgtctaagccacctttggcggggttgtctgttccttgcaggcagaactctggcactgtgtttgctcaagctgttccctctgcccagagtaactttccttccattcacccttcaaggtttggcttgaatgccaccggcctggggaatggctcctgattctgcctttcccaaacaagtcgctggcctgataccagagttcttggcttgtgtgtctttgtctctaaccagatcatggtcagcatgtgcactgaccacctgctgctaatatccccactcctgcccatggcaggcattgataatcaatcccttcttcctgctgggagtagatccggtttttataatcctctacgcagccctccaggcagcccctgccaatcaactggaggtggttcaaaagagatgaatcctatctgccacaattgttaagtctttgagagcagggactttgttttgctcatctcttctttgattcacaagctaattttaataatatgttatcattgtgcacttctgttcccattcaatccctgcagcagccttccaaggcaggtactgccattatcctgcttttgacacgtgagggctctgaggcgctaagagatgaggtaatgtgttcaaggtcatatacatttgagcctatatccaccatctccaaccacttccgctgacatttactaagcacttcatctgttatggctctgcagggagcactgcagggaatacagagatagttttctaattttagtggcatgcaaaacacttattgtcctatttgagattcccagcagttcagtgatgtttggagctagtccaggaataatataagcttccattttatagacagggaaattgaggcccagagagaggaaaaggcttgcaaaagccagtcatggagatgccagagcaagagaccacatgtctcatgcccggctgctgctccaagggtgggaattctgggctggctcaaggggttaagttggagctttcacatccagagcagagtcaggaattggctagcacaccctggcctcttcctgttcgcctggcaggctgagtggagatctcacttcctgagctggggggtgacccggcaggatgcaggggagcaggagggagtggctgtgagagccagcactaagcaacctgggccatttcccctccaagggaggggaaggaagaggaagggctagtggctaggagtctcctgtagctctcacacccagaagcgcgttggggagctctgaccctcccttcagggcactgatcttgaacaccaggctttcagaaaaagcctttcagtagaatccagtgcattggtactttacagtttctaactgctcttccatccatggcctgtgtctttctggccacagctctgatgagcagagcagggctttgggaaattattattcccattggaaagataagaaagctgaccgatctcgtctgatctcggaagctaagcagggtcgggcctggttagtacttggatgggagataagaaagctgacgccaagagaggttacaatgagcaacctggaccaggtcatatacagcaaatcagttccagagcttaggtctccagaacccaggtgtcttggcaaggtgtggatgggccacacagaacctttccatctgtcctgggtggggcatgcagaatgcataggtcctagaggtaaggaacgctaggctcagatccagaccagccagaaatcccaggtcctcctcttactcactgtgtgacctccttgaaccaggctctgaacttcagcctcagtttcaaaaatctgtataataggtactatcatggtactcaacactgtgagtaagttaaaatatgtaaagtgttcagcacagagccacaaaggggaccttgcctccctaatatactcccaagagagcaaaacagctcaagaccctatgaacatggtcagaataaaaatggagtcactaatgttaagaaaaccttgacaaatagagctggggaaggccatagagggttttcatgcttgcataacaaataagactgataacaaaacagataacaacaagactgataacaaaaaagactacaaaaatcacaaccttgcacaaaggccattgaaaccttgcacaaaaaatacttccgcaaggacatctgcccagcaactgcctgtccaactttagactggcatcacccttgctattgatctttgcaatcaagaataattatttcagaaacaataatgtaatccttatttttttcctttaaaaatctttgtcttccccccacctccctgaaaatgcacatcgcttactatggcatatgggtaattcccactgcaatgcttaattcctaagtgaaacatcttttattttagagagcctctgtttgttctttaatttgacaaccactaagcaggtaaacagttaatgtttactgagcacttattttttttcagttttttttttttttttttttttttttgagatggagtctcagccagtcaccaaggctggagtgtaatggctggatctcagctcactgcaacctccaccacccaggttcaagcgcttctcctgcctcagcctccagagtagctgggattacaggcatgtgccaccgcacccggctgatttttgtatttttagtagagacaaggtttcaccatgttggcgaggctggtctcgaactcctcacctcaggtgatctgcctgcctcagcctctcaaagtgctgggattacaggtgtgagccaccacgcccagccttactgagtacttaatatgtgccagaagttcttctaggtgcatttaatccccgcaaggtcactatgaggttaaactagtattatgctcattttaaagacgggaaaactgaggcactggtggttaagggacttcccaaaggtcataaccctagtaagtgccaaagccaggattcgaattcaagcagcctatcttcaaagcccacgcatactgcctcccttaatagtaatgattaattttttaaaatcataacttgcttggctacaatactctctataaggcactttccatccaccttttcatttctcaccacagcagcctagggagggaggcagtgttgactcccaacttatagagaggagggggaaacaggctgtgacagggggaactgacttgccttgccaaggtcacacaacaaggtcagtggcagaagtagggctggaacttggaattttccaaaccaggacttcaaatgtggggggccctttcccagccttggccaattcccaagctcccccaataacccgccttctggctagaggccttgagcctccctcctcaggtcagctctgcctgggcttccacccttcagctgcagggtcccaaggctgtgtcctccacaccccctgccctccccatcagatgggaggggcaggaactccagggctggtggagtttccgaccaggcaggaaaaagaacaaaggaactggatgtgggggtggaagggatggccaggagggtggcaggagtagaggggacatttcaccatggaatatgaagtcaagaaagggaagaaggtaggtgggaggttgggagggacgaagggagaggaatgtccccaaagctggggaagggggcaaactggggcggggtggggggtcggtagcgaggggcataagtggagcctttcttctcatttggaagtaacttccttcccactcttggacagccagacagtcaggctctaaactccctgtttctccactctcagtggcctctggcatccctaacgtggacagacagggaccttctcaggaaacctggccagacggactcagtttgggagattctccacacctgcttccctggtgttccccgcagctccctcctgcagcctctcagacagacggacagacagacacccagcagatccattctcctgctcgtcactgccccaaacagaaggactcagccagggcaattccgataggatgttgcctacacaggcttgagtctcccacctgccccctgcccctcccacctttctacaagggcgtatgtaaggcgtcagccagaagccattcccctcaccccttctgactctgaagttttctagtatgcttctctgggtgtctcacctggttgtctttggagttcagggaggcgctctgattttaacttccatcttacccccatttccaccctcccctctaccccacccccaccagaaacatatgtccgggctgttctaaaaggtgcccacatgaatcacagagggctcagaagggagccaagacatacgtgcatgttttctcttagtttgttcttttaatagacatttattgagtgcctattatgcaccaggtatttctttttttaaagcaataaataagttaatgtaaaattgcatagaagggccgggtgcagtggctcacacctgtaattctagcactttgggaggccgaggcgggtggatcacctgaggtcaggggttcgagaccagccaggccaacatggcgaaaccctgtctctactaaaaatacaaaaattaactgggcatggtggcacatgcctgtaatcccagctactaaggaggctgaagcttgaacctaggaggcagaggttgcagtgagccaagatcgcgccactgcactccagcctgggtgacagagtgagactctgtctaaaataaataaataaatacataaataaaaattttttaaaaatcataggaggtcccatactcagtgctggaggaaactgatcagtttgagtcgagaactgacgggtggaaggaaagtgggtagggaagagtgtttgaggcagaggaacagcatgtgcaaaaccccacagtgggaagtcacatagcaagccagagggactgaaggaggactgtgtagtgggggcccaggggacaagaatgaggcagatggggctggacaggtgggcagagctgagccattcagggccaccaacaaaaatacttacccctccccacccctaatacacacacatacgcaagacaaagtcccagctccatagccggcattcaagatatgttcgtctcataatctagccacggcagactgactgcacacagcttctccaggctcaccctcatccagcctttgaggcatccagaattttgcacatgctgtgccctctgcttggcatgctttctcccagatagtttcttctcattccttaaagttgctacataccccatcctggctccatgatatgggttctaacataagctgagtacccataagaatcacctgagggctcattaaaacacagatcactgggtcttacccccagtttctgggccaataggcctgggatggggttcaagaaattgcatttctggccaggcacagtgactcacgcctgtaatcgcaacactttgggaggctgaggcaggaggattgcatgagcctaggagttcaagaccagactgggcaacatagtaagaccccatctctttaaaaaatatatattagctaggtgtggtggtggtgcatgcctgtggtcctagctactgtgaggcagaggtgggaggatcgctgagtcagaaagaatttgcaattctaataacccacaggttatgctgatggctgtggggccacactttgagaaccaccggtttagatcctggctactcaaagcgtggtgcacagaccagtagtatcagcaccagatgggagcttggtagaaatgcacagtctcaagctccaacccaactgtactgaatcaaaactccagggcagataaagttggaaactcactagtctaggtcatttatcacaagccctggaggcaaggataggatccaggtctccactgaatcctcagcacccagcagagtccagccatacaggtgtaaatgtttactgaatgaatgagtaaatgaacagatgtatttgtggacttgtgttctgtttacctggaaagaacgtgagctccttgcaggcagggaggttgtcttactcacatttgccttgttacacagttaagtaatcacaccacacattcactcagtggttttcagctgagctgccttttgaaattacctaagaaggcttaaaaaaatcttaatggaccgagctcattaaccccaatggctcacacctgtaatcccagcactttgggaggccaaggcaggagaatcatttgagctcaggagttcaagccagcccaggcaacgcagtgagacctcatctctactaaaaatttaaaaaattagcagggcatggtagcacacacctgtagtcccaattacttggaaggctgaggcagagggatcgcttgaacctaagagatcaaggctgcagtgagctatgattgtgccactgcacttcaatctgggcaacagagcaacatcctatctcaaaaaaattaaaaaataaaaaattttatgcctgggtctcagtcccagaatttcttattcagttggttgggagtgtaacctgaacatctgaagttttaaaagctccccccgtagttcgtgtgtgtgtggagtgggggggtgggggttgtttgttttgttccttcgacaaggtcttactctgtcacccaggctggagtacggtgttgcaatcgcagctcacagcagcctcgacctcccaggctcaggtgatcctcccaccttggcctcccaagtagctgggattacaggtacataccaccacacccggctaattttttttttttggcatattttttgtagagacagtttcaccatgttgtcaaggctggtctcaaactcctgggctccagctctcctcctgcctcagcctcccaaagtgctaggattacaggcgtaaaccaccacgcctggccttccccaggtagtactaaaggatagccagggctgggagcgactgctctaaatgcagtctcacacttgagcatgtatcagaagcacctggtgggcttgttaagccctaattgctgggccctactcccagagtttctaatttagtgggtctgggatggggcctgataatctgcatttctctcagttcctaggtggtgctgctggtccaggaatctcatgttgagaaatgctgttctagatggaactcaaactttcttttgagattcagatggctggtctgggctgagccccagaatttacacctttaaccttgatccaggccatttttatgcaggtgcctctggattctacttaaatgtacttattaataatttataacttttaggaaagcacagagaatagcctaagaaatagctatgcacccaccaccactccaccacattgaatcctaatctatattatatatatttatgtatatgatttatatatatgtgtgtacatatatatatatatattttttttttttttttgagacagagtcttgttctgttgcccaggctggagtgcaatggctccatcttggctcactgcaacctctgcctctgcctcctgggttcaagtgattctcctgactcagcctcccgagtagctgggattacaggctcctggcacaacgcctgacaaatttttgtaattttagtagagtcagggtttcaccatgttggccaggctagtctccaactcctgacctcaagtgatccacccgccttggcctcccaaagtgctgggattacaggtatgagccaccacgcctggccttgaatcctaacatttttctgtatttgccccagcctagactcattcctcaaacctgtttggcaggagctacactgtcacctgggtgtttagaaagaaggtcgttggatccagaatgcccaaggtgaactactggttccaccactactagctggtgactttatcagttagttcctctctagggtttactttctccatctgtaaaatgggacttacagaggtaccccttctgcagagttttggtgagaattaaattaggtaatgtaagtaaaagtgagcatagtaagagttcaataaaagcagccactgttatcactctcattcctcctctcctccccagggctttgtatcccccatccgaaggctggtgttccccaaggccgggcgccgggcagcctgtaggagcagcgtgagccgccggcccctgcactcgatgcccctttatccccccgactacctcatcgacccccagattctgctgtgtgactacctggagaaagaggtcaaggtgcgtgcaggatgagaaggggtgggaaaaccttggggtgaggagaccttcacttctccttgacaccaagttctgatcagccgtatctcacacaggggaagttgtggctcattggaaagaggcctgggttcatgtcagccttgcccccaccttcagcaagtgacctccatctgctgagcctcctcagtgttcccatctcaacatgaggctcaaaacctacccccagtggagagtggatgggagagtgttctgtgcgtggaaaagtcctatcttttgtcaactgacataacagaaagggagactcactaaaagaaaatgatgtttactcaggaataggcattgcaatgggaatatgcgtgccatagtaaactgtgtattcaggaggtaaaggaaggcaaaggtttttaaaggaaaagtgaggaggattacataattgttttgagataattatacctggctgcaaggatcaataacaaggatggcaccatttccaagttggatgagcagttgctgtccttgcaggaatatgtgtgtgtgtgtaaggttgtgatggcctttgtgcaaagttgtagtttttacagtctttttgatagttcttgttatcaggcgttcatgcatgagaatcctccctcctatttgtcagggcttttaacacaagtgactccattctgattgacaactttgacatttcccatgagattttactgcagtgaccttgctgttactcggacagcgtccagattaacagcaaaacacaaaggacttccaccacttaggagctgtacttctttttttttttttttgagacagagtctcattctgtctcccaggctggagtgcagtggcacgatcttggctcactgtaacctccgcctcccgggctcaaacaattctcctgcctcagcctccttaatagctgggactaccggcacgcaccaccacacgcagctaatttttttgtatttttaatggagctggggtttcactatgttggtcaggctggtctcaaacccctgacctcaggtgatccgcccaccttggcctcccaaagtgctgggattacaggtgtgagccaccacacctggcatgaacaccatgaagaggaaatgatggatcttcatttagcctaaaaagattgatatgggggtagggttgtctgaactggcaaacaataagccacctagtaaaatctgaatttcagataagcaatgaatactttcttagcataattatgtcccaaatattgcaagggactaaaaatactaaacaacttaaaaattattgttgatcaacggccaggcacggtggctcacacctgtaatcccagcactttaggaggccgaggcgggtgaatcacgagatcaggagttcaagaccagcctggccatcttttagtagagatggtgaaacccgtctctactaaaaatacaaaaaattagctgggtgtggtggtgggtgcctgtaatcccagctactggggaggctgaggcaggacaatcgcttgaacctgggaggcagaggctgcggtgagccgagctcacactgctgcactccagcccgggcgacagtgcgagactccagcccccccacgcccgccaaaaattgttgttttcaagttcaaatttaactggcatcctatattttatctggcaaccctatatggagggaaaaactaacaaataaatctgcttaaaaattgagggctgaaatttgataaagaataaaaagaagagaaaatgtttgattggtggattcacctagaggaatagaactaaaaataattttttaaaagttggccaggcatggtggctcacacctgtaatcccagcactttgggaggctgaggcaggctgattacttgaggtcaggagtttgagggcagcctggccaacatggtgaaaccccgtctctactaaaaatacaaaaattagctggacgtggtggcacgtgcctgtaatcccagctactcaggaggctgaggcaggagaatcgcttgaacccgggaggcagagcttgcagtgagctgatatcttgccattgaaccccagcctgagtgacactgagactatctcaaaaaaaagttaactattatattgagtaacatttaagtgctaacattaggatataagagtaaaggaaaaatttgttgatttagtgcatcatttttcctgacaaaatggtatactaatttgatccaacattcttccctttccatttgacttctgcaacaagaccataaggaaggcaagtgatttgcaattcctttgacaatgatgcttggggtagagagagccactcaggccagaggaaatttacaggtggtcagttctttcaagctgttataataacttttgcttccctatggaatcttatagctagatgactatgtgttaaggcaatataagccagcagttgagagtgtgggctctggcatgtggatcccagtttgatcctctctagctatctaatcctgggcaagttctttagttagccacaccctgccttggtttttctcatccttaaagcaagggtgaatgagtgaatatatagagagcgctcagaactttgcctagcttctattaagggctcagtaaaagttattatcaggtatattaattcatgtatttctatctcaatctatccgcactgcatcaatgagaaggccagggttcttcaaggtttcagggtgacatctctgtgtccttctctcaccccgatttccatccagttcctgggccaccttacctgggtgacttcctcactgaacccctccagtcgggacgagctcctgcagctgctagacaccgccagggtgagactctggggagggaggagggcaggatctcgctcccttctccctcttctacctgcggacctcgggaactcgagatctgcccctccctgcagcagctgaaggagctgccgctgaagaccacggcggagcaggacagcatcctgagcctgtctgcccgctgcctgctgctcacctggcgcgacaatgaagagctcattctgcgaatccctacgcacgagatcgccgccgcctcctacctgcaggacgacgcgctgcacctgctagtgctcaagaccggtgcggcgggagggggcgggggcgggggaggggcgggggcgggggcgggggaggggcgggggcgggggcggggcaggggcaggggcaggggccggaggtgtgcggatggagaaggagagggacctgcggcgggggcagaggagatggaaaaggtctgaccatactaccctgagactaggggcaggccgaagaggctctgggaaagcagacagggcctgaggttgaggatgaaggtgggtggcctgagccactacactgaggccaggtggtggagcactaagagggtggagaagcccaagacctaggccagggctggatccgcagttaccacccggctctgaggctagagtggacccttgggctgggggcggggcctgattccaggggcggggctgaggagaggcgggaagtcagaatccaagggggcggtccctgaaacccgggactgggtccccagttaaggctcccttgggaggggacagcctgaccaccaccctctgttcagagggcaggtctgaggccaggggcgcaggcgtcgtggggagcgtggaagccacctggccagaccaccgagaggccaggggtggagactgaggccgggggcgggcccgaaagtgtggaagcggagtgggcggggaaccgccgcgctactttaaagccgggggcgaggcggcggtggaaccccagagccgcgaggtcaggtggccagccggcctcggcggggcgggggggtctctgagtcccgatccccgcggctgacggtcccccggactctcctaggtctgggtgtggacccggtgccggccggcgtggatgccagcccaggcggcgcaggacgcgaccccggcccgccaggcggggcgcccgagaagcggcgggtgggcaccgcggagcggcgccacaccatctgcagcctggactggcggatggggtggggtgggggcgccgcggaggcccgggccgggggaggcggcggcggcagcttggagcgccagcgcgccggggcgcgggcgtcgggcagctgggagcgacggcagacgttcagcggcagctgggagcggcggcacggaggcggcggcggcggcggcggcgcgggaaagccgggcggtagctgggagcggaggcaggcgggcagcggcgggggaggcagctgggagcggcgccaccccggccccaacccgctcgacccgcaggaccccagccccgacgcctactgcaacctggtcatcctggctgtagccaacagggtgagcccgagggcagcctgctcccaaagcccggcttcgggaacgctgcttccccgcccccaccttgcccccgccccacccaccaggttcctaggatctgcccctgccttctccctgcacctgccccacctaatggctcctaaactccggacctggacacctccagggcatctccccttgactccctcaatgggatgaactctcaaaatggccaaaacaaactagatctaacctccagcccgttccttctccaacgttgtcagtgttggccccaccacagtaacattcacgaggacactaatcaccagcgtgaatctagggccagctcatgccagacacagggctgcatcaactcatttaattctcacagcaacctctggaggcaaatattacaactactgtattcccattctatagaaaaggaaaccgagatccataggtgaagtaacataggcaaggtcacacaggaagcacgtggtggttttaagattcaaatccagtaagttcagagccagtactcttggtaactaagatggccacccaagagagaagccttcctgccattcttccttccccctccgtcttcccctctgcctcccccatcctcttcattcacccttgcttttattcacccgaccatgtttcttgagtgccagctctgggctaggcaatgggctaggtgctatggatacagacgtgaaaaagacatctggtgtccacccttagggagctcacaggcgagcagacaccttcaagttctgagcattctaagcttttcctctgatcttggaccaccagatccctccgtataaaaacagtggtgaatgaaacagacatagttcctgtctagatggtgaggcagataataaccagtaaactcagacaccacagctgtctctctccccttgaaacacttcctcacttggcttccagctctccaccttttccaggcttttctcctaccaagctggttcctcctcttcttcagaagttggagtgccccagactttgtccttgatcttcttctctcctccatctatccttcatctacccatttctaggtgatctgcatctgaagatctaacgactgtttcaaacccaacacatccaaaactgagctccaacctcctcccccaaaacctgccactcccttggtttccctgtcacaattaatagcagctgtgtccttacattggtcaggccaaaaccttgctgtgggccttggctggctctcacgctctctctttctcacacacaccccatatccactctgtcaataaatcctgttggctcttatttttaaaacataaccaagcctgtaatcccagcactttgggaggctgaggcgggtggatcacctgagttgaggagttaagaccagcctggccaacatggtgaaacccgtctctacgaaaaatacaaaaattagccaggcatagcggcgggtgcctgtaatctcagctacttgggaggctgaagcacgagaatcccttgaacccaggaggtagaccgcaccactgcactccagcctgagcaatagagcaagactccgtctcaaaacaaaacaaaaaaacatcaaaatccatttacttctccccaccctccccctgtacccacccaggtccatgccccattttctctcacctgaatcatgtggtcatcctctgactggttcagcccttgctgacagtctctttccccacacagtcagagtggtcccgttaacatgaaagccacatcatgtcactactccacatcttccagtggcttcccatttcactccaagtaaaagctaacatccttacaattgcttacaaggccatttgtactccagccaccatgcccacttcctctgtggctggaaataggattccagacaaagctaacagtcatcccactggactgtgagggctttgcggtactgaacctggcccagtgtcggccacataataggactaagttggaatttgtggagtgagtaaataagtgtaatcccaacactttgggaggctgaggcagggagatcactagagcccaggagttccagaccagcctgggcaacatggcaaaacaccgtctctactaaaaatacaaaaaattatctgggcgtggtggtgtgtgcctgtcatgcagctactcaggaggctgaggtgggaggatcacctgagctcaggaggttgaggctgcagtgagccatgattgtgccactgggcgaccggagtgtgactctatctcaaaaaaaaaaagttgctttccagggttgtctgagcatctggcttcttatctgagtcatcctggtcctaagaaggatataggagttagagtaaaaaacaacctgggtgctggtactaatgccatgaacctgctgtgtgagcctaggcaaggcacttaaccactctaagtctcagcatctttgtctgtccattttgtaggtctatggtaaggatcacctggtttaattattaggacacacctactatccccaaatgcctatcctgggttacgttttaatttattctttgggcttttttatttttattttttgtatccaaccatccattgtcttgggcctttttacagacacaacatagagaaaaggttcatgaagacagtgtcttcatcaattactggttttctgtgtgtcttgcttaaggcataaagaggtaaattcaagaactaaatacctattcacatttgtagtctcaaaaaagttttacccaagaacttaaactccttccttctatcagagattgaattttatttatcctgtttccattttcacactgaatgctaggaagctcatatctaaatatggcttccagtattagtaactatattgagcctaaaattttgatacatttaatcatcccttctcctactaggtgttaggagaactggattctaatcctgactaatcacttcccctcactgggcctccgtttccatatctatacattaaactaaattaggacttatcttagaagggcatcaggaaggctgatgaatcctccacaaatctggggtacatttttcatggcacaagagttagagttgtcactgaattctataaaggggttctaagatccagagagtagccatcgaattttgatggaaaaattcttgaaagccaatttaaagggctctataggtgtgtatctttgtgcgcatcttcacacactgttttaggaagcagggtaacatcttggtcattggtgaggacctgagctctctctcctcctccctgggccaggacgctgcagaggagtcctgcgcactcatctgtcaggtcttccagatcatctacggggaccagagtattgagtgtgtggaccgggctggctaccactacacatccacacctgaacggccatggctctgcagccgcagtgagtaccagaactcctggcctcccctcctgtgaaacatcccaaaaaggccaggggagggaagatgtcccaggacttgggctgatgaaggtatttagggctcctgatctctgccataattacagtgtaccccacaattgtaggtgaaatgtcaattttctttttctttttcttttcttttttcttttttgagacagagtctccctctgttccccaggctggagtacagtgatgccatctcggctcactgcaacctccacctcctgggttcaagcaattctctgcctcagtctcccgagtagctgggattacaggcatgtgccaccacacccagctaattttttttttgtatttttattagagacggggtttcaccgtcttgaccaggctggtcttgaactcctgacctcatgatccacccgcctcagcctcccaaagtgccgggattacaggcgtgagccactgcacccagccatcagttttcatgatgatctcaaacttagcttcttcaaagatgtttggattgtcaaattcagaacaagccccctagagctgaactcttctctctcccttttgtttttgtgtccctatattgcagcaacctaagcacatgtattgtctgcttactgagccattggtcccactaggaccctaacacaaaaccaagatttccagatgggtgcttggatgcactcaaggactagaaggagaatgagactaatagagacatttgttgagcaccagttgtgtgccaagcaccgtaccaatgtgccatgtcctcatagcaaccttgcctgtcctctttgtcactgtatcccctgtgcctagcacgagactgggtacatcagatactcatgaagtatttttctgaatggatgaaagaactctctgaggccttaggattcccattttttcgtttggttggtttttgttgttgttgttgtttgtttgtttgagacggagtctcactctgtcgcctgagctggagtgcagtggcacgatctcggctcattgcaacctctgcctcccggttcaagtgattctcctgcttcagcctcctgagtagctgggactacaggcatgcgccactacgcccagctaatttttgtatttttagtagagacggggtttcaccatgttagttggccagtgtggtcttgatctcttgacctcgtgatctgcctgcctcagcctcccaaagtgctgggattacaggtatgagccaccgcgcctggccacgattccagttttacagatgaggacattaaggctcagattagtcaataaattactcaaggtcacacagctggtaagtggcagagtcaggattcaaatccaggtctgtctgattctgaagcttctatcagcaacaaccttattccccatgctgccttcaggccagtgggtgaattccccagccattgtctcccacagcatggtaccagcagcagagtgctcgttcttttcttcagaagaccctcgcatctgtgggagctgtgcttgttgggaggctgggttagttcaactctcacaaggatgataggcaaataaatgagataattcaacaaatatttcaacaaattcattcatttagcaaatatttattgagcacctagtgggtcagatccagtgctaatcagtaggttattctggtgagcaaaaccagaggtggcctgtcttcatgaagtttacttagtggaggcaggctgacagtgattaaataagtacacaaataaatacacaaccacaggttgggcacagtggctcacacctgtaatcccagcactttgggaggccaaggcaggtggatcacctgaggtcaggagttcgagactagcctggccaacatggtgaaaacccatctctactaaaaatacaaaaattagctgggcatggtagcaggcacctgtaatcccaactactcgggaggctgaggcaggagaatcactcgaacctgggaggtggaggttgtagtgagcagagatcacaccactgcactccagcctgggcgacaacagcgaaactctgcctcaaaataaataaataaccacagactgtgctgggagaatgtataatgaggaactggccccacctggagggtaaggaagcaacactgatcagagatcagaaatggtagggctaataaccagctaaatgagacaacaggactaggaagagcgcaagctctccgtacttggtgtttctttgctctgaaggttttcagatccttccccttcacaagtttcttcctctctttcttcttctttctttctttctttctttctttctctctttcttttcttttcttttccttccccttcccctttctttctttcttttcttttccttccccttcccctttctttctttctttcctttcttttttcctttcctttcctctttttctttctttcttttttcctttcctttcctttcctctttctttctttctttttcttttcttttctttttcttttcttttatttattttttttcagggtctggctctgtcacccagcctggactgtagtggtacaatcacggctctctgcagcctcgacctcccaggcccaagcagtccttctatgtcagcctctcaagtagccgggaccacaggcatgcaccaccgcacccagctaatttttttgttattgtagaaataaggtcgctctatgttgtccaggctggtcttgaagcctgggctcaagcagtcctcctgccttggcctcccaaagtgctgggattacaggcgtgagccacaaatttttttttctttttttttgtcttgcctgaaacacacagtttacaaaatattccctcacatgtttcctcatctgctgttcccaaggctcctatgaggtaggtggggggtggtattgtccccacatcggggaagttgaggatcaggagaggggaggggagttccccagggtctgttgtgtgttggtgtcagaggcaggactagacttcaggctgagactgagggtggggcctcagggagcaggggatgctgatccctgctttgctgcctctgacagtccctctgtctgctggtcccaggtgagagctgccacacagatgggacgtatgcctatgatgccgacttcagctgctgcagctccttgtgagtacagcccctgtcagggactccaccctgctcccctacccctgcacaaacagggtgactagagagggtaggagaaggtgacccaaccttgatgtgtgctgagacactgggcactaagagggggaggtaaactgagctccctgactctggaaacccacaggatccagacccttgagagacccaggagacaccagaactcagatgtgggtccacacagtcctgtggttctctcccagtcatccaggcacagtggtctgcagaaaccaaaatcatagctacatgccaaaaaaattatcttggcttaattttggttccatgtaatagaaaatccccaaaaagagtatcttaagcaagatagaacttttttttcttatatttgacataaaatagagcagcaattcaacatttcatggttgttaggagctcaggcttctcttttccttccctaccctcttcaggacttgcagccatcctcaaggtcacctcatggaccgagatggtggttgtagctccagccatcacagtagcatgctaaggggcctctttaaagagttttgccagattcccacctgatgacttctgcttatatctcataggccagaacttggtcacatagccatcactagctgcaagcaaagctggaaaatttaggattaaaaaaatatatttcaggctagatgcggtggctcgcacctgtaatcccaacagtttgggaggctgaggcaggtggatcgcttgagcctgggagttccaaaccatcctgggcaacatggcgaaaccccatctccaccaaaaatacaaaaattagccaggtatggtggcgcacacctgtggtcccagctacttgggaggctgaggcaggagaatggcgtgaacccaggaggcggagcttacagtgagctgagattgcgccactgcactccagcctgggcgacagagcgagactctatctcaaaaaaaaaaaaaaagaaaaattcaggccagtcatggtggctcacgcctgtaatcccaacactttgggagggcaacgcaggaggatcacttgagcccacaagtttgagaccagtctgggcaacatagggagaccctgtctctattgaaataaataaataaacaaataaataaataaaattttaaacaattcagttgggaacattacccagggttctgtttagggtgaccagccatcccagtttgctcaggaatgaggggttcccccggatatgggattttcagtgctaaaaccaagaaagtcctgggttactggttgatcacctagttatattactaagggcttcagtttggcatgtagcagtctctgccagtgatatatgtcttattgtttctttcctttttagtggcaatagatttgccttcctcatactgtatgcccttaggctagtctttaaacaaccagatatctactgaagagataaaatagtgataatagcgtttgaacattgaacttgctatgtactaagtgctgttctataaagcactttattttttcatcaacatagtaacattacagcagctactgtttattgcttatagcccataattctaagtgttctacaaatattaactcctctaattctcatgatgacactaattattattatcccattatacagatggaaaaattgagaaatagagaaattaagtttagttttcccaaggtcaagcacctagtaagttgtaagtatgggatttgaacagaagaaggctggctccagaatccagtcctttaaccacaaagctacacggcttctttgtaggtaataatggaggatggttctggaacaatttagagacaaggaggcaggagcctaaggttgagtttttattaagcaatatttcttgagtacctcctatgtgccaggcactctgctgtgtgctggggatacagatggacacaagacagagggcaaaacctgggcctggcacatagtaggtgttcaacaaatgaagaaaaccaaagtccctgctcttgtcaagtttacagtctaggataggaggcaatgaaatcgcaatttaacagtaacaatcattaatggtaataagtactaaagggaggctcagggtgctataagagaggcagagggggaccgcaactcagctggagagtcaggagggcctctcagaggtgatggcacatgaactgaggcttggaggatgaaagggggaagagtgttccaggtagagggaacagcaaatgtaagaatcctgaactaaccaggcgtggtggctcacgcctgtaatcccagcattttgggaggctgaggtgggcagattgcttgaggtgaggcatttgagagcagcctggacaaacatggtgaaaccctgtctctactaaaaatacaaaaattggctgggtggcacatgcttgtagtcccagctactcaggaggctgaggcatgaaaattgcttgaacccgggaggcggaggctgcagtgagccaagaccgcaccactgcactccagcctcagtgacagagcaagaatctgtctcaaaaaaaaaaaaaaaaaattttgaacaggatagagcttagtgggtttgaggggcagcaggtggccactgtggctgtggcaaatggtgtgagggagagagtggtcagagaggatgcttgggggtacctggaaaggccatgcatgtcacaggtaggccatggactgagggagcatgttcgacagaggttctaacccaacctaggggaattagggaacactctcctgaggagatgacatttaagatcacgggatgagtaagagttagctgtgcaaaagggaggggaaaggaggcaatccaggcagagggaccagcaggtgcaaacacccagaggtgaggagatagtagaggaagaaggagaaggggggtggggggcgcgaagcacaaagagcaaaggcaaaggcaagcacagtgacagatgagacttgagaggtgccaggggccagggtatgcgaggccttggaggccagcatgcagtctaggatgaggcctcctaccttcagcctgcctgagggccaggagctggagggaggcgagtgaaggcccttcttcccgtgcctgcagtaatggctcccaggacacctttgaagcatgttacagcggcacgtccacaccttctttccatggctcccactgcagcggcagcgaccacagcagtctgggcttggagcagttacaggattacatggtcacggtgagctggggccggtggtgggaatggcacaagcaaaagcctggaggctggagtaaacattttgggaatggcacattgccctggacataacctaagcagaagacatcagaggtcagagcaggaaatgaggttaggagagtaaactgaggccagcttgtgaaaggccttaactaatgtcagctggcattaattgagtgcctgctgtataccaggcaccattctaagcacctttcatgcattatttcttttaatcttttcaacaaccccaagaagaaaataccatcattatcctcactttgcagatgagaaaagcaagcatcatggaggttgtcacctacccaagatcacagagctgatccagtgaaggggtcaagatttgcactcaggcagcttgagtccacatcctattcttaaatgcagcctaagggatctagatgtcctctgaatagcccatgggaaggttttcagaggagagctggaccaaacatgcccttagggaaggctctgggcctttcaggcaggggttgggtggcgctgcttcctgggattgatctcgaatggtgtcccccacatagttgcggagtaagctggggcccctcgagatccagcagtttgcgatgctgctgcgggagtaccggctggggctgcccatccaggactattgcacaggcctgctgaagctctacggagaccggcgcaagttcctcctccttggtgagcccccgctgtacccccagaggtcagctagggcccctgcttggtccatgccatcccagtcaggcaccaggctgcaaatgttttctccttatctttcagcctctgatgaaacccagatcatgagattcacagggcagatgaggagcccaaagtgcagagtagggaaaggacttgtcagagctgggagacactgttgataagaagaactaagcagtggtgtggccatttcatcctcacagcaaagctgcgagagggactgattcttcccatcttaccccacacggaagctgaggctcagaaaggctaaggaacatgtccaaggtcacacagctagtaaggagggctaataataacaggaggaataatacgaataagctgacatgtgcttggcagttaccctgtgccaagcatcatctcattaaatgcccccagttctgagaagtagatactattaatggtccccattttgcaggtgaggaaactgagactcagagttacaaagtaaaggactgaggtcacatagctagtaagtaggaatggaaataaaacaaactgtttacagagtgctcagtatgtgctgagtaccttgttatttaatcctcacatccctacccagagaacaggtgcaattatctgttttacaggtgaggaaaatgaggttcaacataattaatcaatgggaatataatgatggtactaataataacaaaaataggcctggcgaggtggctcacacctgtaatcccagcactttgggaggctgaagctggcggatcacctgaggtcaggagttcaagaccagcctggccaacatgaaaccctgtctctactaaaaatacaaaaattagcagggcgtggtggtgtgcgcctgtaatcccagctacttgggaggctgaggcatgagaatctcttgaacccgggaggcagaggctataataataataataaaagtacagtaatctagtatgtagtgagcattcactgtgtgctgagcgctgtgtcgttattcgctggctcagacagttaaggaccttgggcaaggccacacagccagtgagtgacagcagggatttgcacccagatctgcagagaggacgcttcccctgtggaagggaaagggaacgtgtcctggggactcaccatgcccctcggctcgcagggatgcggcccttcatcccggaccaggacatcggctacttcgagggcttcctggagggcgtgggcatccgcgagggcggcatcctcactgacagcttcggccgcatcaagcgcagcatgagctccacgtcggcctccgcagtgcgcagctacgatggcgcggcgcagcggcccgaggcacaggccttccaccggctgctggctgacatcacgcacgacatcgaggcgctggcccccgatgacgacgacgacgacgaggatgagccccggggctccaggggcgggagcgacgccgcagaagacaactacctgtagccaccgcccctgcggacggcgtggctcagcagcccacctctgagtctcagctttgcttcggggaccctatccccagggcccccccatcacacctggcggggccggggggtcttcactccagggtctcgctccctgcccttggggcccggggccatgcagtacctggagtgtcctgcagggggaaagcgaagccgggccctgaagtccggggcagtcacccggggctcctgggccgctctgccgggctggggctgagcagcgatcctgctttgtcccagaagtccagagggatcagccccagaacacaccctcctccccgggacgccgcagctttctggaggctgaggaaggcatgaagagtgggctccacctgctggccgactgagaaaagaatttccagaactcggtcctattttacagattgagaaactatggttcaagaagagaggacggggcttgagggaatctcctgattctccttatatgacctcaaactgaccatactaaacagtgtagaaggtctttttaaggctctaaatgtcagggtctcccatcccctgatgcctgacttgtacagtcagtgtggagtagacggtttcctccacccagggttgactcagggggatgatctgggtcccattctggtcttaagaccccaaacaagggttttttcagctccaggatctggagcctctatctggttagtgtcgtaacctctgtgtgcctcccgttaccccatctgtccagtgagctcagcccccatccacctaacagggtggccacagggattactgagggttaagaccttagaactgggtctagcacccgataagagctcaataaatgttgttcctttccacatcaaacattttatgactcagtttacctttcttgccttgtaataagcaaaagatgtctgggtgcatcctaccccaactgaagtggtggtgagctattcagaagatcctcaggggagttcactgtttgggaagaagaaacagtacttgttcccttgcagccttgttacagcctagctctgtgctcaagtcacaaacaagaaatagccaagactccacaggcagctatctgggagtctggggtagtcaaagaaatgggaaggaaaggttggagaggtagagaagtcaggataaggacagcattcagcacagcctgagtaaaggctggaaagctaaaagggatgaggcctgagaggaggccagagactcacataggagatccaaaatgtgtttgtaaaaccttgcaaaggcttccatggccagacacattgtacacaccataaaataggcactgttagcaattttcaaaaaaatgttattaggactccaggtccaaagagttccataattcatacttggtttgtggtaaatgatcatcccatcatcactggtccatgtagggcccttctgatgttttattttaccctctcctgatccacatgttccccacactccttttccctctttactatgagcgcctaaccctatgtgctgatatatgtccctggacctaaactacacagtgctttgtgtgtgtgtttgtataaatgatattacataagaatttcactctattccttctctcactctgtaatgtttttctatttaaaaagaaaactaagaaaatttttagagacaggtttttgctctgtcacccaggctggactgcaatggtgcagtgacagctcactgcaagaactcctgggcttaagtgatcctcctgcctcgccctcccaaagtgctgggattaaaggcatgaaccaccaagcccagccaccctataatgttttaaatacctacatatgtgctgttgaaaaatctcactgttgcatccaactgctgcaaaatatttcgagttgagcatccgctgttttctttatccatctccccagagatgaacacccaggttgcttccaactccctcttaccacaaacaacactgtgattgatgaacatttttgtacatgaaacttatgggcctatgtgagcatttctttgggctctaaatccaagagtggaattactagatcacagggcaggttttgaatttcattaacttcttccagaatggctttcaccaacggtgagtgaaggatgctgtttcccgacatcttcatcagatttttcatcatctgattttgtaactttgcattcagtgtgggtgtaaggtggcaagttgttttaatttgcatttctctgttaatcctgaaatttataacttccttctatactagtcagccatttgagctttcctttctgtgacttccttgttcatatcttttgttcatttcctactgggcttcctgtctttttctcattgatttgcaagagtagtttataaattttagatattaatcccttttggatgttgatgttccaggtatattcacctaatatatttgccttctgtcaagtttatctgtgacagtactcaaacttcagcaggcatcagaatgtcctggaaggcttgctaaaacacagatgtctgagccccactcctagagattctccataagagaaggggaagggcctgaaaatttgctttttcttttttggggggacagagtcttgctctgtcacccaggctggtgtgcagtgacgcaatctcagctcactgcaacctctgtgcctcagcctgctgagtagctgggattacaggcatgcgccaccatgcctgtctaatttttgtatttttagtagagattgggtttcaccatgttggccaggctggtctcaaactcctgacctcaggtatctgccctcctcggccatccaaagtgctgggattacaggcatgagccatcgtgcctggccaataatttgcatttctaacaagtacccaggtgatgctgatggtccagggaccgctctgagaacaactgatttgtgatggcttccattgggcaaacttgttctattgagcaaattccttaattttgaggttgtcgattttatttattttcattttctggatgaaggaactggagttcaagaggtgaagtgaataccccaaggtcacacagtgagctgggctttggactcatgtctggctaacccagagcccatgtccctagcctctctactgtcctgtctctgagactttgggatgtagtggccgtagcctgaggcattccgacctgaggctacagggagccttagtaagttcctgagcaaggcagccggagagggaacagttggttgggtagggacaggggccaaagatataggagtctctcttaaaggccttggggctttccaagaaaagctcaaaaactgccgaaaatcctagccacagcacagtgacagggctgctgagaggcactgggacagacagttcttaccccacagctccagggatggggtaatttccctcacaccccaaggaagtccccacccgctccggaactaccctcttaccaaagccatgtaaccccttagttcctggggtccaaagggcactgtctggggcaacccaggcactgagtctggagactctggccacacttcctcctgtagcatccagagaccctgccaggaattgcttcccttgttggttcagttcctgacatcacaagaggggaaaaccccctaggggtgggatagctggttcccaaggacttctaggggtagtgcaagtatggaacttccccaccagctggatcccctggggacggtcttggcccaaacgtgagtggtaaaattgtctccagctgccgtagatggacgcctctcccaaggtggggccctgaaacttcctacccactccccacttccactggcagctcccagcagtccttcccaactatgtgctcaggagcaggagtcctggggccactgtcattcagccgccaagcatttagagggcacttgctctgtgccaggcattgcacaagacactagagggagatacagcacagtctgcccactgaggggcacactgatggggaaaacagttcccagataatcatagcacaaagttctcaattgtaaagtcaaagagtgagacaccagctctttctggggaagctggaaaaggtttcacaggggaggtgagccatgagcgagagcttgaaggacaaggtttttggtgggtgaacaatagaagagagagccctccagatggggacccagcacaagcaaaggcaggggagcttgaaggagcatggcgtgctctaggactggcaaccggttagcactcgtgcagcacttaggctccctggccagagggtcggagggtttttaatccgagctctgccatctgcttgttcggtgaccttgggaaagcccctaaaatgtccctgggtcttggtttcctcatctgtaaagtggggttgataatagcctcaccctcgtagatcccatagattgtcatgagtcttaagatatttcacgtaaaagtatatgtagaaagtgctcaattagtgaccattgtgatagctggaggaacacggagtgtgtgaggtgggggacgaggtgggtgggtaggagttgcaggagaggaaaccagagaagtggatagattagaagcccttgaagggcaggctaggaagcataggcaatgggaggctatctaatgtttgttgttgttattgttgtttttgttatcgttgtttgaggcgggttctcactctgtcacccagctggagtgcagtggaacaatcaaagctcactgcagcctccagctcctgggctcaagccattctcagccttcaaagtagcagaattacaggtgtgcgccaccaggcctggctatttctaaattttttttgtagagacgtgctctctttatgttgcccaggatggtcttgaactcctgagctcaagggatccacccgcctgagcctcccaaagtgctgagattacaggcgtgaacaaaggtgccccacctgggaacaagccaggggacctgcattttcttgaagcgaatcaagctgctggagaggaggatcaataggaaaacagaggagcgtctggaagcagggaagtggggaggaggctggaaccaggaccacatgagagatggtaagacctgactgagctggggtaagaggaaggaagaggagagagtaggttcaaagaggaaagaagagaaagagaactctgcctacccccacccccactcagaaatagtagcccctcacattctttgaccaaattcattcgttcattcattcattcattccacaaccatttatttagcatttaaaccctggcctcttggagtttacattctaggagtttatattactattaaatgttactaggagcttccagatgcagtaacgacccaatcaggtctaaatggccagaaattgatggccctcttggtgggtcctcccacttgacttgttgcttatcctcaggtatttcagagcaggggcagaggggtcttaaagccaggccagcctgttctgcccacttcctaccttggggagttcactgtctcctatggcagccccttctatccaatgcaagagctaacatccacctccttgtccccccactccctgcccgccgtccccagggccccccacctggcttctaacatcacctttaagagccctacacggtatccctgatgcctcagccactgggcagccctgcagcaacgtgcagaaaatgatgcaatctgcagaaacttctcaacttctcatttatatctaaaagcagactgttctcaaaaaaaatattttcaaagcctatcatgcagacaaagggggagtgcgtttgatgtgtaaagacctacaagtaaataagaccaacagcctaatagaaaaataggcaaattatttatacagacagttcacagaaaatacaaacgactctaaaacgtgtgacaagatgttcaacctcactcataagataaatgcaaattaacacaacaccgagcaaccatttttcaattaagagattggcaaagtttggaaaagtgtgatcactcactatgtgggtgtaggtgtgaggaaacagacactctcacacattcctggtgggagagcaagttggtataaaccctactgagcaatatctaccaggatgcaggagccctttgatgcaacaattccactgccaagaatttctccggcatttatacccacacgagtggaaaccaatgtgcaaggaaagtcattgcagctttgtctctaataacaagagtttggaaataaaccaaatgttcagtgataggggtctggttaaatgaactgtggctcatgcaggcaataaaataccatgcagccataaataagaactaggtagctctgtgcaccgatacagaattatttccaagatagagtaagtgaaaaaaaaaaaaaaaagcaaagtacagaacaatgcactttgaatagtgctgtatttttgtttaaggaggcgggaaatgtcttttaagtatagaatagttctggaaggtacacaaaacaagttatagttgtgcttctgagctggaggagtgtgtggctatagaataaagagggaaggagactttctctgcatgatgtgtcctaaatgttatgtcatgaatatgaattacagcagagcaattttttcaaaaaccactattccagtattgtggtatttactgaactctatagacactatctgtttccatatctgtctgacccctccaaccccacgcctactctcaacactcacgcttacacacacacacacacatgcacacacacacacacacgcacacacacacacacacacagaatcttggaaagggaggctggttctgactcattcctacattccctggagctcagcacagcaccaagcacagagcctcctgccaacaatcatatgagtgaactatcttggaaacagatcccccagccccagtccagccttcagatgacttctcatcaggcgttgactgcagcctcataagagatcccaagccaaaaccactaagctaagttagttccacatttctgacctacagaaactgtgtgagataataaatgttggccaggtgcagtggctcacacttgtaatcccagcagtttgcgaggctaaggtgggaggattgcctgaggccaggagttcccgaccagcctgggcgacatagtgagaccctgtctttattttttttaatagttacaattttttaaatctcaatcctgcttcttctgtataattacacagttttaagttgctaaattttgggtaatctgttacacggcagtatataactaatacaatcaccaaaggtttgtttttgtttttgtttgttgttgttttgtttttttgtcattgttgttgttttgtttttgtttttgagaccatctcgtgctgtcatccaggctggagtgcaatggggtgaacacaactcactgttacctcgacctcctgggctcaagcaatcctcctgccttagccacccatgtagatgggacaataggcatgcatcaccatgcttggctaatttttaaattattattattatttttgtacagatggggtctcactttgttgtgtaggtcggtctcaaactcctgggctcaagcaatcctcccacctcagactcccaaagtgctaggattacaggtgtgagccaccctgcccaggcacaatcaataagcctttattaagcatttgatgtgtatcaattccatggtgattgcaaaagaagaagacatggtcctgcccttaggggagcaagccacctgcacattcattcctagactcattccttacttcaaccaacattattgagcatttactatatacctggctctgtgcttagtgttgacccataggatgtcagcaattaaaatacaccatagaggcctgtagtcccagctacttgggaggctggggtgggaggatcacctgaaatcaggagttcaaggccagcctgggcagcatagcgagacctgctctcaaaaacaaaaatgtgtgtgtgtatatatatatatatatagtaggacaagagggaactttctagagtgataaaaatgtatctcctaatggggtttaagttacataaatatatatgcatttgtaaaaactcagcaaatgaacacgtaatcttttgccctttgcctgtaaatttacattaaaagaaaattactgtaaacaaatattgaaattgaactccagttaataatatgtgtgttgaggtaatttctttaaaatgcatcttaaaagatgaattgatagacagatagatgaacaaacatggttaaagcaagtaaaatgtcaatggtagaatgtaagtggtgagagtaggtattttgtcgccaaagtctttaaattttgctgtgtatttggacattttcataataaaatgttcagaaggagcaacacttgataaccatatattccaattccctcatttattatcattattttagttccataaataaaaacaatgcattctagttaagaaagaaaaaaacagcgagagaaacatcacacaccagggcctgttgggggatggggggaaaggggagggagagcattaggacaaatacctaatgcatgtggggcttaaaacctagatgacaggttgatgggtgcagcaaaccaccacggcacatgtatacctatgcaacaaacctgcacgttctgcaaatgtatcccagaatttaaagtaaaaagaaagaaagaaaaaaaaaaacatagaaaaacacttccccaccaccaattccaatgttcctttcctcttcagtgacaacctctgcttcttgttggctgtttagcttccagacttttatctacgcatttacatacatgtagaggtaaacacaaaaccatgttattattttaaaaaggaatgtactctgcgattctgaaagaatgtcttggggatctctccatgttaattcatgcacatcaccccagtttcaaattgctgagtaaggatgtgtcttcctctttgagattcaggctcagagaagagtttgtcagacacacacagcaagttagaagagctgggactccaacctactctcctagtcccaggcctgggcgcaccctgcttgagcatgtccaccactgaatgaggggcagggccacgcccaggccctttttttctgcagaatacagtgggcaggtccagccctgcccctgggagaagaccagcctgggcttgggtgcaccggacccaggaggaagtccacaaagcgcttcctcttttcttagcctccagagacactgggggaagagaagggggtgttgtgaaactgaacagtcccccaacccccctggggggacccgtcagctgggggtggccatgcagctgggggcagaaaaacaatttcatggactcccccagcactgcccccgccccacccccgtccccacccagtctcaccccgcccctgagcaggaggtctgctgcctctaggatggtacttggggtaggtaagcttggaaggcatccataggccagccttgtacagtcttgcccgagtcctacatgagctggccccagtgcctatcagctgctgccgccacttccagcctcctcttccaaatatggtatctgcctggggcttcaggcaccaacaacatggaaatgtttgcagttcctcaaacaggtcagactgtttccctctcaagcctttgtcaggttgtcccttctgtctggaacaccctttgccctgatcttcctctggcatccattaagcctcaactcatgtcacttttttttttttttaaggcaggtctcactccattgcccagtctggagtgcagtggcgcgatctcagctcactgcaacctctgcctgcaggattcaagcaattctcctgcctcagcttcccgagtaactgggattacaggtgcccgccatcacgcctggctaatttttagtagagacaggatttcgccatgttgtccaggctagtctctaactcctgatgtcaggtgatccacccacttcggcctcccaaagtgctgggattacaggcatgagccactgtgcctggcccatatcacctttttcaagaagtccttgctgcactcagtgtccttcctacttggtcctacaatatcatgggcctatctctctctctctctctagcagcattttccactctgtatctaagttattggttaaatgattgtctccataattggattgaaagttgcttgagggccaaaacgctctcatccatttttgtgctcccagaccttggcagaaatgcacatggtaggcccttaatcgtattaatggaattaatcaaagaacgaagggtttagatgccagcactgtcactatcactcactggctgttcctaaactctgagcttcagtttcttcctctgtaaaatgggcatgtgaatagtatctgcacggaatttgcaatatagtagaggagacagagaatcaacaggtgaacatacaaatatgtaacatagtgcctggtggcgacaaattctctggagaaaaataaggccgagtgggagttaaagaagactggaggagggaggagctttctaagggggtcagggaccccctaggggctgttgggcgtttctcaagggttagtctcctctgattttcatttgacctttttgggaaaggtggggagcagtgagctcctgcctgggagggtgtagctatgaaataaacgctggctactttacaaataaaaggggaaatggttgagctctgaaataatgattgtggctctctttcccatccttcaacatgttttgaatatagaacaatcaacagtgatcccaaagaatttgaaatatgaaatgcaaatgccctctggaaataggaaaatacatttttgaaagagccaacctctgacccactgtaaagcgaagcttacattgtgttctagctcctgccctccttccaggacagagccctgggtccctttctgcattc

SEQ ID NO: 1334 - DNA, 2608 bp, Homo sapiens
caggagtagaggggacatttcaccatggaatatgaagtcaagaaagggaagaagggctttgtatcccccatccgaaggctggtgttccccaaggccgggcgccgggcagcctgtaggagcagcgtgagccgccggcccctgcactcgatgcccctttatccccccgactacctcatcgacccccagattctgctgtgtgactacctggagaaagaggtcaagttcctgggccaccttacctgggtgacttcctcactgaacccctccagtcgggacgagctcctgcagctgctagacaccgccaggcagctgaaggagctgccgctgaagaccacggcggagcaggacagcatcctgagcctgtctgcccgctgcctgctgctcacctggcgcgacaatgaagagctcattctgcgaatccctacgcacgagatcgccgccgcctcctacctgcaggacgacgcgctgcacctgctagtgctcaagaccggtctgggtgtggacccggtgccggccggcgtggatgccagcccaggcggcgcaggacgcgaccccggcccgccaggcggggcgcccgagaagcggcgggtgggcaccgcggagcggcgccacaccatctgcagcctggactggcggatggggtggggtgggggcgccgcggaggcccgggccgggggaggcggcggcggcagcttggagcgccagcgcgccggggcgcgggcgtcgggcagctgggagcgacggcagacgttcagcggcagctgggagcggcggcacggaggcggcggcggcggcggcggcgcgggaaagccgggcggtagctgggagcggaggcaggcgggcagcggcgggggaggcagctgggagcggcgccaccccggccccaacccgctcgacccgcaggaccccagccccgacgcctactgcaacctggtcatcctggctgtagccaacagggacgctgcagaggagtcctgcgcactcatctgtcaggtcttccagatcatctacggggaccagagtattgagtgtgtggaccgggctggctaccactacacatccacacctgaacggccatggctctgcagccgcagtgagagctgccacacagatgggacgtatgcctatgatgccgacttcagctgctgcagctcctttaatggctcccaggacacctttgaagcatgttacagcggcacgtccacaccttctttccatggctcccactgcagcggcagcgaccacagcagtctgggcttggagcagttacaggattacatggtcacgttgcggagtaagctggggcccctcgagatccagcagtttgcgatgctgctgcgggagtaccggctggggctgcccatccaggactattgcacaggcctgctgaagctctacggagaccggcgcaagttcctcctccttgggatgcggcccttcatcccggaccaggacatcggctacttcgagggcttcctggagggcgtgggcatccgcgagggcggcatcctcactgacagcttcggccgcatcaagcgcagcatgagctccacgtcggcctccgcagtgcgcagctacgatggcgcggcgcagcggcccgaggcacaggccttccaccggctgctggctgacatcacgcacgacatcgaggcgctggcccccgatgacgacgacgacgacgaggatgagccccggggctccaggggcgggagcgacgccgcagaagacaactacctgtagccaccgcccctgcggacggcgtggctcagcagcccacctctgagtctcagctttgcttcggggaccctatccccagggcccccccatcacacctggcggggccggggggtcttcactccagggtctcgctccctgcccttggggcccggggccatgcagtacctggagtgtcctgcagggggaaagcgaagccgggccctgaagtccggggcagtcacccggggctcctgggccgctctgccgggctggggctgagcagcgatcctgctttgtcccagaagtccagagggatcagccccagaacacaccctcctccccgggacgccgcagctttctggaggctgaggaaggcatgaagagtgggctccacctgctggccgactgagaaaagaatttccagaactcggtcctattttacagattgagaaactatggttcaagaagagaggacggggcttgagggaatctcctgattctccttatatgacctcaaactgaccatactaaacagtgtagaaggtctttttaaggctctaaatgtcagggtctcccatcccctgatgcctgacttgtacagtcagtgtggagtagacggtttcctccacccagggttgactcagggggatgatctgggtcccattctggtcttaagaccccaaacaagggttttttcagctccaggatctggagcctctatctggttagtgtcgtaacctctgtgtgcctcccgttaccccatctgtccagtgagctcagcccccatccacctaacagggtggccacagggattactgagggttaagaccttagaactgggtctagcacccgataagagctcaataaatgttgttcctttccacatcaaaca

SEQ ID NO: 1335 - protein, 565 aa, Homo sapiens
MEYEVKKGKKGFVSPIRRLVFPKAGRRAACRSSVSRRPLHSMPLYPPDYLIDPQILLCDYLEKEVKFLGHLTWVTSSLNPSSRDELLQLLDTARQLKELPLKTTAEQDSILSLSARCLLLTWRDNEELILRIPTHEIAAASYLQDDALHLLVLKTGLGVDPVPAGVDDGGAGRDPGPPGGAPEKRRVGTAERRHTICSLDWRMGWGGGAAEARAGGGGGGSLERQRAGARASGSWERRQTFSGSWERRHGGGGGGGGAGKPGGSWERRQAGSGGGGSWERRHPGPNPLDPQDPSPDAYCNLVILAVANRDAAEESCALICQVFQIIYGDQSIECVDRAGYHYTSTPERPWLCSRSESCHTDGTYAYDADFSCCSSFNGSQDTFEACGTSTPSFHGSHCSGSDHSSLGLEQLQDYMVTLRSKLGPLEIQQFAMLLREYRLGLPIQDYCTGLLKLYGDRRKFLLLGMRPFIPDQDIGYFEGFLEGVGIREGGILTDSFGRIKRSMSSTSASAVRSYDGAAQRPEAQAFHRLLADITHDIEAPDDDDDDEDEPRGSRGGSDAAEDNYL

SEQ ID NO: 1336 - DNA, 2327 bp, Homo sapiens
caggagtagaggggacatttcaccatggaatatgaagtcaagaaagggaagaagggctttgtatcccccatccgaaggctggtgttccccaaggccgggcgccgggcagcctgtaggagcagcgtgagccgccggcccctgcactcgatgcccctttatccccccgactacctcatcgacccccagattctgctgtgtgactacctggagaaagaggtcaagttcctgggccaccttacctgggtgacttcctcactgaacccctccagtcgggacgagctcctgcagctgctagacaccgccaggcagctgaaggagctgccgctgaagaccacggcggagcaggacagcatcctgagcctgtctgcccgctgcctgctgctcacctggcgcgacaatgaagagctcattctgcgaatccctacgcacgagatcgccgccgcctcctacctgcaggacgacgcgctgcacctgctagtgctcaagaccggtctgggtgtggacccggtgccggccggcgtggatgccagcccaggcggcgcaggacgcgaccccggcccgccaggcggggcgcccgagaagcggcgggtgggcaccgcggagcggcgccacaccatctgcagcctggactggcggatggggtggggtgggggcgccgcggaggccccaacccgctcgacccgcaggaccccagccccgacgcctactgcaacctggtcatcctggctgtagccaacagggacgctgcagaggagtcctgcgcactcatctgtcaggtcttccagatcatctacggggaccagagtattgagtgtgtggaccgggctggctaccactacacatccacacctgaacggccatggctctgcagccgcataatggctcccaggacacctttgaagcatgttacagcggcacgtccacaccttctttccatggctcccactgcagcggcagcgaccacagcagtctgggcttggagcagttacaggattacatggtcacgttgcggagtaagctggggcccctcgagatccagcagtttgcgatgctgctgcgggagtaccggctggggctgcccatccaggactattgcacaggcctgctgaagctctacggagaccggcgcaagttcctcctccttgggatgcggcccttcatcccggaccaggacatcggctacttcgagggcttcctggagggcgtgggcatccgcgagggcggcatcctcactgacagcttcggccgcatcaagcgcagcatgagctccacgtcggcctccgcagtgcgcagctacgatggcgcggcgcagcggcccgaggcacaggccttccaccggctgctggctgacatcacgcacgacatcgaggcgctggcccccgatgacgacgacgacgacgaggatgagccccggggctccaggggcgggagcgacgccgcagaagacaactacctgtagccaccgcccctgcggacggcgtggctcagcagcccacctctgagtctcagctttgcttcggggaccctatccccagggcccccccatcacacctggcggggccggggggtcttcactccagggtctcgctccctgcccttggggcccggggccatgcagtacctggagtgtcctgcagggggaaagcgaagccgggccctgaagtccggggcagtcacccggggctcctgggccgctctgccgggctggggctgagcagcgatcctgctttgtcccagaagtccagagggatcagccccagaacacaccctcctccccgggacgccgcagctttctggaggctgaggaaggcatgaagagtgggctccacctgctggccgactgagaaaagaatttccagaactcggtcctattttacagattgagaaactatggttcaagaagagaggacggggcttgagggaatctcctgattctccttatatgacctcaaactgaccatactaaacagtgtagaaggtctttttaaggctctaaatgtcagggtctcccatcccctgatgcctgacttgtacagtcagtgtggagtagacggtttcctccacccagggttgactcagggggatgatctgggtcccattctggtcttaagaccccaaacaagggttttttcagctccaggatctggagcctctatctggttagtgtcgtaacctctgtgtgcctcccgttaccccatctgtccagtgagctcagcccccatccacctaacagggtggccacagggattactgagggttaagaccttagaactgggtctagcacccgataagagctcaataaatgttgttcctttccacatcaaaca

SEQ ID NO: 1337 - protein, 233 aa, Homo sapiens
MEYEVKKGKKGFVSPIRRLVFPKAGRRAACRSSVSRRPLHSMPLYPPDYLIDPQILLCDYLEKEVKFLGHLTWVTSSLNPSSRDELLQLLDTARQLKELPLKTTAEQDSILSLSARCLLLTWRDNEELILRIPTHEIAAASYLQDDALHLLVLKTGLGVDPVPAGVDDGGAGRDPGPPGGAPEKRRVGTAERRHTICSLDWRMGWGGGAAEAPTRSTRRTPAPTPTATWSSWL

SEQ ID NO: 1338 - DNA, 2394 bp, Homo sapiens
caggagtagaggggacatttcaccatggaatatgaagtcaagaaagggaagaagggctttgtatcccccatccgaaggctggtgttccccaaggccgggcgccgggcagcctgtaggagcagcgtgagccgccggcccctgcactcgatgcccctttatccccccgactacctcatcgacccccagattctgctgtgtgactacctggagaaagaggtcaagttcctgggccaccttacctgggtgacttcctcactgaacccctccagtcgggacgagctcctgcagctgctagacaccgccaggcagctgaaggagctgccgctgaagaccacggcggagcaggacagcatcctgagcctgtctgcccgctgcctgctgctcacctggcgcgacaatgaagagctcattctgcgaatccctacgcacgagatcgccgccgcctcctacctgcaggacgacgcgctgcacctgctagtgctcaagaccggtctgggtgtggacccggtgccggccggcgtggatgccagcccaggcggcgcaggacgcgaccccggcccgccaggcggggcgcccgagaagcggcgggtgggcaccgcggagcggcgccacaccatctgcagcctggactggcggatggggtgggctgggagcggcgccaccccggccccaacccgctcgacccgcaggaccccagccccgacgcctactgcaacctggtcatcctggctgtagccaacagggacgctgcagaggagtcctgcgcactcatctgtcaggtcttccagatcatctacggggaccagagtattgagtgtgtggaccgggctggctaccactacacatccacacctgaacggccatggctctgcagccgcagtgagagctgccacacagatgggacgtatgcctatgatgccgacttcagctgctgcagctcctttaatggctcccaggacacctttgaagcatgttacagcggcacgtccacaccttctttccatggctcccactgcagcggcagcgaccacagcagtctgggcttggagcagttacaggattacatggtcacgttgcggagtaagctggggcccctcgagatccagcagtttgcgatgctgctgcgggagtaccggctggggctgcccatccaggactattgcacaggcctgctgaagctctacggagaccggcgcaagttcctcctccttgggatgcggcccttcatcccggaccaggacatcggctacttcgagggcttcctggagggcgtgggcatccgcgagggcggcatcctcactgacagcttcggccgcatcaagcgcagcatgagctccacgtcggcctccgcagtgcgcagctacgatggcgcggcgcagcggcccgaggcacaggccttccaccggctgctggctgacatcacgcacgacatcgaggcgctggcccccgatgacgacgacgacgacgaggatgagccccggggctccaggggcgggagcgacgccgcagaagacaactacctgtagccaccgcccctgcggacggcgtggctcagcagcccacctctgagtctcagctttgcttcggggaccctatccccagggcccccccatcacacctggcggggccggggggtcttcactccagggtctcgctccctgcccttggggcccggggccatgcagtacctggagtgtcctgcagggggaaagcgaagccgggccctgaagtccggggcagtcacccggggctcctgggccgctctgccgggctggggctgagcagcgatcctgctttgtcccagaagtccagagggatcagccccagaacacaccctcctccccgggacgccgcagctttctggaggctgaggaaggcatgaagagtgggctccacctgctggccgactgagaaaagaatttccagaactcggtcctattttacagattgagaaactatggttcaagaagagaggacggggcttgagggaatctcctgattctccttatatgacctcaaactgaccatactaaacagtgtagaaggtctttttaaggctctaaatgtcagggtctcccatcccctgatgcctgacttgtacagtcagtgtggagtagacggtttcctccacccagggttgactcagggggatgatctgggtcccattctggtcttaagaccccaaacaagggttttttcagctccaggatctggagcctctatctggttagtgtcgtaacctctgtgtgcctcccgttaccccatctgtccagtgagctcagcccccatccacctaacagggtggccacagggattactgagggttaagaccttagaactgggtctagcacccgataagagctcaataaatgttgttcctttccacatcaaaca

SEQ ID NO: 1339 - protein, 234 aa, Homo sapiens
MEYEVKKGKKGFVSPIRRLVFPKAGRRAACRSSVSRRPLHSMPLYPPDYLIDPQILLCDYLEKEVKFLGHLTWVTSSLNPSSRDELLQLLDTARQLKELPLKTTAEQDSILSLSARCLLLTWRDNEELILRIPTHEIAAASYLQDDALHLLVLKTGLGVDPVPAGVDDGGAGRDPGPPGGAPEKRRVGTAERRHTICSLDWRMGWAGSGATPAPTRSTRRTPAPTPTATWSSWL

SEQ ID NO: 1340 - DNA, 957 bp, Homo sapiens
caggagtagaggggacatttcaccatggaatatgaagtcaagaaagggaagaagggctttgtatcccccatccgaaggctggtgttccccaaggccgggcgccgggcagcctgtaggagcagcgtgagccgccggcccctgcactcgatgcccctttatccccccgactacctcatcgacccccagattctgctgtgtgactacctggagaaagaggtcaagttcctgggccaccttacctgggtgacttcctcactgaacccctccagtcgggacgagctcctgcagctgctagacaccgccaggcagctgaaggagctgccgctgaagaccacggcggagcaggacagcatcctgagcctgtctgcccgctgcctgctgctcacctggcgcgacaatgaagagctcattctgcgaatccctacgcacgagatcgccgccgcctcctacctgcaggacgacgcgctgcacctgctagtgctcaagaccggtctgggtgtggacccggtgccggccggcgtggatgccagcccaggcggcgcaggacgcgaccccggcccgccaggcggggcgcccgagaagcggcgggtgggcaccgcggagcggcgccacaccatctgcagcctggactggcggatggggtggggtgggggcgccgcggaggcccgggccgggggaggcggcggcggcagcttggagcgccagcgcgccggggcgcgggcgtcgggcagctgggagcgacggcagacgttcagcggcagctgggagcggcggcacggaggcggcggcggcggcggcggcgcgggaaagccgggcggtagctgggagcggaggcaggcgggcagcggcgggggaggcagctgggagcggcgccaccccggccccaacccgctcgacccgcaggaccccagccccgacgcctactgcaacctggtcatcctggctgtagccaacagg

SEQ ID NO: 1341 - protein, 309 aa, Homo sapiens
MEYEVKKGKKGFVSPIRRLVFPKAGRRAACRSSVSRRPLHSMPLYPPDYLIDPQILLCDYLEKEVKFLGHLTWVTSSLNPSSRDELLQLLDTARQLKELPLKTTAEQDSILSLSARCLLLTWRDNEELILRIPTHEIAAASYLQDDALHLLVLKTGLGVDPVPAGVDDGGAGRDPGPPGGAPEKRRVGTAERRHTICSLDWRMGWGGGAAEARAGGGGGGSLERQRAGARASGSWERRQTFSGSWERRHGGGGGGGGAGKPGGSWERRQAGSGGGGSWERRHPGPNPLDPQDPSPDAYCNLVILAVANR

SEQ ID NO: 1342 - DNA, 39588 bp, Mus musculus
  misc_feature (1)...(39588): n = A, C, G or T/U
ggcaagactgagcaaccatcttgggtccttgctactccatgaggagaataccctgatatctcaggtagtttgtttatcagttcctgatcctttggagtgtagttaaagcctgcgtttcggagttcataatggtccttaggttccttgtttttctctctagtcttgagaatcatagctccctgggctgcctgtttggcggctaggtcagccatctgatttccctttgttatggcatcttggcctttctggtgaccagggcagtgtataatggccaggtttttttttttctttttttttttggggggggcaaatgtatggcttctagtaagctcaagatttcttctctatttttaatatcttttccagcagatgggagtagccccctctgtttataaattgccccatttacgtgagtggtgacgaaatcgtacctgctgtccgtgtagatattgatactttccttctgccagtcacaaggattgggtgagtgcgatcagctctgcttttttgggctgacgtcccttcaggcaagctgctggcccagatggtttgtttcccgtcgaccactgctgcccccacttttcgcttactttcaaccatgaagctgctactatccgtgtactgaaagacccccgtggggagaccccccatcaagtctcgggatggtgcgcacccaaggaaacacgaaagaccatcttgatgcaaaaacacgagggagtttaatgacggagctccaggccaacacatgtctcatgcaggagacagaggaatcgaccctgaggctcaaaagttaggagtttatatagaaaaaaagtcagggggtaggggaaattggcgcggttacacacaattggacagtttaaacatcagcaagcgggtacttgcgggtcgggacaacagcaactctagagggagggtgcttatctatgtcagcagagcatctggttaaactcaaaccgtatcagaaggagaccagaacaggtggcccaatctcaactgggcctgtccagagattgttcttgcatgcctcttatctttatggcaagtcagttcctggaatgacttaacagcctttgtgctggcctgtctggggccttgaatttggttttctttctttcattcccctcttcttctactaaataattctaatcttagaattttaaaggtctgtatcctcatgtggggggtaggaatcatattcttcttctatcttcactataggttaatattggtgttggagaaccataagctgcactacattcactctactgttaacgaaagcaattccctgatttattaagcaggggccgaagatcaatgccaaacatataataagaagcggcccggccaaagcagaaaataaagtggtcatccacggagatttaaagaaccacgactcaaaccatccctgttgagcttcccgatctcgttttctcttttctagcctttctctcaatttctgcatagaatctctgactatccccatgtggtctgcgtagaagcagcattcttcttttaaagctgcacatagtccaccttcccttaaagacagtaaatctaaatctcttctgttttgtaatactacttctgacagggaggtcaaggatttttctaatgtattgatagacttttctagcatgcttaaatcttcatttatagaatctctcaaggacttgattccttgtctaccctcaattaaggctgatacccctgttcctactctcaccgtgagacctaccctcaccaatgtagccagggtaagggtaactggttctcttttaattctcttattggtatattcgtcttctaggctggaggcagtatgataatatatgcggggtaaaagttgaaccatgacacaaaaatctttggaggagtcaaacacattagttgatacacacggtgtgagtcccgtgttacaggcccaccagccgactggtgttggtacaaggtaatggttggtacttgtcctagatacaggatgggttcggttacataggtgttgatgggaaggggggggtgtccctatgcagagaccagggctctttcccgacacctcagtcagggttaattttttttctgttccccatgagcaggaagcatgactggtggttgtgttaaactctccattaagggcgatcccctcataatagggagggacagaggacaggcatagccagcagtcagttgtagcatctggatcagtgctgttaagggcataaaaggcccctctaatcaggttgaacagtctctgtcccgtcgagggatctgaggagattgtggtcggggaatcttgggaggtgccgaccttgagggggttttcaattattggagccaggggtttgggtttggcagggaggtcctgttctgggagggccttgttaggtcctatgggcactggggatggactctccacagtcaatttgattttgaaaactaatccagggtctttccctacttcgtccaatcgcaaaccccaattgtttcccttaagccagctctggcgttctcgtttcccttggtcagtaaattttatacgtatggggttgcaatagttatctttacaaggtccattagggctgttgaaccaggaacacccgctctcaaggtatttagaactatctctctcaccttggtttggctggtcatagctactgcccctttttaccgtgatcaggtcccaggtagaggtaggattccaataagctccacctgtggtctcgcaaccccatgcagcacagtaaaagtccggtgcccctccacactgatgccgaagctttcgtggttggccagggcaaacataaaattctgcagaccgaagattggctcggtagaactgtcctgagcatccaaacgtgctccctatcccgctcgggacacactgtttatcaggtggtggtttatgaaggtcggtatggtcggggaggtcccaggtaagtgaccctgctactaacttacaaatatcaggtgtgaggtcgggccaccaggtccatgggggttgtactgcggtggtcgaccatacagtgtccccctcctcattaagcacttcccatgattgttggagtatgagggttgatgtctctgttctgagtcgctcttgcgacgcaagcgcaacttaagaggattattagtcttttccagggtccactcatcacgatcagtctcagggggagccctcttaacatgtgaggcatgaacccaagaggggattccttctactttaagggtggtggctgtagttaatagtaccagggagggtcctttccaacgcggctcgaggttccccgctcggtgcctcctcaccaggactgtgtctcccacttcaaactgatgtgaaacctgtaagtcgctggcggtgtaggtttctttcaactgctcccagtttctttcctcacgatttcgagagccttcagccgggctaggaggcgagatgagggaatggaggaaacatcaggacaagttctattttctacagtcacatagataggcggggggtttctacctgtcctgaactctggggtctgtaagcacaatgtaacttccaatttatccccagctgtctggccaatccctggcttacctgggagacgaagtcaggcccgttgtctgaccctattaccttaggtatcccgaaatggggaaggatttcttcgagtatcttcttggccaccacattagccgtttccctcttggtggggaatgcttcagcccaccctgaaaagatatctacaaaaactaaaaggtacttattcccatatcgagctggcttgacctcagtaaagtcaacctcccagtaagtcccaggcctatctcctcgtaagcgtcttccactgtggcattggtgagggcacatgctcaacagttcttcactaggtcttctactgccttttgtagtctagggatatggtaaggggatctattgactagttctgtcatctttttgggtcccaggtgagtgaggtggtgtatattagtcaagtattccagcccctcttcttctgtgaggatctttttttctgtgatctcctcaaccagctggggtgtggttttaattaccaaagtcattggcccctgtgctgcccctttagccacctggtctgccatctgatttcctttttctattggtccagttcccttttgatgtcctgggcaatggatgatcgccacattacagggcaagtggacagcttctaacaaactaagaatctcttctttatttttgatgtcttttccagcagaagtcaatagtccacactgtctgtagatctctccgtgaacacgagccgttgcaaaggcatacaggctgtcaatgtaaatattaatagtctttccctctgctagccttaaagcctgagttagggcagtaagttctgctctttgggctgatgttccttcaggcaggctgctggcccatataacagacttcccgtccactacagctgccttggctctgctcttaccttctaccatgaagctgcttccatcggtgaaccaggccaccgctccgcgccatgatcggtcagttaaatctggccgagtcccagtttcctctgccagtatctcctcacagagatgtacgggggtttcattagcttcaagcagtaaagtggtgggggtaagaatggtgggtggagcgaaggtcacccgcttggtcaacaacaagctctggtggctgccgaataatgctctcaagggtgtgcagggccaccactgtcacattttggcccatagtcaatttatcagcatctttcaccaacacagctgtggctgctattgcctgtagacaggagggccatctgctagccacggggtccagtttctttgacagataggctactgggcgcttccaagtctcggtggagggcctcatcaaagagggtaagagagtttttgaatcctaggggcaaacgtgtccaagttagctgtccagcctgtcccgaatctgggtctctccacccgaaagcaaacatcacctggcttatgggatgtagtttcaggcaaaagaatgcgtccttcaagtccagaaccctgtaccgtcgtctgttgggggagggggggagagaactgagcaggttgtaagggttagggacagtaggatgaatgtcttgtactcttttgttaacttctcttaggtcttgcattgatcaataatcattagtgcctggctttttaactggcagcaacggagtgttccagggagactggcaggggaccagaacacccagtcccaagagtctttgaatgtgaggcctgatgccctctcgggccttcttcttgctcatgggatattgtcatatcccgataggagtcgcaccagtttctagcgtcacgatgatgggaggcaccctttttgcctctcccatgtccccagtctctacccaagcttggggatatctctctaactaggtcccttccagtatttttctcgatgggtctggaggctcgtgtaatctatattcttcttctaattttagagctaaaatgatagaggtgggggtttgccaagtgactgtggttccttccgaggagaagttcatttgggcttttaattttgatagtaagtctcttcccagtaatggcgtggggcattgagggatgacgagggaggaatgggttacctggcttcttcctagatcaaccctcctatcagtggtccaagaatatggcttctgaccagtggccccaatcactatggttctcttgtttcttaattttcccagtggctctttcaggactgaaaattctgccccagtatcaacaaggaaatccgtaggggtcccttccacagttagggttaccctaggctcggggagggggtccaagccccgtctcccctaatcatcattctctatggtgagaatcttgggcggtctggtgtctctttcttggggcagtctcttgcccagtgtcccttttctttacagtatgcacattgatccttatctagaggtggtcgtgaaggtccttcaggattccgaggtcttctcgaccctatgttgcccaggttccctgtctatttcctcctccttctctataaacttccttatcgcctacaaatgcagccaaaatcctagttaaatatctttcctgccttctatctcctctatcttctcttgcctcagcctccttcttctctctttctcttttttcttcctcagtctctctcttatggtacactttccttaaccaggtcttgcaaagacaacgtttgcagaccttctaggtgttgtagccttctcataatgtcagaagcagaatgccccataaaggccatggcaactgccgcctgttggccctctgatgtaggatgaaagggggtgtagcgcctatatgatgggagaagactgctagcacgcaggagtgcctggattctatcccagcaccagggggaggaggggtagggtactaggtaagcaactaaactcaactacaggaaagctaaaaccacatgtgcttgaccaacagggtatcacagcttttaagaagcagttaaatgggaatccacatgggatggagacaagaacctcacatgggccacaatctccatcctgaaggctggcctgctgtggctcctcctccatccattccacctgatctctaagctcttccttagtctctagaagagaggtccgggcaggatcccagatctcttcacgtgaggtaactgcctgtcacagtcagtccctctgccactcccataactagggcagtggccagtgattcttttcttttccaatcaaagcagattcctgtgacatctactgcacctctgtgatcagcgggtaccctaggaactggcagcttggagacagagcctgcccaccatgagcttctctgacctgcagttctttgccttagagcagagtatagaggaagatgaaccaggagccactctcctgcctcactctagaccctcccctgaggtcaggacccggagctcattatcaggaaggctctctccttccagggatggatgcagtctctctacttatttgtgtttggttgtattgagacagggtctcctgctctacagcagcggttctcagtccctagggtcgtgacctctttgggggcagtgtcacatggtgtggatcagatatttacattatgagtcataacagtagcaaatttcgttatgaagtagcaacaaaaataatattatggttgggggtcaccacaacatgaggaactgtattaaagggtcacagcattaggaaagttgagaaccacggctctagagctaaggctgaccttgaactcacaattctcctgccttacctctggagtgctgggtttactgacaagctttgacacacaggcctgagggagcttttgagaaaacctccaagtcactgggttccttttttccgttttatggaagatctgagcattgaagctttctcttttgagacaaggtctcacagtgtacctatagctcgcagtgtacctatagctcgcagtgtacctatagctcgcagtgtacctatagctggcctggaactcactgtgtaaaccaggacggccttgagctcacaaagatcgacttgcctccatctccaagtgctgagattaaaagcttgagccacctcgctcagcagtttcttactgtatgggggaacgggggaaaggtttcttgccacaacagtagtgtgtatccatagtgctggatttcaagttcacgtttgctagagaagattgactctaccaaaactagatgagagccaggtgtggcaggaaaaacagcctcaggaagctgaagtacaagaaggattccagaccccccacatctcaataaataaataaatataaataataataacttaccatcaggcatggggattcatgtgtgcagtgctatttgggaacctgaagcaagaatatccttgagcaccggagtctgaggccagcctgagaaacagagagacttgttacaaaccaaaccaaaccccagttggaaaaagcttgtcaggattatcaatacgtctggccaaagtcccttctaggccgaatattatagctgaaaataaactcatgtcagacctctctgacttggaacacagatttacgggatcgtatggttccatgattatcagttaccatccagatcccaggaagggcacctagacgtttggcttttccagaacagcggtatgaagaatactctcatgcaagctttaacttcatgcacagctgctccaggatcatgaacccaggagtgggaatgcctggggtgaagatgcacagagcttaaactacatttacagagcagtcagacctggcaactgtcgagttcatggtatatttaggctagggaagttgtttatgtgaaatcctgacacagagccagcctgacacagagcccccctcaccccaaccctggatcctgccaagcgggtcagggagactccagacctgtcacccagcattcagtccgctctgctgctggccatggggaggaacgcgtcactcatgtgagcaggcctggggtcactggtggaatccgtgggcttgtgactgcccaccagaggctcctgtcacaaagaaaagacacctgctgcacacgcctggatcgtatgagatccagggcacatctccagattcactgggctatccctctattttccctccatgtcacacctatatgacagtccctgctttttgccaagacctaattggtttttacttttcttacctaagatttcccatctccttcattctttcaaaggtctgtggctggaatatgacttggctaagaaattgcttgtgaccaactctctgagacttggtgtcaccatcagtaaaaaagagggttctgggcaatgtttttgattttggatggccatcttggtttcaaggatttccaggcaagtccggcttctatgaaacccaccttaagatgcttttaatcggcatcctgactggcttagggccttctggtaggaaaacttaactttggttgccaaagtttttgtgactacagtacaacgaaaaacaaaagcttgagtctgctgcagcaatgacagctgttgtctctgtcacttagctgcagcaggtgcgccactcttaagtctgacccaagacccaaactcaacagtaaaatgattagaagataacagcatttaaaaaaataacaatcagggaagactgttcggatgctgttggttctggcacgtgggtctcaggtttctgggcctatatgatcacaaacccagaaaaggcctgttagctggagttaggctatgccacacttatgcagatagcaagagacagacaaacagtcagggaacttggacgcaaggaaaacttgaggtaaaatgaccctagcctggaccgctggaagcgcctagcctcaccctctccaactggggttagccaccaagggaaaggctcggctctatcatcagacccacctggccaaaggacactggcacacgtggtaaggcagggaccagcgagtaaatgcggccacctccaaattgcgacacggtgcctgcctcactcacgctcctggggtgcagcctgtactcacccctggccgaccatctgcgctaggcttggggttttatcccaagtggtcttcgccgcgccgtttgccttatgagcggacaaaacaactggtcctttagcacctgggagttactctgagccgactgagcctcagtttccccatccccacaagggcaagctcccagaggaggaggcgaacttacaaaggtacggggactggcaccctttgtgcctggtagtgcccccacccccatggaggagcacacagtaggcgctccggaaacactctctgaaaggaggagcgggccacttcctgccctggagctgactccgggagccctggtcccaccgctccgccccgggccccggccatgcggcattcctaaggtgggtgggcgcaggaaggaggtgccgcgggcccgccccctccgacgcgtgggcggggcgaagccccctggctctgcgggcccgcccccgagggtgggcgtagctggccacgctctgcacaaagtttgtttctgcctcggggcggtgggggagggtgcggcaggcgggatgggaggagaggggatctgacgtcaggtcgcgaggtgctttccagccgcgagctgtcaggcgggtgtcagacccggcaggtacgcggcgcgttcccccggtgccccccgccccggccgggtggtcccacaccccaccgaggccgcgtgggccggaaagccgccagggaaggtgagtgcggggcgccgaggggctggagacgcgggaggaggcgcgcggacaacttggaaagtttcttggggcgacggggcgggggagggggcgtcgtcccggcgcgtgcgacagtgggtgtgtgagccccgggggtgtgtgtgagtcgggaccgcggaacgctggcgcggaatgccggggttggcggggggggcgctgttcggggtccttgagggagggctcggctcccaaagctcccaaagctcctctgggagagggcagccggtgccctgcagcggggtgagcgcgcggggagcgggtttgtttggtttcaaaagtgcacgttgctaaccgccggcagcccccccccctcccgcacggcgacagagcgggaccgggggccgccgagtgacagctggaggtgggggccgcgggcggggctccgacggagagggcttgggagcccgcgcgagttcccctttcctttggaacaaaggaaagtctgtctccgaggcatctgtcactcccaggcgggccaaggctgtggggcgcgtggggctggcgacgcggagaaagtttgtgcgcgccgggaccccgggaccaggcgaagggcagccgagcgtcttgcgggggctgtgcgcgtccccgatgtagggggggcggccaacatggagtccaggcgcagagttgggggggggcggcgcggaggttggagcccagccccctcttttcccctccccctccgggccgagttcggagcacaaagccgagcgcgcacgctccggcggccccgcgccccaagagtcaccctgcgcggagtaccagggaacgggctgggaactaaactttttcctgtcccaaaatggacacgtgagtttttttttttttcttgcaaagtcgtcccccccccccaacccccaaacgccgggtggcggaccgacaggggagctgttgctcgcaccgtgactctggtgggggacagttgagtgagggtgccttgagcgccggcggattcgtcggcgccccatgagccatgtgctccgttgcgtctgggccgcgggggaggctgcgcgctttgtgtgaactgctgggaactccagcctcagtgtgcggcccgggggattgtatctggagctgggcgagttgtcagaaagttcctgtgggagtggctgcagatggtgttgtgggagtgtgtaggagattgatggggtgcagtgtccaaggggtgcctccaataacccagttgtataaaaaactgatggatggccggtgtggtgacgtgcgtgctcctgggtcggagagatcgtgggtgggcaggtcacttggagttcgtgggtgggcgggtgcaggagttgggctagtttcgatagtctagtcgttggtcctaggtatagtgtgtaaatttagctatgtgtgtttgtaaaactctgggaacttgcgggatgtgagcagtgggtcgggtcggttatttaaacagcgctcaacttgcaggagggaaattgaggtatcgctggtgtgcgtgtgtgtctaacctgcagacaaccctagggtgcaggacccagaggtggggaaagttcatgcggaggggtgctcttctggaagggaaactatgaagactgggttctggcaggcagccagagtggaataagtgaagataaccttgagtaaacttgtcacccgccgccagcgctgcctccctgagctggtctcgcagctgtcctggtggccgactacatgtctgccctcagaatgcatcctccttgagctcctctgagtaaacactgcctccgagcagtgcccggttcacctccaggtggcctggctgaaggtagacccttccctcgaaagtctggcttagccagcccagagatctgggctcaggcccaagtcgaggaaacaaaacctgggagatggcagagttttttggctgggcctgctgaggagctgttaaaaggcagagaagggaggagcatgcagatcctggaccagccttggcctagaacttgtgctattaaaatgtaaatttcttttgcttttgtgaacgggaactttgtctgctggaggggcagctgataggagttatctaggcagaaaccttccttcacggagcaggggaggaggagggcttcagactctgaaaggacactttactgggatcacacagcccagtggaagttaaagcagggaccagagccacacttcattggtcaggattctgagattaagtctggaccaggtcagaggccggaccaaggaagaaggtctaaaaaccaacggaggaatgactcactacgcacacggcctgcggcaggggcggcaagacttggtgaacagttaccagacccgcctccgggccttggagggaaaattacccgatttcaaatccttctttataatcagtcttaaaagatgggacattttttattttattttttatgtgtgtggattttcatctgcacctgggatgttgagagagagcatctactcccctggaactggattttgggtggttgtgttcctccatgtgggtgtggggagtggaacccaccgcttctgtgagagcgcgttacagcaaatgctcgtaattgctgggctatctcttccagccccagaaattcacttttaaaataagcaggcccggggacctgggggagggggaggctggagaaatggctcagtgggttaagagcacttgctgctcttcccgagagcctgggttcagatgccagcacagacaggctcacaacaatccagctccggttacggaggacccgcctccttctgtcctcccaggactccgcatatgtggtgcagaatgtttatatatataaaataagtaaaatcctgggagggacggggagagaagggatttggtgggaggaggaaaataagagaaaagagcactttggtcaaaggatattttatatatgtatatataataaaattttaactaaaacattctaaaatccttctcccctccccctccctaactaactgctgaacagctagctctgtagagtgagcagcctgttgagcgcatcccttcgtacatgggaccgtgtaacagtgggctttcatggccggcctcttctcccggagcatgtgctcaaggtccatccatgtcatagcacacatcagaagtgtgctctctcttttataatttgtttggttttatgtgtatgaatgttttgcctacgtgcgagtgtgtctacaccacgtagatgtccatggaggtgacaagaaggcactggattccctggaactgggagttatggtggctgtgagctaccatgtgagtgctgggagccgagccaggtcccctggaagtgcagcagccagtgctcttaaccacctagccatctctccaggcccacggtatttctttttatgaccaaatagctcgtttgttcggccatctgttgaagatctctctggatcgtttccaccctttgaacgttgggcttctgcgaggggccaggtgtgcatttctcttgagtagctaggtagtagtgagagtgcaagtttccccttttagcagattgcaaaagagttaagtgaggtaatagatgctaagtttccaggacagcctggcaaacagaatccaagctgagaattggcactgaggaggcagaagcaggaagattgcctgggctatggagtgagtgagatgctgtctcagaaccacaggatgaagccgtagttctttctagtcctcttctgtttttaaaaggcgccacctacgtcccagtggtccctcttggttccatgaatcgtggcatttaggattcatccagcttgctcaggctctggtgctactgtccagggtttgagactatgacccctgcttgtgagggtgaactcactaggagactaaggcaagggggacaggcactaagtgataatgttctccccatcccctttgtcacttgtcccaggctccccagaggtccagcttagcccctaagcatcatgtcggacagcgatctaggcgaggatgaggggctcctgtcactgaccggcaagaggaagcgcagagggaacctgcccaaggagtcagtaaagatcctccgggactggctctatctgcaccgctacaacgcctacccctcagagcaggagaagctaagtctctctggacagaccaacctctcggtgctgcaggtaagaggggatcaggcatcaagtctccagctctgtccccattccttgtggccttggcctatcataacccctgctgggataagatgagaagccctctcctggcccccagggaaagtgaggtcgccgaggctgcactggaggcttgggcccttaggaagggatgaggagtggttctagttgaccttgaaggtgagaagacacaggagcagaggttctggggggcagcccagagcacttgcttaaaaatgaattgagtgaactgaggagatgacccaggggttgagagcgcgtcctgctcttcctgtgcatccgagttccggcctctgcacacagcgggcagctcagagccttctgtaaccccagctccaagggcttctcgcctctacaagtgcacatatgcccatggaattttttttttttttttaatttcttgatgtaaaagagaaggtcttttagccgtcgagctggaggtaggtagacaagccggcacacgcctgtgatcccagccctgagaaggaagaggaggaggctagttacacattcctctctgagcctggtggaactgttaggaggaacgcattttaactggatataaaaggacctttgtgaaccacattgaggggcacactcgagacgcttgtactagaagttgtgtctcttttcagttgtcctgccgaccagcagatgggtttgctctttgcataatgctgacaccccacccccaccccaccccccagcgctctgggtctgggttggctctcagcttccctagtttatgcagtaggcccttggtctaggccagagacctgctcctggctggctggcctcactgctcctttcgtgagccagcaggcctcctcttgcttctctcctctggcctgtctaccatctcttcaacccacaagctggctccttcctcccgttacctcacctgatcctgcgacttccgcggcttcccacttctgttcctccttcccggaaaaggcacagcaagtggtcagcctataaaaattctgtgacctcactctacaccctagacggccgtaaacccaagtctgtcttgagacggggtctagactcaagttataggacctgattgtcagcccaactttttcacaagaggactctggatcttagccagtctgctactgttgccctgagcctcatttcctcatctgacaatggaaagaggcttggagcattctcaacaatttaaacaccatttggggtgctctgcagcatggaacatttcacatttaattcctgggcccagctcctcctactaggatactttcaaggaacatctagccctggggtgtggggtacagatggattaatactaagacaaaccaagagggacaagggaacgcagagcctggggcctctttcaggactccctggaaggtgtctttgaacttacgtgctctagaggcacataggcagaaacaaaaggctgagagtttgagaccagaactgcacagacagcctttgctggtccccctgcctccagccttttatctttcagtcacggaagtacagatcagatcatgtgacacatcctcggatggggttcagaattcagagcaccctctgcagtacttcctggggctagcccttggttatgactatccagggtcaatcctggccttggtttgtttcactctcatcgagcacttgtctcttgcaaaccctgcttgctgtttggggctattgcagtacatccctatggctcctcacacatgtcctgtcaagctacttgtcatacagtattgaaatttcttcttgtcagggacactatttctcaaaactgagaaatggactgaccgtttttttaaaagttggagaatgggctgagtggtaaggccctgactggcctagcgcaccagggagcagggttctccagcactgcacaaaagagctgttctgtggccctgcctcccctctccatgctaactttaatcataaatgtgcattacaaacataaaactgagtttaaaacgtttatttttgctcttatatatagctatcagaccagttttccaaagtaaataaatttactgtagcgtattttgccccctgctccagatgtgtagttggacatgatgcatctacttgtacaggccagagtgaaaagagaaagtcaaaatgtccttgcagagaccagtgaggtttacaggaccatagcacttcagcatccaagtatagggcagggatcagccactagcgtgtacagagaactggagacaagtggggaccatctggcactccctaaaggatccctcacatcagcctcagcagcgcacccacttttcttgaagactcttcaggcacctcaagtgcctgagtggaaattgacagctccagttggccctgccctttctcacactcctttgagatcttgagcccctgtacacatttcccctccatgttatggaatataaggttttggtttgtttgttgagataaggccttgctgtggagccctggatggcattgtctcattaaaagttgtagctgcctgcacctttcagtgctgggcctaaaggtaccacagcaggggcttgtctgtattgttgttgtttaagctttgtttgatgggtgttttttgttgttgcttttgtttgtttgtttgtttgtggcaggtcatcctgacctgatagtcctggaactctctatgaggatgaccagactggcctcaggcctctggcctgcaattcacaaagatctacctgcctctgcctccagggtgctgggattagaggtgtgtgccaccatgccttgctggaatgcagcttcttgattccatgcttttcccgttaccaacatcacctgtcactccaggacatcagttgcctgtttacaagtctgtctcatctctgaccctcatccctgctgtgggctcttgataaccagatcccttactctgaccagggaaccccaacctctaaaggaatctgctgcttccacaggacctgggcatctctactggacccggcagtaggacctttagctggctgcatttaggtggcacagagttctgtgggtatgggaagcagagaccttagttttgttgtaattgctccactccaggtgttttttaaaatcagtgtctgccaggaaaggaagacactggaaagtcattgcaactgcagaaaatgaaatggtggtggaaatgttcgatgctttgtctgtatttagtttcaaattttcctttgctcttaaggacatttccaagctctcccaccaagctacactgctgccccaaaggaagaacattaaatgaactagccactggcccgacaggtatctgcattatgccaagctggtttcgtctccctggggcacctcttttgattgtgtctttttacttgccctggagccatgtcattagcaagtcagtgagtcatgtgtttgctaggctttgtccagggccaggcaattgggagaataaggcacctcctcttcccccaaaaaacaacaaaattgtattgtggaggattggcacggtccttgggactgtcaaagcctatgttattgattggattcatctgatttcctgttacaggactgcccggagggttctgagtccatttcttagcttccgcaccacctgggctgcactaggagggttctgcactgtgatgaaggcagtcagaactgtgcctcctaagtccttttctgacattcctgagcccaccagctgcatagctaatcccctggttaggccctggggaagaaaggaacctggaaaggctatgtaggagtggcctgtccccctgtgcaggcagtcactatatttacggcctgtcctgttctacctaagctgagtcttccataggcaatagcatgtcacctatcctgcaaggccctcctgtgtattttctgagtgtctgtgtgacgctgttgtcacagacctgttggtactcagcagaacaggctagataaacccctgttctaaatctgaagagcagctctctagcgaccttgtttaaaagcatgcattgccaggtggaggtagcagctcacatctgtgactacaggaggatcaccaccagatcaggtcaacctaagctacagagacccagtcacaaaagaaatccaaagcttgccatggtggcacatacctttaaccctagcactcaggaataattggaggcaggtagatgttaagttcccagccagggctacatagtgagatgtgagatcctaatctaaaaaaaggaaaaatgagatgtgtcttcgcaaccccagttcatcctacctgcctagaatccatagagcagattgaaaatagccactttaacagattttttaaatccctcccaagaactagggatgaaactgggtgatagggcacttatctagcacacacaaggccctgggtcagtccctagtactgggacagggaaaagtgagacccatctgtgataaagggctgagcatgaagttcagttcgcagagtacttccctaatcgtcagagctctgcgggtccccagcactgcataaatctaggggttgctctctcaccccctcgggtgtgcagttttatgggagaagacagagcagtaggtccaccacagagtctgtgggacaggctgagtgtggaggctgtcctgggctagctgcccacacagctggcagctgctttccagaaagccgccttgctttcttccaagctacattcatctccaactttgctagacaagtcactaaaatggtacctgtttcctgttcccacctcacagccagagggaagagaaagaggcacatggctcctattccaggtgactgagggaggtaggaagcaggtgataggtggtgcctgtggtggggggaagggcctaaagcctgccccctcctgctgtctgctcaggtgtagccttcaaacctgaactcctagtgatggccactacctcaacagtggagagcgtcaacaaaaccgtgtcacgataaagattaaatgagtagggtggtcgggagctaaagttttgtgttttaagtgatgcttttaagattatgagaattacttaaactgtccttgtggcaggaaagggaagatggagggagactctagccaagagatcagcttgtgaaaccagctgtgtaccccaaggtagtgtgactttaggcatgtctcttcatctctgtgttccccctttgtaaggttttggggacactgcctatgtctcccagatttgtgtacagatttaacagaattgtcgacaaaggggttgcaagacaccaatgtcacttctgcttccaacccaggcagcagttcagctcccctccccactttgtaaaggacccagctagaactccagccagtggctgcttgtgtgtgaaagtactgaggagaagagagagaaaagaatcccaggggcagccctcttagagctggatcggagacgggaagaggaaccacagctgcctctgtcaggttagcttgacagggctcttctgtaggatttgttataattgcagctggctgctgcttatcagtctctatcatgacaggtatcttgtctctttggttagacatggcggagatctcatgagaagactatacccaagagcttgctcaagaaatgtaccaagaaagaagcctagtactagtcagggctggaagatgggtacaagagcctgggtctctgatctgagcaggctgtagagaagtctgaggcattgattgctgcatccttctaaggaagaaggcttctgagtgttctttttcctacagcagctggtacttagtccaggcttggaacacgtctgctgatgaactaacaggacagaaggacggacctagggtgtgaaacttgtcaaaccacatggtcccagctgaggacttgtcccccgccatgacctcttccgtgttgaagtttttgttcttggacctggggtttttactgggttgctttctcagcctaggctcctgagtaacaaggaccacacagacagacaacacacgttcacaacctgtccgttcaggagtccttgcgtttacctgtttgaagcagggttttactaagtagcccaagttggcctcactcacacttgaactgatcttcctacctcagcagcctcccagtgctggaattacaggtgtgtgccatcatagctgacttcattaactcagcgacccgttagcatttgttttttatcgctcatagttgcagaggcttggtctgggattgcttgctcattgtttctggcctggttatgaagcaatggcatagcagtgtgctggacagtggggaagctgtttgtggccaacaggaagcagatagagatggatctcataggtttatatactgttccttcctgtttctgggcatgtcctggtggtcattcacctgtttgtttactgccattgcataaccagatgatgtcagcacctcagggcagggcatatgttaaaaggcggccccagcaagcaccagtgactggcctgaagcataaaacaacgatgaataagaagccctgaaagaagagtaggaaaatgtgggaggctctaactcaactgtttcagagacttcataagctggcctcagggtcctgagacagatagggtgagaagtgaccatctgggtcctgccaggtgagattctgccttttgcaaggctgagctctaagtgtgttcaccaggaatgctggagatggcccaatcattttacagaataaaagtaggatgcactgtgctcagtaagtagtagctgttagagagctcggcactggaggtgcaaagcctgtgtcttggtccatcagtaggcaagaagtgttccaggaagaagggagtgtgctatgtagaaggtgtatgtattaggtgtagcgttctttggaggttaagtttggtttggagttattttggaggtggggggggttgggatgggtttctctgtgtaaacggccctggctgttctggaactcactctgtagaccaggctagcctcaaattcataagagattcatctgattctgcctcccaagtggtgggattaaaggcatgtgccaccttcccccctcagggtttacatacccaaagcctttgcctctagagtgctgggattaaagactgtcctgtgttttgttactttgttttgaatgagcagggcctaaaagcagttgcacagctgacagcaaaagagcgggaaggaactgggtcgggctggaaaggtaaactgggcaggaaggaggggcttagtgccctggctccttatctggactcaagactagtggtagtaggaaacaatcagccacggcctagccgtaccacactgagaacagaagctggaaagaggaccgaaagagagctgtgaagccaggagtgaactcggtggtaatcgcttgcctaacatgagcagggctgtgggtaaaccctcaacactgcaaagacggtggacacgtgggcacagggggttaggcctgttcccatcctacacgcaccgtgagctttgaagcatacacagcatacagagagggctgacagaccccatggccctagtgtagcttggaagcaatctctcctctccctggtagccccttcggtatctctgtgtctctggtctgtagctgctctacaggcctaagagtgagtgactagttttcctaaacagtcaaacattttcctccctgcacctccttaaatataatctgaactaccatcgccatcccatcccccaattctccgcataattggtcactcctttgcttagaactctcctatgggactggtgagatgaactgaggatcaatgacgtgatccagagggtgaaggtgctacctgccacagaggctaaggacccacaagatgaggagaggaccaactcccacaagccgttctctaacctctttgagcacatgatgaacacctgcgtacacttgtgtgttcatgcccacatgggaggcagaggcaggcagatgaattccaggtcagcctgatccacagagtgagttccaaaacacctcagcgatacacagaatccctatctcgaaaaaccaaaatataaagccaagcacggtggcttttttattttttaagttttattttatttatatgagtacactgtagctgtcttcagacaccagaagagggcatcagatcctttttatagatggttgtgagccaccacgtggttgctgggatttgaactcaggacctctggaagagcaatcagtgctcttacatcagtgagccatctctccagcccaagcatggtggctttaatcctgggaatcagggagaagaagcatttgaggccaccttggtctacatagtgagttccagaacagccagagctttacagtgaccctgtctcaaaaaaaaaaaaaaaaaaaaaaaaagaataccataaaaatcagtaacttgtatggctccctgtgttcatagtaaaactaaatcctcatcctaagaggtgacctctgataaccacactgcgccaagccacacatgtctgccttcagccttctcatagggactctccagccactttgcaagtgtgacctcactgtctagccttggctttcacagaactcctatttagaccaggctggccttgaactcatagaaataggtacatctgcctctgtctcttaagatttcaattgaaaactattccctccacccttccactggccggcatcttgtctgagatgtttgcttctgtcttggtgtctggaacactatgagcattttgtaggtcttttgaatgtcgttaactgataaatatctttaacactctttctagatatgtaactggttcatcaatgcccgtcgtcgccttctccctgacatgcttcggaaggatggcaaagaccctaatcagttcaccatctcccgtcgtgggggtaaggcctctgatgtggctctccccaggggcagcagcccctctctgctggctgtgtctgttccagcccccactaacatgctctccttgtctgtgtgctccatgccactccactcaggccaaggtgaaaagccagcagcacccttcccacaagtggagctggaatcccccaaggccctggtgacccctgctagcacactcaccctgctgactagggcagaggctggaagccccacgggtggactcttcaatacgccaccacccacacccccagagcaggacaaggatgacttcagcagcttccagttgctggtggaggtggcgctgcagagggctgccgagatggagcttcagaagcagcaagagccagcgccacctttgctacacactccgctgcctttcgtctcagaaaacgccaagtaggcacctgctcccgggtggcttgaggttcctggctcactgccctttcatgcagagggttatccaagtacggatcactgccaagcatcaggaccattctgtccagtcctcagctgatgtcgctgcgctgcactgttacggggcctgtactctgctgagtgccattccttcaagcgtcctctccgaggagaccaaggcaccagagccaggcatggtgttgctgctgctcctccagagagccctgggacacctgcactccagcctgctttcctaggcaggctcaggaaagctgccaagtccagacttgagctgggtccaagccgcccctaagctgtgcctcttttggtcgagccaggtgtgcacattccaacctattcaaaggacaaaggaaatgcccagcagatgtcacagaaccgactccagttgaatgtttagatttttgctaaattgttttattttccttttgctgtggtttgtgttaatgcagtaggtagcccagaagcacaggtgtggggagagagcaccttacacggtgggtggagctcggtaagtgggtaatctacttcccacaggatggttgtatagggaccagcagattctctgcagtggtgctgagttcagactagagtggttgtttaattcttggtttggtcttccctattataaaagacagaaggaaaatatccacaggtggtgggttatttgcaccagacggtcatttagacacagcagagacagatgacaaaaccagaggcacacgtgtttctattgtcgtggttaagctagagtgaaacagctctgtttttctctctgttctgagtaactcccctcaccccaccccagcgacccccaccctgcaccacctttgtagcttgtttcggatttattctggagcttggcaagaatgtcgtgtgccagcatctacttgggaggagtgagccatctgctggtcagtaggcccttcggaaagctgcttgttcacagaggcagctggaaccttcctggaggagaggctgctgaggctaccgactggcccacctcccttcagggtgggattgcaagggcctgcctaaatttcccggggaaacagaccacacttggtcttaatctctccccttttcccgtttactttgcttagttttcagcaacagtataccccatctttatatcctaagaaacactaatcctagatttgtattaaccaaaatacttgtgttctgaataaccagaagatgtgaggagccctgactgtggtctgaggttcacccgggtgtgagcacagacggggctcttggatgttgactggcttggagtgcctgttccgaggaaggcagagaccactctggcctttccagggagcccctgaggcttagcaggcttccatacctctcctgagtgacttcacccatcccttgctgtgcaagtgggcgcgagaatggctatttgtaaggggctgcttccctgggctctgcctcatgcctccctctggcttcctgtcctgtaggagacccagcaggctcaactctctgtcaccctgaggcactgctgggaagggaacatggcttcattgactttgtggtttgcccactgctaccccacctgtctgtgagaccccatgatggctgtaggatgctaaggcgggggtgatactaggatgagggatttcttttcccccccacagtgcactgagcaagggaggagggagggagccatgctgctgacatattctggcattccccctcctgggataaaacagggcatcagaaaggtagagcggtctctgcttaggttgcctgtaagataaatgtggagaagcacggttgtcccattgaacaatatttgagcaaaaaactactgtaaataactggtttttgtcttttgtcaaataaaattgttttggttttgtttatgttttaaagtcaaactgaattttttgttgtttctttttcaagacagggtttctctgtgtagccctggctgtcctggaactcactttgtagaccaggctggcctcgaactcagaaatctgcctgtctctgcctcccaagtgctgggattaaaggcgtgtgccaccactgcccggccaaactgaattcttgattggacctaatgtgctttggaaataagtgttttggttttggtttggctctttttttttttttttttttttttttgagagacatggtttctttgtaggcctggctgtagaccagactggcctcaaattctgagatcctcctggctctgcccacaggtgctgggatcaaaggcgtgcacccgtcactgagttctaaccctaccttacctctgctgctctccctctagccccctaggtgttgtgcaagcctttcctggtctgcatctgtcccgtcaagcactgtctacagggatgcattccctgtaagcctggccagtccacggactacaggtagacttggagaactgccacttaggaggtgcagttttgtcccccaggtgaggagaagcatcatatcaggcggatatgagagacacacctgctttagccacagctcaaggcaagaagacctctgcttctctgcgttgtcagcctgtaaattcccatttgattccattcgctgtgggtgtattttgccacatcatgattataattgtggcataaagtacaaacgacagcagtagtgaccagctctgctgtgtgcatgggcagtgctcatctgtgtcttacacacttacacaggttacccacaccctgagaaaggcaactgagtgaggatttaggtaactgaactcagccagtataggtatggatttaggacttttaagtgtcttgcttcaaggtcactgagagacatccaaaacccagttaaagtagtggtaagcggtttaccactaacaggcatccagttatctttaacatcaaatgtggactaagcacttccacaatcaaatcagctggctgcattttttttttaatttttttttttttttagatttatttcatgtgtgtattttacttgtatgccaccacaagttagaagagggtgttagatgccctagaattgtagttagagaaattacaagccaccatctgggttctgggagccaaactcacgtccttggcagaaggaacaagtgttccaactgctgggccacctccccagccttcgtttgatttggtttggtttggtttgtgataagtgtctcctgtatgcatctagtctagccttgaactcctgatcctcctgtagctattactctttcatccggggtctgttagtgtcccctacagctcaacagttaggcccaagacttacaggaataggtaaactcaaaagaggtttgcttttgctgggcatagtacacaggtccagtgttcttggagtagaggcaggatgatgagagactccaaggctagcctaggctacacagcaggatgttatgccatctgaaaggtaattctgtgtgtggtttggatgtgaaatgtctcatgaaggccctacagttaaaaaaaaaaaaaaaaaaaaaacaactgttgcaaactgatgggcttttgggactttttttccaggacataagggctttagctgactagtcattggatgagtttataattgaggggtgtgggaaagtggagactaagggggcactaagcaggccactggatgggtgggtgtgccctagcagaacctgtgaagatcgcattcctgtttccctccccttccctgttgctgctgtaagcaccctttctccaccttaaacctctaggcaagccttgagctagcataaaccttcgttcctttacattatttctcaagggatatggtcatggtgatgaaaatgtgactgatacaccctgaaaaagagaagtgttgtgagggttccactttgtaaagagaaatggcttctctaaatgaaaccctaaccttttcagagaactaaaactgaaactatctgccgagagctaaagccctagccctgttgacagagtgaatgcctggcgttcacaaagtcctggctttgatcctagcaccactcactcaaatgataaccagacaagcctgtatctcagaactcttgaagagctcagtgtatgaatgcactgctgcagagcttgatggcctgagttcaattcccaggacccctgtgacaaaaaagagaagtgactactacaaattgtccttttgtctcctcatatgtagaggggtacacacgtatccccacatgcacaaatgtaacttaaaaaaacttttttttttttttaagttcaagatggtcttcagctatatagccaagttggaggctacctgagatacataaggcctggtctcaaaaaaaaaacaaaaaaaaaccaaaaaaccctcagaagccctaggttgataattagcttgaatttacatgcaagtgagactgatgcttcttgtttttaggacagagtctcaccacgtggcctaggctagcctcaaaatcagggcacttccgcatcatctccaggtcactccacctgtctgtgtgtgtgttgggaagaagggttggggatcaaaccagagacttgccacctaccagggacactacaagtcagctagcccccagactcccaatcttaacagttacaagaaagaaaaaaggtctcgggttgggaaagatggctcagcagttaagagcattggctcgtcttccagaagatcccagttcaattctcagcacccacatggcagcccacacctgcctgcaactccagttccaggggtccaccacacagacatatgcaggtaagacagcaatgcacataaaataagaaagaagaaagttcttccctgaatcttgtgacttcttagccctcctgagggtcaccttcctgggactttccactgtaatccctacgctcccattcctggactccacatcacagactgaaccaaatctgcatgtgctacccaagtactcttccctgtctttattcaccgaataacatgggcggtggcttccccaccgtacgtcaggttgctgcaatccatcagtgtgtatctgaggccagctccaactccactgcaagcagctgtcagggacacgggcggtcggtctagtgggaaggaaatagtctaatggctgaggccatgtttgacttgctaaaatcctaaaacctcacaaagacaaattgtgccctacttccaaatctgactcctacctccaaacctgacttcatcaagttcttagactccatcttagaccacccaagatgtttattttaaccagatggatgccctgggattcagccagattcttcacttcctaagaaagcctttcgagaactcaaaaaggggacaagtcagtctccctctttctaagctagggcttacccagctcagcttcaggggaaaccagaagcacagaccgggtttccagtggatcttaacatctaagttgttgatcaccgtgagctacacggcaggatcccagaccctcccaaccttcataaacttgcctgactcctatgaaaaatcaaaatttgataaatttaagacttaaagttgaggggctgaagagatggctcagcaattaaagaacactaactgctcttccggaggtcttgagttgaattcttagcaaccacgtggttgctcacaaccatctgtaatgggatccgatgcactcttctggtgtgtctgaagacagctgtagtgtactcacacacatacaatttaaaaaaaaaattaaaagttgaacttcacaatctataacataaatagttggtgggtgtttttctctcctgtaaaagctacttgcaggagttctgggctgggtgggctggtgcagttctgtaatacttgcactgggggcttgcaggcaggaaaccctgggttcaagtcctattactacataaaactaaccaggcatgatagtgagaacctataatcctggcacttggaatagagatgtgggaggaaccaaaatacaacatcatcctttggttggttggttggttggttggttttttgagacagggtttctctgtgtagccctggctgtcctggaactcactctgtagaccaggctggcctcgaactcagaaatctacctgcctctgcctcctgnnnnnnnnnnnnnnnnnnnnggcccgagggcaatgtggaaaagactctttgggaggggactgggatcttgatagttgtttcaacagatagagttggaaaactgaaaatctacatgccatgcaaaagaatgaatcagagctttcacaaatacacagaaatgaactctaaataaatgcgaaactgtggctcattgttagagggcttgcatagcctgggctacaccctgagtttcattaacaccaagaaaagagcatgcaaattttatccccaattcctgaactccggcggctaagccgtagtggcgcacgcctttaatcccagcaatcgggaggcagaggcaggcagatttctgagttcgaggccaggctggtctacagtgtgagttccaggacagccagggctatacagagaaaccctgtcaccaaaaaaaaaaaaaaagaaacagggtctcttttctttatatagccctggctgtcttgaacatattatgtagactaggctggccttgaactcacagagatccacctgcctctgtcgctcaagtactgggattaaaggcagttccacctgaaaaacaactgaatgtcactctgcagctcaggctagccttgaattcttgatcctcctgactccatcttccaaatgccagattactcaaaatatgattaatcagtcctaagtacgccacatgagcacatctgcacatgtgggcacacactcagtcaaaaatatacacataaataaataaaataaacttgggcgatatgagacagggtctcactatgtagtcctggctgtctcggaactcgctgtgtagatcagcctgaccttaaactcacagagattcacctgcttcttcagtctgatgctggaaccacacttggcaagataactttttaagagcatacacaggctggcatggtgaggcctgcttttaatctcagtaccctgaggaaggagacacagctgaaactgtgtaagtttcagatcaacctggcctatatagcaaactccaggccagccaagggctctatagtgagatcctatttcacacacacacacacacacacacacacacacacacacacacacacacaccacacacacacacacacacacacacacacacacacacacacacacacacacacacacacacacacacacacacgactggagagagatggcacagtgcttacgaattctggcttaggaacacacacacacacacacacacacgactggagagagatggcacagtgcttacgaattctggcttaggaattcagttccgggctggacagaattaagagcactgattgctctttcagaggtcctgagttcaattcccagcacccacatcatggctcataaccatatgtaatgggattcaatgccctcttcctgtgtgtctgaagacagcaacagcatatatatgtacatatgtgtgtgtgtgtgtgtgtgtgtatatatatatacacatatatatttgtgtatacacacacacacacacacacacacacatatatatatatatatacacacacatataaaataaacttttaaaaaagaaatcaattccaagcacctgaatgactgcgcccaactatctgtaggagatatgtcgccctcttaggcagcaggcacacaaagtggtgcacacacagacacacacacacacacacacacactgcaggcaaaacacccatactatggaatgaaataattatttttaaaaagaaaagaactcggatttagagtaaaataaacccaactactaactcaatgattccaggcaaattactttgcctttataaactcactgcataaaagtgatgttccgggctggagagatggctcatagattaagaacactagctgctcctccagaggttctaagttcaattcccagcaaccacatggtagctcataaccatctataatgtgatctggtaacctctcttctggcctgcaggcaaacatgcagccagaacgatgtatacataataaacaattcttggggggtttttcttttcttttgttttttagtgatatcccttagcatagcacatcctgtgtggcaccatctggaggatgggactgattttgctcatttgtctgtttgaggcagcatctctcactctgtatgctagaccagcttcgctgtgtaacccaggtcagacggggcacgggatcttggaatgtagccaggccagcctaacattcctccccgggtttggactgcagacgagtcacagtgtacaccacaacgtgtctttgtacaagttcgcagggggtgctgctccttctgtcctttcaaaacacatcctgggaagtgctaacaacacacagtgaggacggggtagctagcccgacacctactacttttctattccccctagtggggttctcccctggtttcaacttgcctcatccttaggaaagaatttctctcttgggatctcagcttcacattcggatctcagaagagaacgctgagcaagaggagacgttagggttcacagaattgttttttttcccgttgagacaggttgtcgtgaccggggacttaccatcctccagcaggtagacaggcttgcaccatcgccaggcgagggaactttggtttggtttttgtttttgttttgttttccatagtcatgaacaaagtcgtgaataacgtgtaggtttaggagagaacgcacagaaggtaactccagtggggcagcccagggcttccggggaccaaggacccggctcgggaggcggagcaggatgcaaggccacttcttctttgtgtcgctccgggggacgagccgcggctcagccggcaaggaaacgtacaatctcggctttcctcggaggggctgtgcctcagtctccacagcgcctcctcgcgcacagatcgcctccgggccgcacttgtcccttctcgctcaccgtcccctggcgtccgccggaagcttctgtcacttccgcccaccggaggggacgctcgcgtcgaggcgtcgccgagcttcggagccgaccgccgcgtggccgccgattggctgcgtgcgcacgtcatcagggccccgcccctccctcggcggcgcctgctccgtggagcttagcgagccggccgctgggcagagcgagcagagcctcggcggtccactgtccctcgctgcccggactaccgctgccgccccgcgcgccgagtcccgcggtcccagaccccgactcccttcggcttggcccgcgcgccccacgcccggctcgggcggcgcgacgggaggatgagcggcgggcggcggaaggaggagccgcctcagccgcagctggccaacggggccctcaaggtgtccgtgtggagcaaggtgctgcggagcgacgcggcctgggacgacaaggtgcagaaggcccggcgagggaggacgggcccgggtctccctcgccccggcccatcggccgggcgcggccatgggagcagggagcggggtgccaagggggccggcgcgtagtggagcgagcggagcccctgctatcccccgccgtttgctccgcaggatccggagtagttagcgcttctgaagactgcgcacgtgccgggtgcggaatccctgaagtgcgtttactttgcacattgcgaggggtggctctgtccttgctcgcttagatgagaaagaagacatgccctgtgagctttaagattcgagagccggttctaagaccaccttaagagggtgtgagttagtaagaaagtcgctagacatgggttagaagaggttggggacttaaagatgcactcgctggtcatctccagaggatctgagcctggacgcctcctatcattgctccattctgtgatcttcaagcctgtcaccatgcagcccgattctagatggtttgaaaagaatgctatatttggactccttccgttgtttggactgttgaaattgggcttccctcccttcagttccgccatggagggggggagtacttcctgaaggtgcccttggcctgcccccagccctgcccagctcttgcaaaacctgtcgtctttgtgaactgctgtgtcatattttttatcttccccggtccaaggactggtgtctggagtccagggcagttcacaaacctgagtgctctttgttgggtgaaacttagatgagctggcacaggcctaagcacacacttctccaccaccacactttcctaactctggctttctcaaaagtcgctgtacaggaagggtgggaactgaagttaatagtttttcttcctggagactctctagaacttagctggccagccaagggttatctgtggccaggagcacagtgcccattgtcacttcaaaacaaacttctatttacgcagcttcttttaaagaagtaacgacttctctaaaatatggtagagaacaggctctggaattagtcacttaatagtctaaatatattgtttcccatcacactttagtagaaggaatgacagaagaaccacatatggagcaaggtggtggtggtagtgcactgggaggcagaggtcggggaatccctgagttgcaggccagcctggtctacagagtgaattccaagacagccagagctacacagagaaaccctgcctcgaaaacaacaacaaaaaagaaccacatatggggactagagaggcctcagcagtttagagtgggctccaatccaagcacccatatggtgagtcacaacggtctgtaactccagttctgaggagttccagtgttccagcatccatgggcagcaggcacatacatggtgctcatgcatacattaagataaaacatacagggctggtgagatggctcagtgggtaagagcacctgactgctcttccgaaggtccggagttcaaatcccagcaaccacatggtggctcacaaccatccgtaacaagatctgactccctcttctgtagtgtctgaagacacctacagtgtacttacatataatcaataaatctttaaaaaaaaaagataaaacatacatataaaataagtttagaaaaaaaagaaaagagccatgtgcttagctagacattgtgaaccacacctttagttcagtactcttgacccaaggcctagtttacatagcagattccagggctacttaatgagtttgtaggaaatatttaataagcttttgcttctccacctgtagctgtcctgtggcagccactccagataacgcatacattgtgtcttttctataggatgaatttttagatgtgatctactggttccgacagatcatcgctctggttttgggtgtcatttggggcgttttgcccttgcgaggcttcttgggaatagcagggtaagtcttgggtatcacagtcttgtggtttttgtctcactctggagcttagaacttacaggagctctcttatacgcgctaggattgtgagcaagacacagtgttcaggatcctcatttctattttttatttaaaaaaaaattcttttaaaggcacagggtctcgtgtagcccaggttgccccgtgactcctgctccttttgcctccttttcccaagtgctgttggtgattacaggcgtgcatcaacatgcttggttggctctgttttccttttatgactggcactgtgtgcatctgattactaaagcaaagaagtgagcattagcactcctgggctgcagtgttcttagttcctcggcctgggagcatctcatgttggcgtactgtcctaagactgggccagtctgtttattcatggctctaacatgccttcttttgagcggttatgttattggcaacaactgtggcctatgtggaagtttgggaagtagaggagctttgtagttgatgacctttttgttgttttggtttggttttgtttttgctttgcattttgcttgataaacagcccttggccttggcaggagttactttctaggtccctacattttaaaagtggaggcctgactttgcacattttactttcctcctggccaacgacagcagccatgacacctgctcatggttcgggctaagcagttagtgaaagcaagtctgtgccggtgaaactgcatttaaaggcagttaagttggaactgtgagtaagctcttacagaaggaaggaagaaggctgctttttctctttcccttagggaatgtaagtgagcactctcctgtctcacctctcccccatggaaagccatgctggttggttgggggatgacagtgtctcttactagttctcctcctacttcttctcttttaaatgtgtattggtgttttgcctgcatgtatgtctgtaggacggggtcaaatattggagttacaggcagttgtgagctgtcacgtaggtgctgagaattgaacccaggtcctctggaaccactgagctatctctccagcctcttactagttctttagagagggggaagtgagtatgtttcagaaatagagttgtataatttcttggacagtagtaatcccaaagaaatatatagtagttcctcttgctgacagatctattccaagaccctcagttgatactcaaaaccaattacatatctctgaaaaagtttaaattataaatgaagagctagacatgatggtatatgtctgtaatctctgtacttagggaagctgagacaggaggctgtccatgagtttgagaccagctggactgcatagtgagtttctggccagtcagccaaggatatgaagtaagactctgtctcagaaaacctttttcaaaagttacaaataaatcgttgtgagagattaacagcagtaactaataaaaataacaactctaccctggcaaggtggcacacacctttcatcccagcacttggaaggaaaaggtaagcagacctccgaattccaggccagcctagtctacaaagcaagatccaggacggcaagggctgttacacagagaaaccttgtcccttgtctctaaaaaaccaaaaccaaacaaacaaaaaacccaactataataatacaagccatgtaataaaattacatggttcttttctctgtctcagaatatttagttgtcagccgggtgtggtggcgcacgcctttaatcccagcactcgggaggcagaggcagacggatttctgagttcgaggccagcctggtctacagagtgagttccaggacagccagggctatacagaaaaaccctgtctcagggaggggggcgggggatttagttgttgtatactacttctgctagtgatggtattagatatttgcagaaagtacttaatggctttttttagtgtatccagttaattttgaggctgttactaagtagagagccagggttgtttgaggacaagcactgatactgtcacaggcctgaaaaccaagccaccattgacgaacaggcaagataatctgcattgtaagtggaggaatgatgcggtgaagcggggcagcagattttactcacagcgtggagtggctgcagttgaagtgaatacagtttatttacatggcacatgtttgtggaatttcccatttgtccatgattgatggtagataactgaaaccacacaaaaactgaggaagaggtacctactattctgtgcctcctaaccaaaaaggtgtcctactttttttataccgagcaaggcattatataaggaaaccattaagagttgatgctgtgggtgcttaaggtgggttggggggtgacgagacattggacctaggattctcctaggtggagaaggtgaaaggtgctgatcaccacacttgagctaaaaggaaaggcagagaagagtgccagaggatgagggggctgtccaccagtgtaagggagaggatgaggaggctgtccaccagtgtaagggagaggatgagggggctgtccaccagtgtaagggagaggatgagggggctgtccaccagtgtatcgggtgggtgagatacttcgagttcagagctcctacacctgtcagatcttacaatactattttttctctttggtacacaagctgcaatgtatgtgcataaagaggccaaaacagaatgccaggtgtcttcctctattgctctgtgcaatgttgccttcagacagggtctctcactaaactagtagcttgccaccccaagttaggctggcttgccagtgagttcttggggtctgcttgtcccccaatactggaataacaaatatatgttgccatgactgggcttttatatgggtggtggggatttgaactcaggccctcgtgtttaagatttatttatttttatttatgtgagtacactgtagctgtctttagacatatcagaagagggcatcagatctcaccacagatggttatgaaccaccatgtagttgctgggaattgaactcatgacctctggaagagcagtatggtgctcttaaccgttgagccatctctccagccccaaccactgaggtatctttacagcccttaaaacattaaaaatatttttattagttttcatggcagtcagaacaacttaagatgttggttctctccttcaccacgtagaaacctagcggttgagcttgggtcagcaggtttggctcaaaagcctttgctcacttaagcccttttgtaagattttgttatgatttccttatttttaaatggcgacttaaactaactctggctgcctggaactcactttgtagacctactgatttcaaagtcacagagatccatctgcttctgcccctatagtgctgggattaaaggcatgggccactatgcctgcccttctgtaggatgctgaaaggatatctctgaagacatgcagtctgggaatgatctgacaaggaccggagtagttctttgctcttcttctgtgtgcagacagccttttaaaacttcatagaaaactccgccttcaaggtgtagatttgctcctttgaagctatatagtctagggcttacctgaggtcagtttcctcatcagtaaaatggggacaaggagtgactgagtaacttgctaagtggagaccagtttgtcaggcgtacatgagtcgtccactgctgttgtcacgtgagtaggtttacaaacagtgggaaaatgtgcccgagagaacaagaaactgaatgcactttgtactgactcggccagtgtgtggggccagtgtgccagagttgtccatttctgggattcagtcccacactcaccacagccagtttctcaccgtgtacaaaccctgacttcctctgggttggaactttccctactttggaaaggccaagaactttgattttgttatttctccgtcccggcttcctttgctttaggactgacctcctggagcttgtctctagtgaattcccctcctctccagtttagctgtcctctgtccagctcctgtcttgctttatttcattctgtgtggcagtcggttacagtaaaacccgtgcttccattttttgtaatttgcctgagaactggcggacagctcttctgtctactaaggtattgcgttgacgacccacctctgggtctcagctcagcataggatcactatgtgttcagataatgtttgttaaactgtttcgtttatatgtgtatattacgtggatttatttctgtgtgtgtgtgtgagtgagtgaagtggacgcccattcatgtagaagtaagagaacatcttggagtcagtgttatccaccatgtggcttgatctcagattggcaggcgcagccttaaccgtgagacatctcgctggtccttttgttgttgtttactgcaggggatggggactcactgtattatgcaggctgaccttgaattaatcttcttcctcatcctccaaatacaagaatgacctggaactattttttgtttccacctcatactgggtttacctgctgtatgactcttcc

SEQ ID NO: 1343 - DNA, 876 bp, Mus musculus
ccgggccgagttcggagcacaaagccgagcgcgcacgctccggcggccccgcgccccaagagtcaccctgcgcggagtaccagggaacgggctgggaactaaactttttcctgtcccaaaatggacacgctccccagaggtccagcttagcccctaagcatcatgtcggacagcgatctaggcgaggatgaggggctcctgtcactgaccggcaagaggaagcgcagagggaacctgcccaaggagtcagtaaagatcctccgggactggctctatctgcaccgctacaacgcctacccctcagagcaggagaagctaagtctctctggacagaccaacctctcggtgctgcagatatgtaactggttcatcaatgcccgtcgtcgccttctccctgacatgcttcggaaggatggcaaagaccctaatcagttcaccatctcccgtcgtgggggtaaggcctctgatgtggctctccccaggggcagcagcccctctctgctggctgtgtctgttccagcccccactaacatgctctccttgtctgtgtgctccatgccactccactcaggccaaggtgaaaagccagcagcacccttcccacaagtggagctggaatcccccaaggccctggtgacccctgctagcacactcaccctgctgactagggcagaggctggaagccccacgggtggactcttcaatacgccaccacccacacccccagagcaggacaaggatgacttcagcagcttccagttgctggtggaggtggcgctgcagagggctgccgagatggagcttcagaagcagcaagagccagcgccacctttgctacacactccgctgcctttcgtctcagaaaacgccaagtag

SEQ ID NO: 1344 - protein, 233 aa, Mus musculus
MSDSDLGEDEGLLSLTGKRKRRGNLPKESVKILRDWLYLHRYNAYPSEQEKLSLSGQTNLSVLQICNWFINARRRLLPDMLRKDGKDPNQFTISRRGGKASDVPRGSSPSLLAVSVPAPTNMLSLSVCSMPLHSGQGEKPAAPFPQVELESPKALVTPASTLTLLTRAEAGSPTGGLFNTPPPTPPEQDKDDFSSFQLLVEVQRAAEMELQKQQEPAPPLLHTPLPFVSENAK

SEQ ID NO: 1345 - DNA, 1656 bp, Mus musculus
gccacgctctgcacaaagtttgtttctgcctcggggcggtgggggagggtgcggcaggcgggatgggaggagaggggatctgacgtcaggtcgcgaggtgctttccagccgcgagctgtcaggcgggtgtcagacccggcaggtacgcggcgcgttcccccggtgccccccgccccggccgggtggtcccacaccccaccgaggccgcgtgggccggaaagccgccagggaaggctccccagaggtccagcttagcccctaagcatcatgtcggacagcgatctaggcgaggatgaggggctcctgtcactgaccggcaagaggaagcgcagagggaacctgcccaaggagtcagtaaagatcctccgggactggctctatctgcaccgctacaacgcctacccctcagagcaggagaagctaagtctctctggacagaccaacctctcggtgctgcagatatgtaactggttcatcaatgcccgtcgtcgccttctccctgacatgcttcggaaggatggcaaagaccctaatcagttcaccatctcccgtcgtgggggtaaggcctctgatgtggctctccccaggggcagcagcccctctctgctggctgtgtctgttccagcccccactaacatgctctccttgtctgtgtgctccatgccactccactcaggccaaggtgaaaagccagcagcacccttcccacaagtggagctggaatcccccaaggccctggtgacccctgctagcacactcaccctgctgactagggcagaggctggaagccccacgggtggactcttcaatacgccaccacccacacccccagagcaggacaaggatgacttcagcagcttccagttgctggtggaggtggcgctgcagagggctgccgagatggagcttcagaagcagcaagagccagcgccacctttgctacacactccgctgcctttcgtctcagaaaacgccaagtaggcacctgctcccgggtggcttgaggttcctggctcactgccctttcatgcagagggttatccaagtacggatcactgccaagcatcaggaccattctgtccagtcctcagctgatgtcgctgcgctgcactgttacggggcctgtactctgctgagtgccattccttcaagcgtcctctccgaggagaccaaggcaccagagccaggcatggtgttgctgctgctcctccagagagccctgggacacctgcactccagcctgctttcctaggcaggctcaggaaagctgccaagtccagacttgagctgggtccaagccgcccctaagctgtgcctcttttggtcgagccaggtgtgcacattccaacctattcaaaggacaaaggaaatgcccagcagatgtcacagaaccgactccagttgaatgtttagatttttgctaaattgttttattttccttttgctgtggtttgtgttaatgcagtaggtagcccagaagcacaggtgtggggagagagcaccttacacggtgggtggagctcggtaagtgggtaatctacttcccacaggatggttgtatagggaccagcagattctctgcagtggtgctgagttcagactagagtggttgtttaattcttggtttggtcttccctattataaaagacagaagga

SEQ ID NO: 1346 - protein, 233 aa, Mus musculus; identical to SEQ ID NO: 1344

SEQ ID NO: 1347 - DNA, 40458 bp, Homo sapiens
gagagtgctgaactcacattttatcaggaatccactcctgtggtaagagcattaatccattcatgagggcagagcctcttagaggtcccatctctcaacactattgcattggggattaagtttacaacgcatgaactttgctcatggggcacattcaagccatagcaactacacagcaccagggtaggctgtaggcaagcaggccccagaggccaagatgatggagaatgggaactactaggaatctacaggcatctggcgaagggctgaggacttcctcagagtatggaataaaatttcaactggtcttatcaagatccagagcaggaagaccaagttgacaaagatcacttagatgaatccaaaatgaatgaggatataggaggtggagaaataccagaggacacaccttcagggacagggcagttgggatgggcataagagcacaggctcaagagtcaagattgtctgggtctaagatactatttcctactaaagcaggatattttataattttaaaaaggtcattccatcagaaacaggtaaagttttaaacatatacggaaacagcagagcaccaaaatacaggaaacaaaggctgacagaaatgaagggaggaaacaactcaacagtcatagttggacttcaattcccactttcaataacagatagaacaagtaggcagaagatcaatagggaaacagaagacttgaacacacgacaacactaccaaccacccagacctaacaccgatctacagaacactgcaccctacaccacctagacctaacgcccgtccacagaacaccgcaccccacgaccacagaatacaacactacccaccacctagacctaacacccatctacagaacactgcaccccacaaccacagaatacaacactacccaccacctagacctaacgcccatctaaagaacactgcaccctacaaccacagaatacaacactacccaccacctagacctaacgcccatctaaacactgcaccctacaaccacagaatacaacactacccaccacctagacctaacacccgtctacagaacactgcaccctataaccacagaatacaacactacccaccacctagacctaacgcccgtctacagaacactgcaccccacaaccacagaatacaacactacccaccacctagacctaacgcccatctaaagaacactgcaccctacaaccacagaatacaacactacccaccacctagacctaacgcccatctaaagaacactgcaccctacaaccacagaatacaacactacccaccacctagacctaacacccgtctacagaacactgcaccccataaccacagaatacaacactacccaccacctagacctaacgcccgtctacagaacactgcaccccacaaccacagaatacaacactacccaccacctagacctaacacccgtctacagaacaccacaccctacaaccacagaatacaacactacccaccacatagacctaacacccatctacagaacactgcaccccacaaccacagaacactaccaaccacgtagacctaacacccatctacagaacacggcaccctacaaccacagaataccattctttcttcttttttcatttttttgagatgggatcttgctctgtcaaccaggctggagtggagaagcgtgatcacagctcaccgcagcctcaacttcccaggctcaggtgatctcccacttcagcctcccaagtagcttggagtataggcatgccccacccaagctaatttttttattttttgtagagatggggtctcactacgttgtccaggttggtctccaactcctgggctaaagggatcctcccacctgagccacccaaagtgccgggattacaggcataagccaccatgccagggccacattattcttaagtggacatggtacattctccaggaaagaccatatgctaggtcataaaacaaacctcaattaatttaaaaggactcaaataatacaaagtgtgttctctgaggacactataatgaaattagaaatttgggaaacatgggaaactcacaaatatgtgaaatatgtggaaattaaacaacatactctaaataatgaatgattcgaagaagaaatccaaaggggaattagaaaatattatgaaatgaataaaaaggcttaaaacttatgaaatgcagctaaagcagtgcttgaaggaaaattcatagctatcaatgcctttttattcctttgagacagtgtctcgctttattgcccacactggagtgcagtcatgcaatcagggttcactgcagcctcacacccctgggctcaaacaatcctcccacctcagcctttggaatggctgaaactacaggcaaaagccaccaacacctggcttaattttttatttttcgtagggatggggtcttgttacattgcccaggctggtctcaaacccctgagctcaagcgacccgcgtctcagcctcccaaagtgctggtatgagccaccatgcctggccatatgtgcctattttttttattattttttatttattaatttttttttgagacaaagtcttgctctgtcacccaggctggagtgcaatggcgcaggctgggctcactgcaacctctgcctctcaggtttcagcgattctcctgcctcagcctcctgagtagctgggattacaggcatgtgctaccatgcccagctaattttctatttttagaggcgaggtttcactatgttggccaggctggtcttgaactcctgacctcaggtgatccgcccaacctcggcctcccaaaatgctgggattacaggcatgagccaccacacctggcccatatgtgcctatttaaaaaaaaaatgaagattgtaggccgggcacggtggctcacgcctgtaatcccagcactttgggaggctgaggcaggcggatcacgaggtcaggagattgagaccatcctggctaacacggtgaaaccccgtctctactaaaaatacaaaaaattagccaggtgtggtggcgggtgcctgtagtcccagctactcgggaggctgaggcaggagaatggcgtgaaccatggcggcggaacttgcagtgagcctagattgcgccactgcactccagcctgggggacagagctagactctgtctcaaaagaaaagaaaaaagtaaataaataaatatagattgtaaatcaataatctaaccttccactttaagataccagaaaaattagaaaagaagagcaaaagcaggagtaagcaaaaggaaagaaacaataaatgctggggcagaaatgaatgaaatagagaacagaaaaacaatagagaaaattgataaaaccaaaagttggttctttgaaaaaagtcaaagcaactgacaaaccctcagctagactgaccaagaaaaaaagaaaaaagacttgaaattactagagtcagaaatggagacgataatattaccattaacctttcaggaataaaatcctacctcctccaatgaccagttttataacctcaggtgttacttagcccctctgtgcctcccttatctctattctttaatcccaacactttgggaggccgaggcaggtggatcacttgagctcaggagttcaagaccagcttgggcaacacagcgaaaccatgtctctactaaaaatgcaaaaattagctaggtgtggtggcgggcgcctgtaatctcagctacttgggaggctgagacatgagaatcacgggaacctgagaggcggatgttgcagtgagcagagattgcaccacagcgagactctgtctcagaaaaagaaaaaagaaaaaaaagcagtggactcctagatcctatgaaggctgcaacctagacccgacaagagatcagaaatttattatccaaagaatacagaaggtcctggacagatgaacaccaggcacaggagaggagaagacagcaacaacagaagggttacacagaaattcatgtactcagtgttgaggatatccagacccttagtcttcctccactcagcttgggaacactgtcagcaaggcacagagcccactcaggccttcatgccgcactagctcccagggccccagaccttctagtacaatggaaaaatgagactgtcaaggcatagctctcatcaaagaaattccaggccaggcacagtggctcacacctgtaatcccaacattttgggaggccaaggcaggcggatcacctgaggtcaggaatttgaaaccaggctgggcaacatggtggaacgccatctctactaaaaatacagaaattggccgggtgcagtggctcacgcctgtaatcccaacacttcgggaggccgaggtgggcagatcacttgaggtcaggagttcgagaccagcctggctaacatggtgaaaccccatctctactaaaaatacgaaaaattagctgggcgtggtagcctgcgcctataatcccagctactcgggaggctgaggcaggagaatcgcctaaaccgggaggcagaggttgtggtgagtcaagatcatgcctctatactccagcctgggcgacagagcaagactccgtctcaaaaaaaaaaaaaaaaagaaaaaaaaaagcctactgaagcctgatagcttccaacttttcttcagcagcttcctcagctctctcagccttcagagaattgaagacagttagggcttatgctctggattaggctttggtttaagggaacgttgtcgctggtctgatcatctatctagaccactcaaattttctccatatcagcaataaggctgttccctttcttattactgtgttcactgaaatagcacctttttctttatttatttttgtattttttttttctttttagtacagatgggctttcaccatgttggccagggtggtctcgaactcctgacctcaagtgatcccacctgccttggcctcccaaagtgctcaggttacaggcatgagccactgcgcctggccaatttttgagacagggtctcactctttcacgcaggctggagtacagtggcacaattatacctcaccacagcctcaacctcctgggctcaagccttcctccacctcagcctcccaagtagctgggactacaggcattcgccaccatgcccagctgattattttttgttgagagggggtcttgctatgttgctcaggctggcctcaaactcctgggttcaagagaccttcccctgcctcggcctcccgaagtgttgggattacaggcatgagccaccagacctagccagatagtttttgtttgtttgttttgagacagagtcttgctctgtcgcccaggctggagtgcagtggcgtgatctcagttcactgcaacctctgcctcccagattcaagcaattctcccgcctcagcctccccagtagctgggattacaggtgtgagccaccgcgcccagccaattgttcttgagtgaaattaaaagtgctactccagaggcggggcatggtggctcacaactttaatcccaacacttgggacggctgaggcaggaggatcacttgagcccaggagttggaggccagcctggacaacatagcgtgacctcgtctctactaaaaactaaaaaaacaaaaaaaaggcctatcttggctttcaacatgcctttctcactgagcttaattatttctagctcttgatgtgaagtgagagatttgcaactcttccttacacttgaacacttagaggccactgtacgattactaattgcaaacagctggttggtggagcggtcagaacacatacaatattgatggagtaagtttaccgtcttacacaagcatcattcatgatgccccaaaacaattacaatagtaacatcaaagattattgatcgcagatcaccatactagatataataataacaaactttgaaatatttcaagaattaccaaaatgtggcacagagacacatactgagcatccttttggaaaaataatgctggtagactttgctcgacacagggttgccaaaagccctcaatttgaaaaaaacgcagtacctgcaaagcgcaaaaaagcaaggcacaatgaaacaaggggtgtgcctgttttctttgactctcaccgaagccttgtgtttccacaacatgagaaaagggaggttcagaaggtgtggatgattttcctaaatcacctggctagtaaccaagtcccagggccacagccttcccaccgcaaggcactgtcgcccaaagccttcaggagtaagcttggctgtaggttttccagccataggcacacagccagacacaggtgggcactcagaaattagttacgtgagtaaatacccaacaactaggagaaagctaggcaaattgtggttgaccaacaagacactgcaagacttttcaggaggaagatgtggaattccacttatcaacattagatgaaaatgcagaacctcacataacagccacaaatctccctagatctcagaggcgggtctccatccgctcggcctcaattatccagagctgagtcaccaactatcctccctccagtctctccccagctctccgcaggaaccagctggagctctctactgcccacactgccaaatccaaattcttcatcctggccttcacagcccttccatctcaaccaatccagttgtttcctgaacactttcaccctccctggcctttgttggactcttccctctaccccacagaagcccatcttctcctttatcctgagatgcaacttggctcatatggattctcagtgaatgctggtgcctttccccacttccatcaaaaagggagcggtggccaggtgtggtggctcacacctgtaatctcagtactttgggaggccaaggcaggtagatcacctgaggtcaggagttcaaaaccagcctggccaacatggcgaaaccccgtctctactgaaaatacaaaattagccgggcgtggtggtgcatgcctgtaatcccagatactcaggaggctgaggcaggagaatcacttgaacctggcaggcggaggttgtagtgagccgagatctcgccactgcactctagcctgggcaacaagagcgaaactctgtctcaaaaaaaaaaaggaagcggctcacttttttttttttttaacaaaagtggatttattcatttaaacctatgtgatcaccaagttcactagaaactggcaggatgaacctggagcctcacatccaagagcctccggtttgggtttttctggtacggaggcagggaactgacttagatgacctgggcagccaggctggtctgggcttggatgcctttccacctctccttcctctcctagtctatccccagctcccttccaggggtcaggaccccaaactcctattaggcaagtcttttcttcccttagcaacccagtttcttcaaacatggggaaaaaaggtaggaggagcttcttatcacaatatttctttttaatttagaaagaggaggagaaagctaggctcacacctgtaatcttaacactttgggaggttgaggcggtggatcacttgaggtcaggagttcaagatcagcctggccaacatggcaaaactcaagtctctactaaaaacacaaaaattagctgggcacggtggtgggcgtgggcgcctttagtcccagctactcaggaggctgaggcaggagaatcgcttgcagctgggaggtggaggttgcagtgagctgagatcgcatcactgcactccagcctgggcgacagaacgagactctgtctcaaaaaaaaaaaaaaaaaagaaaaaagaaagtaggggagagaaaaatgacaataacttatcacttggaaaaagttttcccactaaagttctcaccaactatgtccaaagtccctccttgttgggacactgtaagctgtcaataaatataccttggtcatgcccctacattagcgcgcaccaacttaccccattttaagagcctgcggtagagaggtctcagagttgctataatgggccagctcctggtgaggggtatttagttgtttgcaattttcccgaatgaacagttctgcaaagaacaatcttctataagcatttatctttgttgtacagctacttcaaaagacagattcctagaagtggaattactgtcttagagaatctacacattttaaattctgatacttactagttcagaaacttgacacggtaattctcaaactctaattgcacttaggctttatctgtgaagcttgcttacgtgcaaaatctgaccggctaccagcctccctccaccactaccccgtcctccaggagagaggaggggctccaggtctttgttatgcagctctcaggtggaggaggaggcagcactcccccgcttccattttcccaaccacatctagcaccagacttgggaaacactcgtctaaggggctgctgcaggcacaatttacggtgcggtctcttcctctagcccaggcccccagtggcttccccagaaagggcagaatgtggctcttacgcatacaggagaaaaacgcctagtgcggagttcaagctcagcagccactaccagagccccctctccaggctcacctggtcgcacccatttccccctggggctcccctcttctgaaggtccctgtcccatacatttcctagaggccaaggcccattggttttacatttcttacctaaggcaacccagacgtggctttttctttcacagggccgtggggggagcaccacttccccggccaaaaaaattgtttctgacccacactctgggccttattttccctgtctgtgaaatggagagcaacaggcagtgccactgacatttcacccgctgccgtgaggaggtttttaacatttgcaggaagtctggcttctatggggtgtccaggtgaaaccttaacaatctttaatcagcattctgattggcttaaggcttgtttggaaaaaattaagagttttgttcctagagttctccattgctaaagggtaattaagtccaaaagctgttttcaaagcgatttccaagctcaagggccctagatatctggacctagccgtgtccgggtacagggctggggggcgtggggggatgccctaagaggctggttaacagaaatatcacagtatgtggtacccacagcagagagcagggaagaatgtactgactggggtgggggaggccaaggaaaaccttctggagtagggtgtaactggcagaagaggaaaaagaaaccagacaggaactccgggagctcctggactgatcgtttaaggccgggcacaaggggtaagggatcaggcttcactatcgaccgacctgggctgaatgataccggttgactgtgtgacaaaagcaaatcaagaacctctctgcggctcatgagtaagccagagacttacataggacaacacataccctatcacccgaggatgagacgggatgacacacacgaagtgccccgcacagcgtcgttgtaaagcgttggctgttttcacctctggccgccccctgtgagcccgatcatgtgctttttgggcttaggtcggaggcggcctcccagattctacaggccattgaggtcgtaacaagcgtctccatcagagcctagtccttaactagctgcgggtaagtgcccggactaagtggcctcagtttcccctcgaagcaacgggaccaatcgcaccgccggcaggacatcttgtgcggggcgcgaagtgacaaaagtcaggatttgcagaagttcccactcggtaacgacccccaccccggcaaggagcacagtaggcgctccggaaacgccctccacgaggagggccgggccacttcctgcccccgagcgggctctccccggcggaggctcccaccgccgctatgggtaggccatgcagcattcctgagggcggggtgggcgcaggaagaaggtgcccgcggccccgccccctccgggcgcgctgggcggggcgaagcccctcggcgccgacggcccgccccgcggggggtgggcgcagctcgtcgcgctccgcacaaagtttgttttctccctccgggcgggtgggggagggcgcagagggcgcggggggaggagaggggatctgacgtcaggccgcgaggtgctttccagccgcgagctgtcaggccgagtgtcaggccgggcaggtacgcggcgcgcgcccccggcgccccccgctccccgccgggacgccccgcgccgagccggaggccgcgtggacccgaaagccgctgggaaaagtcagtgcagggagcagcagagggccagatgggggtgggggcgcgcggacaacttggaaagtttctttttctcggccggacggggagggggcgtcgtcctggcgcgtgcggtagggggtgtgtgagctcgggggtgtttgtgagtcccgacggcccccggggggtgtttgtgagtcccgacggcgctgcgctccgggggccggtgggggactgttccagcccccgggaggaagcccgcttggggccctggtggggggcccagcttcataggatcccaccccaggagagggccgatcctgcaccggacctgagtgagcgcgcggggggacggatttgtttggtttcaaaagtgcacgttgctaaccgccagcagggcccccccgccgccgagccggacagggggcggccgagagtgacagctgggggtgggggccgcgggaagggcccggagcgggggggccctggggagcccgcgcgagttcccctttcctttggaacaaaggaaagtctgtctccgaggcatctgtcactcccaggctggccaaggaagcggggcgcgtggggccggcgccccggagaaagtttgttcgcgccgggaccctcgggcaggccgaaggtgatccaagcctcccgcgggagaagcgcgtagtctccggggcagggggcggccaacatggagtctgggcgcagggctgggggggggggggcggcgcggaggtgggagcccagccccctcccctcccttcccctcccctccccctccgggcccagttcggagcacaaagccgagcgcgcacgctccgccgtccccgcgccccgaagagtcggccagccccgaactgccggagtaggggtgggaaccaaactttttcctgccccgggacagacacgtgagttttctttcttccagagcccccgtcccaccgggatggcgggcccgcgcgggagctggtgcgcggagtcggcccggggtgtggggactgtggggtgcaagcgccccgagcgccggacgattcctcgccgacccaggagccatgtgctccgactcggtctgggccgcgggggaggttgcgcgctttgtctgaactgctgggaatgcgggcgtgagtgcgcggcccgggggagtgtcgggaccagctaggggagttgtcagaaagttcgtgcgggagtggctgcaggtggcgtcgtgggagtctgtaggagggtgtacgggatgttgtgtcgaggggttgctgccacaggtcactgagggtagaactgattgttagtgtgatgacgcctggagttttccctgtcggagagatcgggggtggccgggtcggttggagttcgtgggtgggcgggtacagaagttgggctagttgtgtgggtcacagttgttcgtgctaggcctggggtctgtaagctgtgcgtgtgcgtgctgtatgcgtcggtgaaaaccctagggtttgtaaggcttgagcgatgggtccgggccagttatcctagcgctgttggttaattgcctggcgtgagtgtgtctgggtgcggtgtggggtgcatatgtgggaagcctcccagactacagatggccctgtgtggcggaacaccgaggtggagaagtttgtgtagactgaggggtcattccccagggcccacccggggaaccctgcagacagacttggctggcagccagggtggaatttgtacagataaccttgagtacttctcacagccggccagggctgcatcactgagcccagatcccagctgccctggccacctagaaatggctgtctgacctcagaaagcagcctgcagtggtgctctctgaggagtggcacgtctaaccagtgcctgtctcacctccaggtggcctgactgaaagggtagacccttccctcgaaagcctggcctagccagcccagagatctgggctcgggtccaagaagaggaaacaaaacctgggagatgccagagtctgttggccggcctgctggggagctgttaaaaggctgagaagggaggagccttgagatcctggcatcagcctggcctagaacttttgcttttaaaatgaaaatctggctgggcggggtggctcacacctgtaatcccagatctttgggaggccgaggcgggcagatcacctgaggtcaggagttcaagactagcctggccaacatggcaaaaccctgtctctactaaaaaaaaaaaaatagctagatgtggtggcacacacctgtaatcccagctgttcgggaggctgaggcaggagaattgcttgaacctgggagatggagattgcagtgagccaagattgcgccactgcactccagcctaggctacagagcgagactccatctcaaaaaaaaaaaaagaaagaaagaaagaaagaaaatctttgttgcacgtgtgaaacagaactttgtccagggactgagcagctgagttgggttatctagggaaaatccttccttcatttgacaggtgaagaggggactcaagcccagaaaggggaggatccttgtccaagttacagtgccaagtggagggtgggccttgctcattcacctggattttgagtggttgagtctaggaccaggctaaaggggcctgacaaaggagaatgtccaagaagcaaccagtagagagatgactcacctctctcactgcaaggtacacagtaggtgctccttaaatattacttggactgctgcaggatcatggtgatctgtagtttccagagttctcactggcccttgggagacctaggaggcaagacagtatacagctcacaagagggggtggggagaggcctggtccaaatccgacttcactatcctaacctgggggtgggatttttttcctttacagctttattgagatataactcacataccatgcaattcacccattaaagtatactcatcagcaggtttggtatgtttgcaaccatcactatagtcaattttaggacttttttgcggggggatagggggacagggtcttgctctgcctctcagatgggagggcagtagtgtgatctcatctcattgcaacctctgcctccgggctcaagcgattcttccacctcagcccccagagtagctgggaccacagacatgcattaccgtgctcaactaatttttgtattttttgtagagatggggtttcaccgtgttgcccaggctggtcttgaactactgagctcaagcgatccacctgccttggcctcccaaagtgccaggagtataggtgtgagccacagcacgtggcattttttttttattattttatttttgaaaacaggtttttaattatgtcgtccaggttgacatgcactggtgcgatcatagctcactacagccttgaactcctgggttcaagggatcctctcacctcagcctctcagaatagctgggactactggcacaccatcacactgggctaatttttattttattttatttttttatttttttcttttgttgagacagggaatcactctgtcacccaggctggagtgcaatgccatgatctcagctcactgcaacctctgccttctaggttcaagcagttctcctgcctcagcctcccaagtagctgggattacaggtgtgtgccaccacacctagctaattttttttttttttggtatttttagtagagacggggttttgccatgttggccaggctggtctcgaactcctgacctcaggtgagccacccacctcggcctcccaaagtgctgggattacgagcgtgagccaccgtgtccggcctttgtttgtttttgtttttttttttttgagatggagtctcgctgtgtcactaggctggagtgcggtggcacgatttcggctcactgcaacgtccacctcccaggttcaagcaattctgcctcagcctcccgagtagctgggactacaggcacgcgccaccatgcccagctaatttttgtatttttagtagaaacagggtttcaccctgttggccaggatggtctcaatctcttgacctcgtgatctgcctgcctcggcctcccaaagtgctaggattacaggcatgagccactgtgcccggcctttgttttttgagaccttttttattttgttgtcacccaggctgaagtgcagtggcacaaacacagttcactacagccttgacctcctgggctcaagcaattctgcctcagtcccacaagtaggtgggcttacaaatgcacagcatgacacctggcttatttttgtattttgtgtgtgtgtgtgtgagccactgcgcaggccttgggcagctttcttgatctctgttacctcatctataaaatgatgataataatagcttctcccttattggggaattgtaatgattaaatgagataacatgtaaaatgctcagtacaggccaggcatggtggctcacgcttgcaatcccagcactttgggaggctgaggctgctagatctcttgaggccagcagttaagaccagcctggccaatatggtgaaaccctgtgtctaccaaaaaatacagaaagtcagccaggcatggtggtgcatgcctgtaatcccagctactcagaggctgaggtgggagaatcacttgaacccaggagacagaagttgaagtgagccaagatggcgccactgcactctagcatgggctacagagtgagagcctctctcaaaaaaaaaaaaaaaagaaaagaaaaaaccaaatgcttagtaccgaacatggaaaacagtagacctcagtagaagctgtaattgtttccagcctgagtcctgcttgtgaatgagctgccattcggtagtcacctacctgttccatgaagtggaggaactttggactcatcccttctagcttgctcggtctgtgttacggcctgagattctgaattgcaactaccccatttctggtgtcccaggctcaagtaatgctgagcatgtttggagactaggaaaaggcggtacgtgctaatgatgttcccatcccctgtgtcccttgtcccaggtttacccaaggtccagcctagcccctaggcaccatgtcggacagtgatctaggtgaggacgaaggcctcctctccctggcgggcaaaaggaagcgcagggggaacctgcccaaggagtcggtgaagatcctccgggactggctgtacttgcaccgctacaacgcctacccctcagagcaggagaagctgagcctttctggacagaccaacctgtcagtgctgcaagtaaggaggggatctggataagggggtggcaggaggacctgggttctagtcctattccagctgtgtcactgagtcactgtggtcttgggccactcactttcactgtctgggcttcggtttcttcttgggttaggggagaacacccactctccctgtctcaagggaagacaatgaaatagggtcgctgcagtcaatttcagactttagatagtcctttttttttgagacggagtcttgcactgtcacccgggctggagtgcagtgatgcgatctcggctcactgcaacctccgcctcccgggttcgagtgattctcctccctcagcctcccgactagctgggattacaggcgcccgccaccacgcccagctaattttttgtatttttagtagagacagggtttcaccatgttggccaggctggtctcgaactcctgaccttgtgattcacccgcctcagcctcccaaagtgctgggattacaggcgtgagccaccacgcctggcccagactttggatagttctgaagaggcaaggaatttaatgttgtcaaagtctaggtgtcatccttaactttggaggccaagggaagatgagaaggcatcgagcatctaggattcagcccccagccccaacgcagtattggacggcgacttggttgaaaggggcagctgtaatttgcagtgtggttaagagatggggcaggatcacagtccaggaaagggcagaagtcagaggttctgtgttcataatccagttctgcctcacgtcttgatttccttatctgtaaaggggcagggggtacacagagtcttcccctgcctggtggatctgttgtgacgaatagattcagaactggatgtgaaagtgctttgcaaaccatgcacatgaacacactcaaaagatagccttatcccctttttgtcagagtgcaaagtactgtcccctttgaatcgcgcctattgctgacccgcaggtgtctttgttctgctttcctggagcagaggcgggggaccctgaaccaccattgctttgcctccagtttgcctctccccttcctggagacacacagtaggcccttagcctaatacaagaggcccagccctgccctgctggcccccactgctcccttcctgagccagtcaaacctctcccacaagctctcctgtttctctttccccctctgtcctttcatagcttattactccaacctttgatgctgtctctccctccttcccttatcccactctgaacctcccacgtcttcctagctcctatctttcttccatgtagagacatggtaagtattttagccctcagaactcctgtcacctgactttatactctgggcaatggttaatccaagtctctgtatgagaaaggctctaaagttacagatcctgactcagattccatcttctccacaagaggaaacctggaccttggccaggtcactgccttctctgtgagcctcattattccctcatctgaaaaaagggaggtgattgtagcactttcatgagtgtagggagaaagggacgagaagaagaattcaaggctcactggggcccttcacagtggctcacacctgtaatcccagcactttaggagaccaaggtaggaggatcgcatgcgcccaggagtttgagaccagcctgggcaacatagggagaccccatctgtacaaaacaaaaaaattagctgggcatggtggtacatacctgtagtctcagctacttggggggctgaagtgggaggaaggattacttgagccctggaggtggaggctgcagtgagctgtgatcgcaccactgcactccagactgggcgaaggagtgagacattgtctcaaaaaaaaaaaaaaaaaaaaaaaaacaaggccaggcacggtggctcacacttgtaatcccagcactttgggaggccaaggcgggtggatcacctgaggtcgggagttcaagaccagcctggccaacatggagaaaccccatctctactaaaaatacaaaaaaaattgccaggtgtggtggtgcatgcctgtaatccaagctactcgggaggctgaggcaggagaattgcttgaacctgggaggcggaggttgcggtgagccgagatggtggcattgcactccagcctgggcaacaagaacaagactcggtctcaaaaaaaacacctactggtcagtgtttggcatacagtgggtgtttctactgttttcagcttcatctctgcctaaggcacaaagtctttggctgatcctgggtgcccagcagtgcgtggcatctcacagtgtacctcctcagcatggagctgtgcagagttgggatctgagagaggctccagacacattcttaccctcgaggagtgtctggacagcctctttgcgggtctccctgccttcagccttcagccttcagccttgttcatttaatccattattttgaacacaaaagcccaaatctgatagggccaggcactcctggactctactgccctcaggatagagtccaaactgatctacagcctaggtttggggctgctgcttatattcccagtgcacctcaccctgtcctgtcaaaccacttgtcacactctattggaattactttttgtcagggacactttctcaaacctgagaaatatactaactccttttatttatttatctgtgtgtgtgtgtgtgatggagtcttgctctgtcacccaggctggaagtgcagtggtgcgatgtcagctcactgcaacctctgcctcccgggttcaagtgattctcctgcctcagcctcctgagtagctgggattacaggtgcatgcccctacgcccagctaatttttgtattttaagtagagacagggcttcactatgctagccaggctggtcttgtactcctggcctcaagtaatccgtccacctcagcctcccaaagtgctgggattacaggcgtgagccaccatgcctggcccatctttttaaagaaaacatttttcggccgggaatggtggctcatgcctgtaatcccaatactttgcgaggccgatgcgggcggatcacctgaggtcaggagttcaagaccagcctgaccaacatggtgaaaccccatctctcctaaaaatacaaagttagccagacgtggtggctcatgcctgtactctcagctactcaggaggctgaggcaggagaatcacttttgaacccgggaggcggaggttgcggtgagccaagatcatgccattacactccacctgggccacaagagcgaaactcggtctcaaaaaataaaaaaataaagaaaacatttttcatggacccatctccccgcaagatgttaacctgaatcatttttatcatatcacttaggtaaaacataaaactgggtatatatataaaaaaaaaaccacttctttttgcttttgttcttatacctaaccttaaaatcaaactgtttccaaagtagataaatgtaaaaaccgtgacattccacctgactgtgttaactgaaaatggtgggtggtgctttgctgactgcactgcaggatgtggtgtggcaaaggcacagactcagcagagtagatctggatggtcttaggccccgatgctcctactggtgatgaaaatggaaacccaaagccaaacatccttctagagaactggcgaacccctcaaggtgacacatccacaggtcccacctggagaaatgtaaatgtaaggaaaggaaactgggcatcccctggagggaggggacccgtggtggccacctgctctagagtcatgccgagagttaagagcagtggggaccacccagccctccttgatggaaactgaccatgaatcccatgtcagccccagctgcacacctgtctggtaactcctcccagttagttcattgccctcagctcatttggtcaattaccagctcctgtacaaataccccttaaatatttcagggttttggcttctttcctaccctcatctaaaccatcattatctgatcacaatcatttatcactccccaacttaaaacccttcaggccaggcatggtggttcgtgcctgtaattccagcactttgggaggctgaggcaggcagttcgcttgaggccaggccaggtgttttgaggccagcctggttaacatggttaacttcttcaatactaaaaatacaaaaatagccgggcatggtggtacatgcctgtaacccctgctactcaggaggctaaggtacaagagtcacttgaaccaggaggacgagactgcagtgagatcgcaccactgcactccagcctgggcaacagcaaaactgtctcaaaaaaaaaaaacaaacaaacaaacaaaaaaaaccttcagtggtctggcagggtaactcatacctgtaatcccagcactttgggaggctaggatgggagactttcttgagcccaggagttcaaggctacagtgagctatgatcatgccactgccctccagcctaggtgacagagcaagaccctatctctaaaaagaaaaaaaaaaaaaaggctgggcactgtggcttatgcctgtaatcccagcactttgggaggccaaggcgggtggattacctgaggtaaggagttggagacctacctggccaacttggtgaaaccttgtcctactaaaaataaaaaaaattaggctgggcgcagtggctcatgcctataatcccagcactttgggaggttgaggcgggtgggtcacctgaggtcaggagtttgaggccagcctggccaacatggcgaaaccccgtctctactaaaaatacaaaaattaaccaggtgtggtgctgtgtgcctgtaatcccagctacttgggagactgaggcaggataattgcttgaacctgggaaacggaagttggaatgagccgagactgagccaccgcactccagccggggcaacagactgagactctgtctcaaaaaagaaaagaaaaaaaaactagctgggcgtggttgcaggtacctgtaatcccagctacttaggaggctgaggcaagagaattgcttgaactcgggaggcggaggttgtagtgagttgtgattgcaccattgcactcctgcctgggcaacagagcaagagtccatctcaaaaaaaaagaaaaaaaaattcaatggcttttgccagcctaatgacatcaccggcccgtgtctacatcttgaacctcaaccctggtcccctacattcccactacattgatccacctccccagaccattttcctcccacccctgaccaggaggctcccagtccctaaaggagctgtatgctctcacagcagatagatgaggtcacagcactgggacactaaactgtaattgcttttagactgcaccaaattctagaggtgtggagagcactgacctagtgttcacagttacagccctagtgtagcatagtgcttggtatctggtaggtaggtgctcagtaaataatgttgaagtggcagaaaagggctataaagtggtggaagggtcaacaggcaggacctcagaagtaaggaaatgtaatggctcctaatcatgaaaaatagcctaaagcctgggagcatcattttttcctgtatttattaattaattttttttttttttgagacggagtcactctgtcgcccaggctggagtgcagtggcgcaatctcagttcactgcaacttctgctgcccaggttcaagcaattctcctgccccagcctcccgagtagctgggattacaggcacctgccaccaggctgagctaatttttgtagttttagtaaagacagggtttcaccattttggccaggctggtctcgaactcccgacctcaggtggtctcacttcagcctcccaaagtgctgggattacaggcgtgagccactgctcccggcctcctgtatttaattttttaaatttcattttccattaaggacatttaagaatatctataaaagctgaacgcaggctgggcacagtggctcacacctataattccagcactttgggaggccgaggcaaacggatcacctggggttggaagtttgggaccagcctgaccaacacggagaaaccccatctctactaaaaaatagacaattagctgggcatggtggcgcatgcttgtactcccagctactcaggaggctgaggcaggagaatcacttttgaacctaggaggtggagattgccgtgagcgagatcctgccattgcactccagcctgggcaacaagagtgaaactccatctcaaaaaaaaagagaaaaaagctaggcacagtgtctcacgcctgtaatcccaacactttgggaggctgaagcgggtgtatcacttgaggccaggagttgtagaccagtctgaccaatgtggtgaaaccccgtctctactaaaaatagtcccagctattcgggaggctgaagcaggagaatcacttgaacccgggggtggtggaggttgcagggagccaagatcatgccactgcactccagcctggtctacagaacgggactctgtctttaaaaaaaaaaaaaaaaaaaaaaactccacaaaagtaagagaatataataatcaaccaccagcaccagtcactcggcttgaacaagtatcaacattttgccaagcttgttttatctctccctggggacatctcttttgattgtctcctttaaccctcccaggagcgattcattagcaagtcaatgactcaactaactggtttgctggtacttgcctggggctaggcagttgggagggttagggaaaaaagtagtttgtaaaggattttcacaggtcccttcgacatcctctaagcccaatttattggttggactagatctgtggctacctggcagggttctgggccccaatcctttactgtaacaatggttggggatataccacgtgccaggcccgggactctgtgctgggtatacagtggtagaatgggtaccttcccattacttcctggctgtcaggactcctttcatatgcagtttcctgagggaagccttcccaaagcccataccggggcaggggcagcagtccccctggcgagggctgttgggtgagaaaggaacctggtgcagaggctgtagtggtcagctgtgggggaggagtgtcctggcctagcccccagggcagccagggatgtaggagctgctctcctctggctccaaagctagctgccctctgattcctcccacaggcaacttctatttttccccatctcaaggcctttcatctgtgtgtatgttttttgaacttctgtgtaagctttttggcttaaataaagggcttggcctgcaaggacaagtaaccagtaggctaaaccattggttcctaagcctgggcggccagactttctgggtagctggtctgaaaacacattgccaactccacccctcacccccactagatcaataaagcagagggggaaatcactaacagtttttaaaaatctctcccaggctgggtgtggttgctctgcctgtaatcccagcactttgggaggccaaagcgggcagatcacttgaggtcaggagtttgagaccagcctggccaacacggtgaaaccctgtctctattaaaaatacaaaaattacttgggcatgttgtcgtgtgcctgtaatcccaggtacttgggaggctgaggcaggagaactgcttgaacccgagaggcggaggttgcagtgaactgagatcgcaccattgcactccagcctgggcaaagaagtgagactccatttcccccccccccaaaaaaaaaaatctcccctaaggtgattctaatacagagagctgccttcaagagcacctggatatggtagtctcagtgtgaatggtggtaccatgatgtttgggaaaggcgcctcagtgcctttgcttccttgacacaaaaatgagagggtttctgcctgcattcattagctgctgctcccagcatcacagcctttgtcagcctcctggtgttcctcccacccccatttgccacagtgattccttccttgttcctcagcagcctctcagatagagccctgttttatggtagagaccggctttccggttcccagcctgtgttttgccatatacatcacagagttcactttgaccttcttcctaccatctccccaaggaccttgagtggagacaagtcacaggttcttttcctgacttaggcacaggctgggcagctggaagggctgcagaaggggcactggcagccactcagtccccccgcgttgccttgcccagcccctcagctgtgcatttttctgggctaagaagacaaaacagacagatgctaggctgccaagtgatctggacaggacagtcttgtgggggagtgtgtggaggggtgtttttctgttcttgaaccctcagccaaagtgggaagtgcctttaggggctaggtgcccacacagatgctgagaaatgcccagactgccctccatgaggctgcctgctcaacaacactccttactttgcttgacccaggtcactgtgacctgcccatttttcccctgcatccagggctgaggtggagaggggcagtgtactcctgcagcacaggtatgggaggaggcagctgtgggagggagggagagaaggacacaggcactgctcctgtgcaaggaagactccctctcactcttcagctggcagtggggtggctgcccagaaccaggctgtctggatcaaacccagcttttgcacttgtgaccttcaacaagtttctgaacctctccgatctgtttcttcaagggagatcatcatataacctgtgtgataggctgagattgaatgaataattagatatgaaatgtgaatagtgcctgaggccaggcgtggtggctcacacctgtaatcccaacactttgggaggctgaggtgagcagatcatttgagttcaggagtttgacaccagcctggccaacatggggaaaccccatctctacaaaaaataccaaaaaaaaagtacctgggcatggtggcacatgtctgtggtcccagctactcgggaggctgaggtgggagaattacctaaacccaggaggtcaaggctacagtgaactgtgattccaccactgcactccagcctgggtgacagagtgagaccctgtctttaaaaaaaaaaaaaaaaagcacagcaaagcagtggaggccctaaagccaggaggcctggttttaaatcccagctctgcactgggaagatgtgtgactggacaagagctttcttctcattgagctcagttctctctagtactttggggacactgccctctaccctccaggcttgtatgcagattaaacataatgcaagtgaggtggctggcatgatactgctatcaaaggtgtttgagtaagtttgttcccttccttcatcccacctagctgttgagcccttccttcttttttttttttttttttttttttttttgagatggagtcttgctttgtcgcgcaggctggagtgcagtggcgcaattttgactcaccgcaacctctgccttgtgggttcaagcagttctctcagcctcctgagtagctgagactacaggcacatgccaccacaccctgctaagcccttcctctctttagggttttcccacagctctagtcaggattcagctcaaccagcgtccactgaagcctgttggtatgtgtgtgcattggagcaccatagtggtgaagaggggcaaataaggaccccagagccagggcccctcctggctggaatggaatgggagagaagggccacagaagcttctggctctgccctgcctatgagccttccagcccgacagcctggtgctgtctttgagtcacctgtggaatagatgcagctgcagttagctaggttaggagaaaagacaggaccagaagaaggacctagagtgtgaaatttcagtcaagccaccgtttagaccacttaatggttttccatggtgctctggcctggttgtcagccctgtccacctctgagctcatcagctaccattcaccggttccttaagccaaccctttcctgcctcagttcagttgcattggaggaccatagaggtgaaggagggcagatgagaaccccacggccagggcctttccttggaattgtctagaacattcttagctttctgtatggctagctcttctaatccttatgtctcagccttccagaacccttagctatgggagtttctcttatctttataatgccccctttattcttgtttctgttgggggcttgttggtggttattcacctaatggttaatagtcagtctccatgactaggtgcactataagctccacagggtggagtgcatgtctgtttaattcacaaaggcatcccagcactgagaactgggcccaatataccaggcactcaaataatatttgaatgagcaagaagccttgaagagcagcaggaaggtgagaagctctaacttgacttttttttttttttttaagacggagtctcactctgttacccacgctggagtgcaatggcgtggtcatggctcactgcaacctctgcctcccgggttcaagcagttctcctgcctcagccccccaagtagctgggactacaggcgcgtgccaccacacccggctaatttttgtatttttagtagagacggggtttcactatgttggccaggctggtctcaaactcctgacctcgtgatctgcccacctcggcctcccaaaatgctgggattacaggcgtgagccaccacgctcgaccgactttttttttctttgagacaaggtctcacgctgtcacccaggctggagtacagtggcacagtcacagctcactgcagcctcaaactcctgggctcaattgatcctatcacctcagcctcgcaagtagccgagactacagacacgcaccaccatacccagctaatttttgtactttttgtagacacagggttttgccatgttgaccaggctggtctggaactcctgagcgaaagccatccgcccaccttggcctcctaaagtactgggactgcaggcgtgagctgcagcacccagcctgactctccaggctggagtgcactggcattatcacggctcactgcagtctctgcctccctggcctcaggtgatcctcccacctcagcctcctgggtagctggggctatagggcacatgccatcacaacagctgatttttttgtatttttgtagagatgtggtttcaccatgttgcccaggctggtctcgaatccctgggctcaagtgatctgcccacctcggcctcccaaagtgctggaattacaggtgtgagccaccgtgcccagccgggggagggtcttcatgtccgggctctggagtctggacttgatcctgtaggcagtaggagacaaatggcagtttgcaacctcctcctcccaggttcaagcaagtttcctgcctcagcctcctaagtagctgggattgtaggtgcctgccaccatgcccagctaatttttgtatttttagtagagacagggtttcactatgttggccaggttggtgtgtgttcttatttaactctgtcttcccactatgaacctctgtgttttcttccatgttctggggtcctgagctgtaagtgctgttttggtttgttttgaaacagtatcttgttctattgcctagactggaatccagtggtgcgatcatagctcattgcaggctccacctcttgggctccagctatcttccgatctcaggctcccaagtagttgggaccacaggggtgcaccactacacctggctaacttcttttgtagaaacagggtctccctgtgttgcccaggctggtcttgaactcctgggcttaagcaatcctcccgccttggccacccaaagtgttgggattacaggtgtgagccactgtgcccagcccatagctgttttagattaagcaaattgatcggtcttgtatattcattccagatatgtaactggttcatcaatgcccggcggcggcttctcccagacatgcttcggaaggatggcaaagaccctaatcagtttaccatttcccgccgcgggggtaaggcctcagatgtggccctcccccgtggcagcagcccctcagtgctggctgtgtctgtcccagcccccaccaatgtgctctccctgtctgtgtgctccatgccgcttcactcaggccagggggaaaagccagcagcccctttcccacgtggggagctggagtctcccaagcccctggtgacccctggtagcacacttactctgctgaccagggctgaggctggaagccccacaggtggactcttcaacacgccaccacccacacccccagagcaggacaaagaggacttcagcagcttccagctgctggtggaggtggcgctacagagggctgctgagatggagcttcagaagcagcaggacccatcactcccattactgcacactcccatccctttagtctctgaaaatccccagtaggcatctgccaagaagggtgctgaaggctccagccagctgtcctgggtttccgttttggttccctttcatacagagggttttctatggatcactgccaaacattgggatcatctcctctgtccagaggtcttcaacaggaagatgccagctggcaccactgcactgtgatgggggccctctcctctgctgactctgccgtttctccaggcctccgctcagtgatgagaccaagagatcggagacaagcatggtgctgctgcttctgctgcttctccagaaaatccctgggacacctttgttccagcctggtttcctgggctgggctcaggaaagctgccaaattcagtcctatgttgggtccaagctgcccctgtgctgtttctgtcaagccaggtgtggacattccaagttcatatgcgtgaacaaaagaaaagaggaacccagtggatgtaacagaaccgactccagttgaatgtttagatttttgctaaactgttttctttttcccttttttgctgtggtttgcattcacggcagtagttagcccaggtgtggggaacgagagtgcactgcatgatagcgttctggtgagctgggaaggacccaccactgccactgaggattgttttggaagaaaggaatatttttatcttggggaccagctaagtctctgcagtagtgtgaaattccaaatggttgttttatcattggtttggtttaccaaaaaaaaggcagggaaaaaaaaaaaaaacaaccgtatgagcgcattggcttgtctgccgcaggcacagaagggtagaaagccacagcagggggcagtccagcagactctgactcaactttctaggcacctagcagagaaagataagatcaaaaggtgtttggtttttcttttaatttttattgtagtttttttgggtgggtgggggaagtaaactagactgaagcgatggattttttttttcttttttttctttagtgtttttccctttgttcttgaacacttttgccctgcagcctcagttttgaattcttttagcaacttggattagaggggcccatatgtcagaagctcccagcacctcctacttgggagaaaagtgagccatctgctggtcaggaagtcctccagagaggcagcttttcccacaatggtggcaggaaactttggggaaagcaggaatggtgtccactgctgcggaggaactgccttcagagaaggtggggctggaaaagggttagaagcctcctagctgggattgtctttgtttcacctttctttaaattagaattacagaagcccctgcccagtgaacagataacaattggtcttatgctcctccctttcccccattttttcttttgctgttttgttttttgttttttgtttgtttgtttgtttttttgagacagagtcatgctctgtcacccgggctggagtgcagtggtgcgatctcagctcactgtaacctccgcctcccgggttcaagcaattatttgcctcagcctcccgagtagctgggattataggcacccgccaccatgtctggcttttagtagagacggggtttcaccatcttggccaggctggtcttggaactcctgacctcgtgagccaccacgcccagcctcttttgctgtttcattgctgacagtgttcaacaatatgccccatctttatatatcctaagaaacactaatcctaggttattgctagccaaaatatttttgtcctgagtagtgtcactgggccaaaagatagatcaggacgacagcctttagttttcctgaaatcaccaggtcaggcacaaggagaaaaggttcctggatactgactaacttgggtgggtctagccaggagaaagacagtaacatgtgttctgtactttctgggaagatccctgaagccatcacagaggctccccaacttctgagtcgcccatctgttgctgtgggagtgtgaacggatcgctgaaggagagggagctttgctctctctaggtgggcaagtttcctgggctctctgtgttgcctccctctggcttcttcctcccgtgccctctccccgtgtgccccagggggatcagggatcctcaccctcctgaggcccagtggggaagaatgaacatggcttcatccaggttaactgatgctgccatttgcccagcctcttccatcccagccctgtcagtgagcccaggtctggtgcaactgctgcaggatgcctgtagtagggaactctggaagtgtattgggctgaggtgggattttccctccccacagtgcactgagcaatggagggtggtgagggagccatgctgctgaattctggttggcatttccccattatgtaaaatggggtgttgggtagggcagactctgcttgggtttggttgtaagataaacctggaggagaagcacagttgtcccattgaattatttgagcaaaaactactgtaaataacttttttgtcttttgtcaaataaaatttttttttgtttttttaagcagaaacagggttcttgattgatccaccagggctcagggcccaggcttgaagacaaagcagtcactggcttcttattttgctttacatcttttactctccctctagtagccagctgtgagttctgtgcacgctgtacccccattccctttcaccagctccattctgtatcccattcaactcagggtaaagggggcatttgcatctcacattgggccagtcttccctggaatcaacagttaagctctggggttgctaagtggtgaggatgtaaccttgaggaactggcaactttgtcctccccctctctcggtaagaaacaagcatgactgcagtgtgaacccggcacagagagaagcagctatgagatggaagctccagtcatgtctgaaaccaggaccacctgtaaacttctctattatgtaagctagtgaattcccctttttgcttaaactagctgttaatacgtttctgccatactgaaatgacaatacactaactgcagcccaaactataaaaaccaaggtctgcaacagtgggaaactgagtttggttgagtgtgcctgggtctgggtctgtgctatgttcagtctcttttttttttttttttttttgaaacggagtctctctctcttgctaggctggagtgcagtggcacaatcttggctcactgcaacctccgcctcccaggttcaagtgattctcctacctcagcctcccaaatagctgggactacaggagtgcgccaccatgcccggctaattttttgtattttttagtagagacggggtttcaccgtgttggccaggatgatctcgatctcctgacctcgtgatccacccacctcggcctcccaaagtgctgcaattacaggcgtgagtcactgtgcccagccccaatttcttaatttttgtacacacacacatgaaagtgagatgccctaggtaaagaaactgagtgggctgtggcttgtgcctacagtcccagctactccaaggctgaggctggaggatcacttaagcctgggagtttgaggctgcaatgagctgtgattggaccactgcactccagcctgggtgactgaatgagaccccaagaccccatcttttttttaatttttttttattctaaaaaaaaagagaaactgagtagggatttcagatacttgcctgaactcatatagcccatataaatatggagctcgaattcaaattcaagtctgttttccttcagggtcactcaggtctgcccagaacctacctgaagtaatatagtggtcacttactaacatagtatcatctagctgtctagaacagtgctgtgggctcagcacaagaagtttcttctgtgaatgaaatcttggtggtctctcctacaggtcactctccttcaggaatttggagagagagcctccccactcaagtttcccagattaaagagcctcagctccctcagccattcacccaaggtcctgattttcccccatttctctctcagtatctctcaaactgcacacttggccctggagctcagcagaataggcacatgctgttacagcttttcaaagtaagtttaatattcaattcacatcggccgggcgtggtggctcatgcttgtaattccagcattttgggaggctgaggcgggcagatcacttttgaggtcaggagttcaagaccagcctagccaacatggtgaaaccccgtctctactaaaaatacaaaaattggtggggtgggaatggcgcacccctgtaatcccagctactcgggaggctgaggcaggagaatcgcttgaaccctggaggcggaggttgcagtgagccgagatcatgccactgcactccagcctgggcgacagagcgagactgtctcaaaaaaaaataaaaggaactgaaaccaaaagtgtcttctgcatcaagcttcaaatgagccctggagtgagcaagcactctagataatgaaagtgaactgcgggataatgtggctagggcccctcctgtgacgctgggaacatgatctaaggacatccaccttttttattagagtctcattcaggaaacagcttttaaatgtatctgccctggtcgtgaatacccgctgtctctttgggctggctatgtatagcctggccgcctctctatacccttgttcttttttttttgagacagagtcttgctctgtcgcccaggcttgagtgcagcagtgcaatctcggctcactgcaacctccgtctcctgggttcaagtgattctcctgtctcagcctcctgagtagctgggattacacgcacgcaccaccacccctggctaatttttgtattttaagtagagacggggtttcaccatgttggtcaggctggtctcaaactcctgacctcatgatccgcctgcctcagcctcccaaagtgctgggattacagacgtgagccaccgcactcagcctatacccttgttcttaatagggctaagatgatgcttcaagcttttgggtatcgattttggactttgcattaatattttttttgttttgttttgtttaaaaaggtggccgggtggcgtggtggtgcatgcttgtagtccctgctacttgggaggctgaggcagaagaatcacttgaaccagggaggcggaggttgcagtgagctgagatggcgccgctgcactccagcctggccgacagagtgagactctgtctcaaaaataaaataaaataaaataaaggtaatggtagtgattggtggggaggggatctgccatcctctagatgggtggtcagggaagtcctcttcctttccactgtttttgaatggtagtttctccatggcccccaggcttagaacctttttttttttttttttttttttttttgcctcaacttagccctaggaataagcatctctggggtaagactgaggactctggattttaaaagtacagtctagcttgaaagctgctacatgggctgggcacggtggctcatacgtgtaatcccagctctttgggaggccaaggctggtagatcacgaggtcaggagttcgagaccagcctggccaagatggtgaaaccccatctctactaaaattacaaaaattagcctggcgcggtggcaggcacctgtaatcccagctactcgggaggctgaggcaggagaatcgcttgaacccgggaggcagaggttggagtgagccgagatcgcaccactgtactctagcctgggtgacaaggcaaaactccgtctcaaaaaaaaaaaaaagaaaagaaagctgctacatgaaaactccatatggcagaggccaggtctgccttgtatggctgtatccttgctatgttatgcactagagctgcagaggataaggtgtggcactcgaaggatgcagaaataaccatcactgctgtcagtgttactgatttcaaaggcatttctctatgacccaagcctggtttcaaattcttggtctgtcactgattagctgtcatgaccataggcaagacagttcactactccaaacttcagttttcatcatcaataaagtgggaatagtaatacttacctcttgggaggatgaaataggataatctatacgttactatctatccttgctcagcacacagctgagggaaaaacaacctgtaaaataacttaccccataccacacagcttttaagtggcagaattgggcctaattacccagagaagtaattctcaagcctaaatatccatcaagatcatcaggaaagcttacaaagatgcatattcccagacctcacgcccagagagtctgggcaggaatctgcattcttcactgatgccacatgagattctgatgatcttgctccagagaccttcaccattcattatcaggacactgacctatccccaggaaactactgggctgggaaagtagcaactctttgtctttcaaagttacaagatgagaggaagaagggtctctgaaccatctgacgtctttgctcccaggaggctatggtaacttgaaggtcaagtgtagccctaccattttaattaccaaagtaatccacacacgatgtagagaaattgcaagtaaaggtataaaaagagaagagtttagcataatggttaatggttaaaagcccagccaggttttggatgaaaacgaatgtagccagatgcagtggcttatacctgtaattccatcactttggaaggccgaggcgggtggatcacccaaggtcaggagcttgagaccagcctggcaaacgtggcaaaaccccatctctacaaaatacaaaaattagctgagcatggtggcaggtgcctgtagtcccagctactccggaggctgaggcaggagaattgcttgaacccaggaggtggaggttgcagtgagttgagattgtcccactgcactccagcctgggtgacagagtgagactgtctcaaaaacaaaacaaaacaaatgaatgtaaaacatttagtgaagtgactggtagctagtgagggttcattaagtgctagtatgacatttattgtgggccaaaaagaaaaaaaaagaccaggatgcaatctcagacctccattccaacaacaggtgctctttccatggctgatggttgcccccaggatttctgatacctgtgatccatcagtgcctgtgaggggccagtcttacccctcagaatataccttcctctccaaaccccactccaagcagctggcagtgctatcgaggcattcagctgggaaatagccctaaggctgagctcatgtgttcaactagtactaaacagctacaaactcacaaagacaaaatttgtcctacttccaaatctgtctctcccactttcaaatctgacccttcatcaagttattttccaactcagaccacccaagatgtttattttaaccagacggattcactgagattcagccaggttccccgcttcctaagataaggaaagccttgggtgaaagcaaatagggaacaagtctgagtcccaaaaataccttttagacaagggcttcccctctggctgccagcttagctttgtctgctcctagagaggtaagaggaggaacagggatcaggtttcagatgcctgttgaacttctaacttcccttatgaccttgggctacactgcaggatttgaggacccttccaactagaactttctgtgacctctcccaatcccatgcaaacataatggctcttggagttacggtcagagcttcgcaatgtaatacaaacatgacctagagccggacgcagtggctcatgcctgtaatctcagcactttgagaggctgaggtgggcgtatcacttgaggtcaggagttcgagaccagcctggccaacatgatgaaaccccgtctctactaaaaatacaaaaattagctgggcatagtggtgggcacctgtaatcccagctacttgggaggctgaggagaatcccttgaacctgggaggtggaggttgcagtgagccaagatcgtaccactgcactccaacctgggtgacagggcgagactctgtctcaaaaaaaaaaaaaaaaagaaaaagaaaaaacaaatatgacataaaaaaatactgtctaatgagatgctcaatcattactaatcactagggaagtgcaaatcaaaaccacagtgaaaatactactttgcacctagtaggatgattattaacagcagaaaaaggctgagcacggtgactcacacctgtaatcccagcactttgggaggccgacgcaggcggatcatgacgtcaggagttccagaccagtctggccaacatggcaaaaccctgtctctactaaaaatacaaaaattagctgggcatggtggcgggtgcctgtaatcccagctacttgggaggctgaggcagaagaatcgcttgaacccaggaggcggaggttgcagtgagctgaggttgtgccactgtactccagcctgggcaacagagcgagactccttctcaaaaaaaaaaaaaaaacatgtatctccgaacccttgtgcactgctggtggaaatgtaaaatgccgcagctgctgtggaaaacaacacttcctcaaaaaattaaaaatagaattacgatatgatctagcaattccacttctgagaatatgcccaaaataacaaagcagggacacaaacagatatttgtacactccaattcatagcagcattattcagaatagtcaaagtgtaagcaacccaaatgtctatcagtaggtaagcaacatgtggtatgtacatacaacagctttaaaaaggaaggaaattctaacacatgctacaacgtgggtgaaactggaggacataatgctaactgaaacaaaccagtcacaaaaggacgaatactgtactcctatgagatacccattagaacagtcaaattcctacagagaaagtagaatggaactggtttccagggactggggaaatgggagaatgaggagttatttttaatgggtacagagtttcaattttacaaggtgacaaagttctgaaaatggatggtggtgatggctgcagaacaaagtgaatacacttaatgccactgaactgtacacttaataagtgttgaaatgataaactttgttagatatattttactaaaatttaaaaaacaatttttttttttgagagagtctctcactctgtcacccaggctggagtgcagtggtgtgatgatcacagctcactgctgcctctaccttctgggcttaagcaagcctcccacctcagccttcaaatagctgggactacaggtgtgcaccaccatgcctggctaattgtttttttctttctttttttttttgtggagacggggtctccctgtgtagcccaggctagtcttgagctcctgggctcaagtgatcctcctgtcttggcctcccaaagtgctgggattacaggcatgaaccaccatgccaggcccttaaaaatatttttaatttggttgggtgtggtggctcacacctgtaatcccagcactttggaaggctgaggcaggcagattgcctgagctcagtagttcaagaccaccctgggtaacacagtgaaaccccatgtctactaaaatacaaaaaattagccaggtgtggtggcgcacacctgtaatcccatctactccagaggctgaggcacgagaatcacttgaacctgggaggcagaggctgcagtgagctgagatggtgtcgctgcactccagcctgggcgacagagcgagactctgtctccaaaataaataaataagtaatatgtttaatttaaaaaagaacgggctgggcatggtggctcacgcctgtaatcccagcactttgtggggccgaggtgggtggatcacctgaggtcaggggttcgagaccagcctggccaaacatggtgaaaccctgtctctactaaaaatacaaaaaaaattagccaggcgtggtggcgggcgcctgtaattccagctactcgggaggctaaggcaggagactcgcttgaacccgggaggtggaggttgcagtgagctgagatcatgccactgtactccagcttgggcaacaagaatgagactccgtctcaaaaaaaaaaaaaaaaaaaaaagaactgttgaatccagttttctgcatcttcagtgccctcaccaactctcacctaaatgactttaacagccttttaactagtcccccattctgatccagtcccccaaatagcagcaagcatgatccttctaagatgcaaacctgatggcttcccctacccctggataagaagcaaactcttcagcatgattctcccgtgcttcccctctggtggcttcattccttaccattagcccacatggtttcatttccctaaatgttatctcccaccttcacctccctcttttccttctaatgtcttccttcagagtttacccttccctaatccccccagatcaggttccccattatacatcttcaccagggggagacctggcagagtgaaaacttacctttaggccaagggctagtcattcttccaacattctgtgacagattcattagtttgtcttctgaactacatgccagcagggagtctgtaaaagaggttttgtaacaatggtacacttccaaaccagtcagtttggaagctcttggccctctgaagtttccctgaaaatcagtgatatgaggcagattgattaccaggaaaaaaggcatacaatttgatttaacgtgtatacacaggagtcttcagaatgaagacccagctccccaactccccaataaggtacagaagcttcttttttttttttttagatggagtttcgctcttgttgcccaagctggagtgcaatggcacgatctcggctcactgcaacctccgtctcccaggttcaagcaattctcctgcctcagcctcctgaatagctggaattacaggcacatgccactacgttcggctaattttttgtaatcttagtagagatggggtttctccatgttggtcaggctggtgtcgaactcctaacctaaggtgatccactcgcctcggcctcccaaagtgctgagattacaggtgtgagccactgcacccgaccaggtacagaagcttctgtaccatcttgaggttacagaaagaatgggggcttggatcctggtagaacaggttatgggaagggggagcaaggaattttactgagggacaacaaatgattattaggaagaatggatcagaaacagaaattaacctgtaaatagttatctttggaatttaaattattcttggagacagtcattaccttgaaaaagggtctgttcaggtgtggttacactgtcttctcttctgcaatagaaagcgagatagctgggcgtggtggctcacgcctgtaatcccatcactttgggaggccgaggcgggcggatcacgaggtcaggagatcaagactgtcctgactaacacggttaaaccctgtctctactaaaaatacaaaaaattagccaggcatggtggcgggtgcctgtagtcccagctactggggaggctgaggcaggagaatggcgtgaacccagtcagccgatatcgcgccactgcactccagcctgggcaacagagcgagactccgtcccaaaaaaaaaagaaagtgagataacagggagaggaacaagaactcttctccttggtgggtcagtcatatctttatgtagatacgggaaaagtctcttccagcaccttgattaggttttcaagttcagatattcattatgctaggcacagtgggtcatgcctgtaatcccaacacattgggagaccgaggtgggaggactgcttgagcccaggagttcaagaccagcctaggcaacatagtgagaccctgtctctacagaaaattaaaaaacaaaaacaaaaaaaaacaaacctgtcagggtgtggtggctcatgcctgtaatcccagccctttgggaggctgaggcaggcggatcacttgaggtcaggaatttgagaccagcctggacaagatggcaaaatcccatctctactgaaaaatacaaaaattagccaggttgtggtggtacgcatctgtattcccagcttctggggagactaagtcaatagaactggttgaatctgggaggcagaggttgcagtgagctgagatcatgccactgcactccagcttgggcgacagagtgagactctgtctataaaaaaaaaaaaaaaaatcttagccaggttggtggcatgtgcctgtgcctgcagctccagctacttgggaagttgaggtgggaagatcgcttgagcccagaagatcaaagctgcagtgagccctgatcatgccaccgcatttgagcacgggcaacagagtgagaccctgtcttaaaaactaaactaaaatagtcattatactagggagccatattttggggtaaaatattttgatttccttcaactggctaagctttaccatttcatatgggagggaaactggatcagaaaagaggcagggctgaaaagaacaagacccacggggaaacttaggacaaaaggagtgca

SEQ ID NO: 1348 - DNA, 3024 bp, Homo sapiens
ccgacggcccgccccgcggggggtgggcgcagctcgtcgcgctccgcacaaagtttacccaaggtccagcctagcccctaggcaccatgtcggacagtgatctaggtgaggacgaaggcctcctctccctggcgggcaaaaggaagcgcagggggaacctgcccaaggagtcggtgaagatcctccgggactggctgtacttgcaccgctacaacgcctacccctcagagcaggagaagctgagcctttctggacagaccaacctgtcagtgctgcaaatatgtaactggttcatcaatgcccggcggcggcttctcccagacatgcttcggaaggatggcaaagaccctaatcagtttaccatttcccgccgcgggggtaaggcctcagatgtggccctcccccgtggcagcagcccctcagtgctggctgtgtctgtcccagcccccaccaatgtgctctccctgtctgtgtgctccatgccgcttcactcaggccagggggaaaagccagcagcccctttcccacgtggggagctggagtctcccaagcccctggtgacccctggtagcacacttactctgctgaccagggctgaggctggaagccccacaggtggactcttcaacacgccaccacccacacccccagagcaggacaaagaggacttcagcagcttccagctgctggtggaggtggcgctacagagggctgctgagatggagcttcagaagcagcaggacccatcactcccattactgcacactcccatccctttagtctctgaaaatccccagtaggcatctgccaagaagggtgctgaaggctccagccagctgtcctgggtttccgttttggttccctttcatacagagggttttctatggatcactgccaaacattgggatcatctcctctgtccagaggtcttcaacaggaagatgccagctggcaccactgcactgtgatgggggccctctcctctgctgactctgccgtttctccaggcctccgctcagtgatgagaccaagagatcggagacaagcatggtgctgctgcttctgctgcttctccagaaaatccctgggacacctttgttccagcctggtttcctgggctgggctcaggaaagctgccaaattcagtcctatgttgggtccaagctgcccctgtgctgtttctgtcaagccaggtgtggacattccaagttcatatgcgtgaacaaaagaaaagaggaacccagtggatgtaacagaaccgactccagttgaatgtttagatttttgctaaactgttttctttttcccttttttgctgtggtttgcattcacggcagtagttagcccaggtgtggggaacgagagtgcactgcatgatagcgttctggtgagctgggaaggacccaccactgccactgaggattgttttggaagaaaggaatatttttatcttggggaccagctaagtctctgcagtagtgtgaaattccaaatggttgttttatcattggtttggtttaccaaaaaaaaggcagggaaaaaaaaaaaaaacaaccgtatgagcgcattggcttgtctgccgcaggcacagaagggtagaaagccacagcagggggcagtccagcagactctgactcaactttctaggcacctagcagagaaagataagatcaaaaggtgtttggtttttcttttaatttttattgtagtttttttgggtgggtgggggaagtaaactagactgaagcgatggattttttttttcttttttttctttagtgtttttccctttgttcttgaacacttttgccctgcagcctcagttttgaattcttttagcaacttggattagaggggcccatatgtcagaagctcccagcacctcctacttgggagaaaagtgagccatctgctggtcaggaagtcctccagagaggcagcttttcccacaatggtggcaggaaactttggggaaagcaggaatggtgtccactgctgcggaggaactgccttcagagaaggtggggctggaaaagggttagaagcctcctagctgggattgtctttgtttcacctttctttaaattagaattacagaagcccctgcccagtgaacagataacaattggtcttatgctcctccctttcccccattttttcttttgctgttttgttttttgttttttgtttgtttgtttgtttttttgagacagagtcatgctctgtcacccgggctggagtgcagtggtgcgatctcagctcactgtaacctccgcctcccgggttcaagcaattatttgcctcagcctcccgagtagctgggattataggcacccgccaccatgtctggcttttagtagagacggggtttcaccatcttggccaggctggtcttggaactcctgacctcgtgagccaccacgcccagcctcttttgctgtttcattgctgacagtgttcaacaatatgccccatctttatatatcctaagaaacactaatcctaggttattgctagccaaaatatttttgtcctgagtagtgtcactgggccaaaagatagatcaggacgacagcctttagttttcctgaaatcaccaggtcaggcacaaggagaaaaggttcctggatactgactaacttgggtgggtctagccaggagaaagacagtaacatgtgttctgtactttctgggaagatccctgaagccatcacagaggctccccaacttctgagtcgcccatctgttgctgtgggagttgtattgggctgaggtgggattttccctccccacagtgcactgagcaatggagggtggtgagggagccatgctgctgaattctggttggcatttccccattatgtaaaatggggtgttgggtagggcagactctgcttgggtttggttgtaagataaacctggaggagaagcacagttgtcccattgaattatttgagcaaaaactactgtaaataacttttttgtcttttgtcaaataaaatttttttttgtttttttaagcag

SEQ ID NO: 1349 - protein, 233 aa, Homo sapiens
MSDSDLGEDEGLLSLAGKRKRRGNLPKESVKILRDWLYLHRYNAYPSEQEKLSLSGQTNLSVLQICNWFINARRRLLPDMLRKDGKDPNQFTISRRGGKASDVPRGSSPSVLAVSVPAPTNVLSLSVCSMPLHSGQGEKPAAPFPRGELESPKPLVTPGSTLTLLTRAEAGSPTGGLFNTPPPTPPEQDKEDFSSFQLLVEVQRAAEMELQKQQDPSLPLLHTPIPLVSENPQ

SEQ ID NO: 1350 - DNA, 3389 bp, Homo sapiens
gcgagctgtcaggccgagtgtcaggccgggcaggtacgcggcgcgcgcccccggcgccccccgctccccgccgggacgccccgcgccgagccggaggccgcgtggacccgaaagccgctgggaaaagtttacccaaggtccagcctagcccctaggcaccatgtcggacagtgatctaggtgaggacgaaggcctcctctccctggcgggcaaaaggaagcgcagggggaacctgcccaaggagtcggtgaagatcctccgggactggctgtacttgcaccgctacaacgcctacccctcagagcaggagaagctgagcctttctggacagaccaacctgtcagtgctgcaaatatgtaactggttcatcaatgcccggcggcggcttctcccagacatgcttcggaaggatggcaaagaccctaatcagtttaccatttcccgccgcgggggtaaggcctcagatgtggccctcccccgtggcagcagcccctcagtgctggctgtgtctgtcccagcccccaccaatgtgctctccctgtctgtgtgctccatgccgcttcactcaggccagggggaaaagccagcagcccctttcccacgtggggagctggagtctcccaagcccctggtgacccctggtagcacacttactctgctgaccagggctgaggctggaagccccacaggtggactcttcaacacgccaccacccacacccccagagcaggacaaagaggacttcagcagcttccagctgctggtggaggtggcgctacagagggctgctgagatggagcttcagaagcagcaggacccatcactcccattactgcacactcccatccctttagtctctgaaaatccccagtaggcatctgccaagaagggtgctgaaggctccagccagctgtcctgggtttccgttttggttccctttcatacagagggttttctatggatcactgccaaacattgggatcatctcctctgtccagaggtcttcaacaggaagatgccagctggcaccactgcactgtgatgggggccctctcctctgctgactctgccgtttctccaggcctccgctcagtgatgagaccaagagatcggagacaagcatggtgctgctgcttctgctgcttctccagaaaatccctgggacacctttgttccagcctggtttcctgggctgggctcaggaaagctgccaaattcagtcctatgttgggtccaagctgcccctgtgctgtttctgtcaagccaggtgtggacattccaagttcatatgcgtgaacaaaagaaaagaggaacccagtggatgtaacagaaccgactccagttgaatgtttagatttttgctaaactgttttctttttcccttttttgctgtggtttgcattcacggcagtagttagcccaggtgtggggaacgagagtgcactgcatgatagcgttctggtgagctgggaaggacccaccactgccactgaggattgttttggaagaaaggaatatttttatcttggggaccagctaagtctctgcagtagtgtgaaattccaaatggttgttttatcattggtttggtttaccaaaaaaaaggcagggaaaaaaaaaaaaaacaaccgtatgagcgcattggcttgtctgccgcaggcacagaagggtagaaagccacagcagggggcagtccagcagactctgactcaactttctaggcacctagcagagaaagataagatcaaaaggtgtttggtttttcttttaatttttattgtagtttttttgggtgggtgggggaagtaaactagactgaagcgatggattttttttttcttttttttctttagtgtttttccctttgttcttgaacacttttgccctgcagcctcagttttgaattcttttagcaacttggattagaggggcccatatgtcagaagctcccagcacctcctacttgggagaaaagtgagccatctgctggtcaggaagtcctccagagaggcagcttttcccacaatggtggcaggaaactttggggaaagcaggaatggtgtccactgctgcggaggaactgccttcagagaaggtggggctggaaaagggttagaagcctcctagctgggattgtctttgtttcacctttctttaaattagaattacagaagcccctgcccagtgaacagataacaattggtcttatgctcctccctttcccccattttttcttttgctgttttgttttttgttttttgtttgtttgtttgtttttttgagacagagtcatgctctgtcacccgggctggagtgcagtggtgcgatctcagctcactgtaacctccgcctcccgggttcaagcaattatttgcctcagcctcccgagtagctgggattataggcacccgccaccatgtctggcttttagtagagacggggtttcaccatcttggccaggctggtcttggaactcctgacctcgtgagccaccacgcccagcctcttttgctgtttcattgctgacagtgttcaacaatatgccccatctttatatatcctaagaaacactaatcctaggttattgctagccaaaatatttttgtcctgagtagtgtcactgggccaaaagatagatcaggacgacagcctttagttttcctgaaatcaccaggtcaggcacaaggagaaaaggttcctggatactgactaacttgggtgggtctagccaggagaaagacagtaacatgtgttctgtactttctgggaagatccctgaagccatcacagaggctccccaacttctgagtcgcccatctgttgctgtgggagtgtgaacggatcgctgaaggagagggagctttgctctctctaggtgggcaagtttcctgggctctctgtgttgcctccctctggcttcttcctcccgtgccctctccccgtgtgccccagggggatcagggatcctcaccctcctgaggcccagtggggaagaatgaacatggcttcatccaggttaactgatgctgccatttgcccagcctcttccatcccagccctgtcagtgagcccaggtctggtgcaactgctgcaggatgcctgtagtagggaactctggaagtgtattgggctgaggtgggattttccctccccacagtgcactgagcaatggagggtggtgagggagccatgctgctgaattctggttggcatttccccattatgtaaaatggggtgttgggtagggcagactctgcttgggtttggttgtaagataaacctggaggagaagcacagttgtcccattgaattatttgagcaaaaactactgtaaataacttttttgtcttttgtcaaataaaatttttttttgtttttttaagcagaaa

SEQ ID NO: 1351 - protein, 233 aa, Homo sapiens; identical to SEQ ID NO: 1349

SEQ ID NO: 1352 - DNA, 115346 bp, Mus musculus
  misc_feature (1)...(115346): n = A, C, G or T/U
gcctctgcatcaactcctgcctcctggttcctgccctgtttgggttcctgtcctgacttccttcagtgacggactacaatgtagaagtgtgagccaaataagccctttcctcctcaacttgccttttggtcatggtgttccgttccaactgtagaaaccctaactaagacagatgagtttctttgctttggttttctaagccagggtcttctatgtggcccaggctggttttgaacttgagatctttctgcctcaggcccctaagtgctgagattataggtgtgtggcaccatgcccagccctgtgtaatgtgttcaaacaagtgaatgtttccttatggagtaattcttcattcaacgtttttagcatttattattgactcttctttccctccttaatcaattattgtattagttattgtaaaatggaactggtattttgaggtctattttatttttagttagttatgtgtctatgcatgtgtgtgtgtgtgtgtggtgtgtgtacatgactgcatgtgcctgtggcggtgagagatactgaagcctctgaggagctggagttacaggtggttgtgacctgcccagtgtgagtgctgggaaccgaacctgggtcttcagcgagagcattcaatgttcttaaccattgagctatccctccagccccaagagatgcatttaaaaagaatatttactcatttcatgtatgtgcgtacactgtactgtcttcagacacaccagaagagggcatcagatccccattacagatggttgtgggccaccatgtggttgctgggaattgaactcaggacctctggaagagcagtcagtgctcttaaccgctgagccatctcttcagcccgagatgcattttaataagtattgtatatggttatttacctaagggagtttggaggctctgggatattgctatcaaggcaccaaaggcattagctaagagcagctgtttattcaacttggctaaatgcacatccctggtctctatcatatcctaaagaagaaggaaagaccacaaaggccaggactaaatgctctcccatgatccagtctgtgctcagccaagtgtggaggaaaggggatttaggcagtgatcttgaaccctggctcctgtagtcaccttgcatttgcagcatgtctgaggtttttcaaacctgtgcctggacttagaaaatcaacatccaatgattctaactgccatggtctgcagcagcctgcagcagagcctgggcagggcagcctgaaactggcagctaggagacaaatcagtaaccacagggcttgggatgctgaggtgggagatcaagttcaaggcttacctgcaacacagggagaccttttctccgttatctattcagagtctcagtaatatagcccaggtggccttgagcttggagtaatccccctgcctcagctttgaatgctgggggggggggtaggtgtgctactacacccgcagaagccttttattcagaaagcaaacaaagctaggaagaaatataaacgggagttcaccttaacccctacccacttctgacacacagccctatagaatgtggttgtctattggtactagccacccagggtccctccaccccaactacagtcctgctgtgtgcaaatggcttcagggagcaggctcaagaggtagagaaaaggccacttccctcaaaagtatgaggacatgggaacacacacacacacacacacacacacacacacacacatacacacacacacacacagagtattgtacaattggagatttacagagcaggaaatgggcctggcgaagaggaaaggaccacccagccggctcctgccagagcaggagcaccaacagggcatgcttttctccaatgccctttgtcgtttcagaccatgtgtcctctggactttctgtgtgcctgtggttgtttgagcctggcctgaggccagcatcaccaccagagtcagcagcatagggagccacctagtcaggctgcggtaagctgccccggggactgaacggactaggtatgatgagggagtggataaacaggccaggccagcacctacttctggttagcgttaagcaccagtgaaccaaattgcctgtagcatgagtccctttggggctggaattaagtcctttctcagaccctacgggctgtaggactcacttcacactgaaataagctgttaattcactgagttctaccagtgatttacataatgtagatactatataacacatctgtaaaccagaattgaccggttgttgtgcaagagagctaacatcatgcagctgcattttacatgtgggagacaactcttttggttttgggtcctcaatcatttactgtagcctcttatgacactcactggccttgagttctaatgctttataaacacccacagatggccttggattgaatggctgggatcctccagcctggggacgggaggaagggctttggagtatacctaccaattcagcattcaagagctgctttaagaaaggaaaaacatggactggagagatggctcagcggttaagagtactggctgttcttccagaggtcctgagtttaattcccagcaaccacatacatggtagctcacaaccatctgtaatgggatccgatgccctctgaagatagctacagtgtactcatacaaataaaataaacaaatctttttaaacaagaaataaagaaaaacaacttactgtgatataattcacctgccatgtaatccagccatttgaaggctgtgactgggtgacttcagtgagtttgtgctgtgtggccatcactagaatccactgaggaacattgttttctttttattattttctcttctttcttttccctccctcnnnnnnnnnnnnnnnnnnnnnnnnnnnnnnnnnnnnnnnnnnnnnnnnnnnnnnnnnnnnnnnnnnnnnnnnnnnnnnnnnnnnnnnnnnnnnnnnnnnnnnnnnnnnnnnnnnnnnnnnnnnnnnnnnnnnnnnnnnnnnnnnnnnnnnnnnnnnnnnnnnnnnnnntagccctggctgtcctggaactcactctgtagaccaggctggcctcgaactcagagacccacctgcctctgcctcccaagtgctgaaattaaaggcgtgcgcccccaccgcccagcattgaggagcatttcatcacttccaaaaggaaagtcctttacctgttgattccccaactgtccccagccacaccctaccaccatggagaggcatcagtccactctcttgtctctgtgggtcttacttttgctttttttttttttttcttttaacttttgagtcacggtcccagtatcccaggctggcgtcactccctgtggagctgaggatgaccttgaatttctgattcttctagatgttgggatgacatcaaggctgctttatgtggtgctagggatcaaacccagggcctggcagtgttcgccaggcaagcgctccaacaactgagctgtgtctacagccagggtttctctctcctggacatcttaaacagaatcatgtggcatgtgagtttgcaatttgcttttcccatagaattgtgctttcaaaatctcatccttgtctccccaccatggctgcctaaatatgaactaaacaaggacaacaacaaaagatgcgccaatgtgatggggaaaagtccatgaggcctcagccccacgaaaagaaaagaactacaggcaactaaggaatgctgagggtagagagggaggcttccccagagaaggcacacaaactggtcatccaataagggtcaaccctgaaaacagacatccaagtgacattatgcagatgtagcaggtggaatttatgtatttaggaatgtgtatgtatgtatgtattgtgtatgcgtgtgtaagtgttgtttcatgcatgtgtgtgtgtgtgtgtgtgtgtgtgtgtgtgtgtgtatgtaacaacaattaaaaaaaaagacgttgagtctgaaagagagcaagaagaagtagaacagagggttaaggggggggaaaggaagggataaatgatatagtcatattataatatcaaaaaaaaataagagataggagctagagagatggctcagcggttaagagcactggctgctcttccagaggtcctgagttcaattcccagcaacaggtccaggctgctgttcaggctgctctaccacttggaccatatgatccagcagacccgatggtacttgagatgtcggtggcagatagagatgctgactggagcctctggcaggcccctgtagatgaatcacagaagagacctttaggattttggagcaaagttgacatcatctgcagataactattcttcctttgaaaaacaactcttggcctgctattgggcctttgtgtcccaataactgaacatttgataataggacaccaagttaccatgcaacctgagttgggtgttatcagacccttcaagtcataaagtaggacatgcacagcagcagtctattatcaaatggaagtggtatatatgtgttcaagcccaagcaggtcctgaaggcacaagcaagttacatgaagaagttgctcaaaagcctatggtttctacccccattacaatgccatctgctaccaagcatgtgcctatagcctcatggggtgttccctatgatcgactgactgaagaggagaagactagggcctggtttactgatggctctgcacgttacgcaggcgccacctagaagtggacagctgcagcattacaacccctttctgggacaaccctgaaagacacaggcgaaggaaaatcttcacagtgggcagaacttcgggcagtacacatggtattacagtttgtttgcaagaagaaattgccagatgtacgactgttcactgactcatgggctgtagccaatggattggctggatggtcagggacttggaaagatcacgactggaaaattggtgtgaaagacatctggggaagaagtatatggatagatctctccaaatgggcaaaggatgtgaagatatttgtgtcctatgtaaatgctctccaaaaggtgacttcagtcgaggaggagttcaataatcaagtggataaaatgacccactctgtggacagccagcctctcttcccagccatccctgtcattgctcaatgggcacatgaacaaagtggccatggtggtcgagatggaggttatgcttgggctcgacaacacgggcttccactcaccaaggctgacctggctacaactgctgctgattgccagatctgccaacagcagagaccaacactgagccccagatatggcaccattcctggaggtgaccagccagcaacttggtggcaggttgattacattggaccacttcctccatggaatttctttaacatcagttgatatttaagttgagatacttaaaagaatgttcccaagggacattgcctcattgtaaatttacaaatgcacttgcaattttatgagaaatagttatatcatgttaggtgtattcatgaccttgttattgtttcatgtggacatgagatattatttgtgtcaagttgacaaggggtggattgtagtggctcttcctggttgtcaacttgactatatctggaatgaactacaatccagaattggaaggctcatctgtgatccaaatcttgaggctgggagatacaagttcctgacctggatcttggaatggagatcttgaggcctagtgggctatgaatctcaggagactaaggcaagaagagctctcagttcaaggtcatctgggataaagcaagtctcagatccaggcatggcggcacacacctttaatctgggccacactttctgctagagacgtacataaagacattgtaagaaggaagattaactctctcttctttgcctgcttgctgtgtgggactgagcaacagctagatccttgaacttccattcatagctgctgctgaccattgttggggagttggactacagactgtaagccatcaacaaattcccttactatatagagactacccataagttctgtgaccctagagaaccctgactaacacagtgggtcacaaccatctgtatggtgtcctcttctggtgtgcatgaagacagggacaatgtaactcatatacataaaataaataaagaaaacttaaattaaaaaaaaactcaccaaaaaaaggagataattaaaaaaaatacttcttttatgtagtggtatgtccaacactttagcccccaaccttttaaaaaaattaaaaaaacattttttatttacacagtcctcttgcatacacgtcaagtgctgagatacaggtaagtgtgggggtggggtggggtgcaggtggggttgcacatgtgtatgtggatgcctttggaggccaggagagggtactggatctattggaacaggagatacaggtagttgtgagccatttaatgtacgtggcttggaactgaacttgagtcttctggaagagccttgagttcttaactgtggagccatttttctagcacactggttctcagccttcctagtgcagcaaccctttaatatagctcctcacgttgtggtgatcccaaccgtaaaattagttcgtcgatacttcataactgtaattttgctactgttatgaattttaatataactatctgatatataggacatctgacatgctacctcaaaggggttgtgacccacaagttgagaacctctcctcttgcatgtctcttccatttaaaaaacatttagaatgtgtttgtatgtgtgtgtatgtctgtgtgtctgtctgtctgtctgtctgtctctgtgtgtttctctgtgtgtgtgtgataaggtgctctatagctggagtcgcagatatttgcaggtcacttagcttgtcgcctgaatgctgggatccaaactccagtcgtcatggtcgtacactaaatgtttccaactgctgagccatctctccagcccccattttatctgttttgattctaaaacaatattgcattgtacaggtagatcattattttattgcatatcaatcatttagtgggcttttgtcttttcttgcttgttggctgtcatggataaagataatgtgaatatttgttgatattcgtgaagatacttattctcatgtctctccagttcacacatgagtggactttctggactgtctgctgacatgtctaaccttttgtttttctttttcattctttctgcgctctctctctctctctctctctctctctctctctctctctctctctctctctctctttctctctctctctttcttttttgaacaggcttttatgtatcccaagctgtcttcatacttcactgttcagcgaccttgaactcctgctctttctgcctccatctctcaaatcctgagattataagcatacggtaccacatggtgccgcctcaccctgttcttaactgagttctctttttattactgagctctaagagttccttatatgttccagatattccctcctgttctgtaggtcattattggttgacttatggttgccataacaaaatatcctggactgattgatggcttaaatcacagaaatttattttgcttgtttgtgtagactgaagtctaaaatgaaagttggtaggtttgggagccaggagtggttgtgcatgtccgtaccttagcattcgaaaagtagggaggaggatcaggagttcaagaccagccttggccagatagcatgttccaggctagcctgagctatcgagtaaaactgtatagaataaaactccagaggcaagtaggttaaacttcggatccattttaagttatttctgtttgtggtgtgaggtaggggtcagtcttcatcccttggcatgtgactcagtttccccagagcaatttattaaagactgttccttctccactgagctgccttggcactcctggtgaaggggctgcagatgcaaagccttcgatctggagtctcagttttgtttcatttgtctgtatgtttgttcttacagttttaccacattgtctcggtcttgattgctatagcttcctagtaggattgaaatgaggaggcaggggtcccctgagtacagtatgccttccctttgggtgtctagtactgtgagagatgtcagtgaactgtacaacacccagatttggtaccccctaccccagtcaagacttcggttttcggggaagggggggaacccaggctctaagttctgtgcatgcctagaagagagatagatggtttcccctcccactccgcccacagctcttgatggaaaccttctgcagagaacaatggcccctctgggttattttaaacttcactctaagccttctccacctgctctgctgtctctaattgctccagaaacagcgtcattcacaactggattattaatgaactgagcggggagcctcgggcacatgaaaggggacttcagacttggggaagtcttcgaaggacccaaccagaggtgggttttgttgttttaagacaaggtctcatgtggcacagacaggctggcctcaaatccataagtatgcctgagagctggatttacatgtgtttgttaccacacctggtactggcacacatgcagggtactggtgtacacacagggtactgggggctgagcccagagttttgtgcctgctaggcaagcactctatccactgagctatatttccttactcaacccacagggttttgctcctccaagaaaagtaactgagtgtattcagcaagtaggaaatcaggcagggtgtagtgaccctgcctttaatcccaacatgtctttaatcccagcactgaggaggtagaggtcaccggatctcttgcttttaaatccagcatgatccacatagtgagttctgagccagtcagggctgctgagtgagaccctgtcttaaaagaaaataaaaaggaaatcagtacacttggtgttgctcccggctttaccggttctatggttctatccctgagtgtttcaaacaggattacgggaggatccctgagacctaaactgtgaatcttgtctgcctccccagctgcttagccctgggtgcctctggctctaatctggaggctgggaaagtgcaggaacaaagccctttgtggagaagagaaccccattgttctaaagtcagctttcagggaatgcggattccagagaatgtttgggatagggcttttctctttgtccactttctcccctctccctggggggaggagcaatttaaaggagcaactttcaaaattagattaaacagagttaaacccattgccttcgagggaaggcacacactgcaggatcttctgcccagcagccgcctaggttacatgacagaaacccagggcgtttgggtcttgttcttagcaggaaacctcaaggaagcagctgggcctagatcttccgggcacctcagctggtgagagtcatcaacctaggcatgaccacttccttcctccttctcttcacctcccctctttccagagcgaaagagtgactggactccacgtcacaggccatggtctattgccttttctcaggtaaaagacctatctatatagccccgtcctctagataaggcctggccaagttcctgatgtttgtggagccttcagaatcaagctcaacgtgggagattgactttcgggcactgaactgaccccattctctgctactacaggtaggatattatccctttctgggcctcactgggtctatctgtcaaatgggaataaaataccaccctggcttccccccctgtctgtactggaggttagaggtgggacacagtcaaggagaactatcctgaagcctgactgtgtctcagctgcttccaaattcctgcagctcagaaaaggggtcttcatttggagggcgctaagatctagaccttcttgttgctcggtgacaagccccttggggatgcgcgggcccacccctttcccccgggagctgaggctccgccttaagggaggagtcaagaggcggcacggtggctcgctacccagccgagctggctctgtcgccgcaccaccagctgcggctctgggacctgcggatcgagccggggccggagccgcccggggtagggctcgagagagcgggtgagttgagcggcgccgcattcctctctgcactctgcggatccggcgggcaggtgtctcgggcccttccagtctggctggtggagaggggtggctcagccaagggagggtggcttaagataattggggaggggggcggtggcggtggagtgtgctggaaaggtgcagtctcccacatctcgctatcggatggggaggctggtgtagagagtgaattggcagggctgcgatggctggattctggggggcgatgtgaggtccgtggtctgtctgggctactgtctgccagggttacaaggctgggtgatgaaaccacagaacaccagacgccctgggcaagcggtctacgagcccggcatgggggcgccgccccctcgcgtggcggcgcttggtctgggcaggcagcgcgctgagagcgctgctccgggggtgggaaaagtcccgggggcaggcgtccctaagggcaaacctgacctagtgcgggatctccacccctagagagtgtcggtcggtcccggtagcccccggcggggtgattccccagaagggatgctctcggcctcttcgcccgccgccttgggcgcgagctgcgggtcccggcgcccagagcgctccactcctcgcgagtcccgcgcatccgttcccgcagggagcagcgcccccgagcgcccaagacaggcagaaacggcgcagccctaccccagaggtcaactgaggggtctcccacaaggtcacgcagagcaccctgatcgccccgagtgggagcgaggagccggaggctctcctacccgcctccgtagcggatgcagactctcttcctctgcgctcccctcccagccctgcctccagctttacggaagatgttgctgatgcagcttccagccccgggcggataatcgggtctaggtgagctgtgactacggccctctctgcaacccactggagcgccaccactactggccaggcctggaagcctttgctctcctggaatcagaagggggggggggggcagagatgaggctgcacagaacggaaagccggtgcttgtgcgcccatgtgattacactgctcataaagggctcctgttcttgctgtcagaggcgcccaccagctcctggttcccgggagcaccaggtgcggcctgtgaatcgccctctgtagaggacccggagcccgatagtgccaggcgccgtttccctccaggctatctggggaaggggctggcggtcgctccaggccctcggggggtggggtggggggacttctctgtgcgccttatcctgccatttcctgcagccagtaaggtaccggagtagaaacggcctccgtggggagggagctttccttccaggctgagctccgcacagctcagctgaagacttgctgtctgcccgcgggccctgcactcggttccccatcaccacagatctctaagaagtggggtgaatggtcgctgtagggtaacagggaggcctcccgcgaagctcttggtgcatcggagcatcatggatgaccctgctaggcaaacccgcctttagtgagggtttgagcggggcgtgtcccctagccaggtgcagaagtggaaccctggtgggtggttctgcaggggctgggatgtggggttccacttttcctccctcactcagttatgtcacaaagagccagcttgtaggaggcggtagggaccagtgactccttccagcgtgctgcctgtttgcaaggcctttcccactcacgttctcaccaccttctctcccacctgtcacccaaatcccatcttctctgccccagtccctggaattctgtgggcaagatgacaatagaccactctgtcaagagtctatctaccattgtctccccccgccccgcccccagatcttctcagcctttggaatggcttcctttaagaaagcctctttccgattcaaggtgattttcacttgtgtcttaggtgcctcagaccccttgggaagtccccttgcgatgggacaattcagccaagcctaaacttcctggttagaagtaccaggtaagtaaggccggtatttggtgcctatacagactttggactcttctgtccatggagtctgggaaccagagcagcagaggaacagaggttaaattctaatcttgctgcttggtgtttttatgagcccgagtcacagagccaggggaagccgaggcaaggaagtggttttctttaaggccagaagtttcctatagagcacctttgagtcaacgacttgtcctatcttgcgagaacccagttctagagcctcagggaacttgttctaaccaatagcaaccaagtggacacagggcagcagattgcaaaggcagcctggattcaagtgctgggttttgatctcctaagacaccctctcgtgctgaccttacccgctctcctgtgccagcaccctgtcttccaacccccatcatgcttgctatgctatggtaaacagtgggtcccaacggacattccagaccaggacagcctctctctcaacaataaggctgatcttagagatcagccttgggggagggggaaggcaggcacaagcccatcacagccaagagtatcaaaacccaaggaagcgatatgagtctagttgaaatgacagctctaagctgaaaagccttggaactctgggtaaagctcttcccagccccttccccatttctcttctgggtaataagaatcctactgtggtcatcttcacggggctctaaggacctggtgagaccacagaacacagacacgcttagtgggggtgctggaaggcagggaggaagtgactcttgttagtaacacctctgtttctttctttccttccgggccctcagatcctgcctcctcccctgctacagggaattcatacttcttctgactccagttcttgggacagagaaagcctctttagcctgtctcctgggcaatgtcctgggaattaggcctctggaggacccctttctccagggtcctttgtacatatctcgtgcttagcaaggggttgtcataaccgaggcagctctggggaggggcggtcctcaggggagaggcaggcctgcaggcagagggtctggtgtggtcaaagctcccataggaagaatggaatgaagagcacaaggagccctaggtttgagccatcacactgtgtgacagaatcttttccctcacatgcaggtaagctgcctgctggtggtaaagtgagcagaagagatactgtgggtaaggattagctcagggctgtccctggatgaataagtgttcgcagatgttagttgctattattattagtctattattaccaataacaggtgggctacacgtatggtgggagcacatttgatctcttcagtggtaatcttccaggtggtgggtaatggaggggtaggcacccgggcatggggaagaactgcgtgtgtgcaggctggaaagctctggatggctttggtgagctgtgggtgggagtcactgctgaacccaatcaacagtgtgatgcaggcaggtcctggtaggaaggccagggaagaagtcagaggtcatcctgccaggggctgtgcatggttaaacgctcgctgacccgaagcggcactctgtagcctcatcaggaggctctctgcaaaaggctgcctgactgagaaagagcaggattaatttctgcacgggaggaagagcggggctgcgtttatactgaaggctatattctctattcctattccttcttggtcccttccagcaagcataaagttttctctccttccctctgcctgacatgccccccccccatgccaaattcttcaaaaatgctctatgccagctgggcatgcttgggtatatatgtaatctcagcactcaggaggtggaggcaggaggatagcaaatttagggacagcctgggctacatggtgagaccttgaggggaaaaaaaaagatattgtgtgttttttcctgtacacttttctaagctggctgcatagtgtttggtttctctgactttgtgccccttggtgctgagcagtgggctccttagaggtggatcaccctatggtatgctcttgggacctgccctgactttttgggaaattcctgagtgcaggtgactgtggggggaggtgttcctggatgtctcagaatccagaatggcattccactggagtcctgcagatgtgcttcagtgagggcagtttgtagcttgattgatgggacaggtggtgaccgaacccccaggtggccccaggcaggaatgagcctttaggatggctgctcagaatattgtgtggctataggtcctgcctacagagagaagacattcaaacacttgcttaaccgttctttttccacgatgacagtttaagttcagggtttgaatcctgattctactttccaccaggttttggaccttaggcaatggttctgtttctttgggcccccaatttcttcatctggaaacacagatcatatatattgtatatatagcacacatataagggattctgagttctcctaaggattttgatcctatgtaaagtgatgggtttctaagctctgtgtgtgtgtgtgtgtgtgtgtgtgtgtgtgtgtgtgtgtgtgtgactatgtactgaggctaaccttgaactgttagttctcctatttcaacctgggccctggggttataggggtgcacccctatgcgtgatgtggcttctaagctgtacatgatcttggtataatgtctactaaattttcttccatggctctgtttgtaccatacatagagttacataataatcactgttcttttcgttttcttttaaaattatttagtttttttttttctttttagatttattttcttgattttacaagcatgggtgtttgcctgcttatatgtgtgccccacgtgtgtgcctggtactagcagaagtcagaagggggcactggatcccctagaactggacttacagatggttgtgagctggcatgtgggtgctgggaatcaaacctgggtcctcttccagggcaaacagcattctcaacagctaagccatctttgcagaccctagtcttctgttttatccactagacccatagttctcaattgtgaacagtttttggccctgtctagagatgtctttgtcagtcagaaccagctgggaggggtgtggagaagagaagtgactggtgtctagtgcctagagaccagagaggctgtaggatattctatagtgcatagcacagcccctcacaacaaaaattcccgactcccaaatgttaatagcatcaaggctgagatcggctgcactagaccttgtgtcctccgaggtcggtgactgtatctaattcattcagctgtgtccccagttgcccagtgtcatgttcagagccagggagacaatcatatacattaaaagaatgaatgaggacttggaaggccttgtgcaccctggagtcccaggggtttggcttatgggacatttttgaatgggcaggagagatttagatgagtctgcatgaaggacagccactcggtgattcagaccaaaggctttcggagtgcgcatactatcttcctttgggcaggtgcacgggggcctgaatcaactggatcatggctgtgttactgctgcatttgctggtgccaggcacaaggcccatctagattctcaagtgggctgggaacaggggccataggtgctaacaaggaacgccctgtcagctgagcccttgggatctgctaggctggggcgcagctgctgtcagcttcctgtttttttcccattctggtggaatgaaggaaacccactgaatggctgtttttccactgacatttacagcaacgtgataggccttggattaatgaggtcaagctacagtgtgaaatcggcccgataacttggaacctggccagcaggaagacatgctcgttttttctttggtctgtttgatgtttctggatggctttgggcaggaagcaggggttataactgctcaaaagaagggtgtgctttatgccctggaattgtggagcctggtgttgcccctttttcctaatttactgggaaggcttgcttattttactgtggactttgaaataaccagcttgttaaagcaaaaaaaaaaaaaaaaaaaaaaaatcactttgagtcaggcaggttgatgactgggaaccaggaccatagcgaggataacccaccccccctccataccctcatcactgcctcaagtagaagaattcaggtaggcagagggttaacgggtatgtgcctcaaactggttgggttagggctagagtatagagtctggtttggcagggctcacacttcagcaggnnnnnnnnnnnnnnnnnnnnnnnnnnnnnnnnnnnnnnnnnnnnnnnnnnnnnnnnnnnnnnntgcaaactttgctgattagcaagcacctggggaaccccaagtctacagatgaagggttctggtgtggactgctcaagcacaaaagacagtttagcctgtgcctgtttgcatagccatctgctctgctggcggctttcagagtcacagatgttacatgtgcccaggcctgggaccagatgcgagcgacaggatgcttgggctcatggagcaactcaagtagccaggactggtgagactgagtttacagtgcgtccaaaaacacttgtctagggatgggccattcctgtgccatctggtcacctggggtttttcaaaactacagatcccgggtcctagcctgtctcacctgtgtccctatcaatccagatgggctcctgagcatctgtttttgtttttgttttgttaatgtgccaagagattctgattcacagctgggggtgggggtaggggtggggggttggtatgtataggttagttgccctgcagggcttgcatcctattgcagggttgtgtacagcccagaggtacctggctagaaggggagcttaaaactagcttgtgcttgttgccaaggtctgcaccctgcacggttgcctctgcttacagggaaggacacctgcttcttgaccaatcatgaacatgtggtagttttgggcatgcctctaactctttgcttctctatcagctctaagtggaggcagtgtttcttactccgattctgttgctcaggaatgtgaagcgtagagacgttcaatgacacccccaaggtcacactgccgataaatggcaattaggatttgaatctagtccatctggcttcgaagtccttgtccttcattaccacatgtgctgacttaaatctctctctctctctctctctctctctctctctctctctgtgtgtgtgtgtgtgtgtgtgtgacagagagagaaagagagaaagagagaggagatctgagcacctcgggtgttggttctcaccctctaccttgtgggagattggatctcgtgtttcttgccagggtatgctccaggctagctggctggggagcctctgagggtttacttgtctgcctcttatctctgggcaggattgctgggatttcagacactcaacaccaatgctcattttttcctatgggttctaggaatccaaactctgtttctcacacttgtgtggcaaatactggagccattgagcacccccccccccccgcttttgttttgcaaaaatgcttttttctctccaaggggacttcccactcccgggtgagtgtcctctggtctttccttcagacaggggaggctggctgtgtccttggctggctttaggtggtacacctgcctctaccacctactgcagtcttgaacatgttactggtttgtcttggatagctgagcctcagtttccctatgtgtaaggaaggcacagcgatactatgtgatgtagatggttcagtgccgagtccgaaaatcgacacgatgtatggatagagataagctattcctgccatcttgctgttgacatgggcttctgtgcatctcgggcggctctagagcagagagactgaaggcagtgttgtgtcgttaagtcccaggggttgggttatacatgttcttcactgggtggcaggtaatcatggcttcctttagcatctgtagccactgcttcttgaattggtgaggccccagtgtctgaggcagcccggtgagctctcagttcagtgtttccgacagagatggctctgtttcttgtcatccaattgtaagaaataggaacacatggtagtgctcactgtcttcagcacctcggcccttcttggctacactctagaattactaacatcgtcagctgtcttatggacaggacagagagctaatgtcatgtgatggatgcagcctcttgttttatcatgaagtaagaatgattttcaacaacatttcatttctttttttccgttgacctataatattaagcttctttttcttattgctgttttatgctttttattataaaaaggatacaaacacatcataaaactccaacagtacagagatgtggaaaattttccatggactctcatccccttctccagaaggaatccttgggcgcctagcatgtctttctgcgcatttttggtgcagacccaaactcatactcatttacatgtttatcgtttatctttttttttccttcttctttacacgtctaagccactctcctctgagatgttcctctagcttgtcttagcacatgtcaaccatatgtatatatctgggtctttaaagttatgtggaatctcattgataaaaacccaccctcatttattctgttgttccttttagggactggagagacagctcagtgggtcataatgcctactgctcttcaggacctgggtttgagtcctagcttccatatggtggctcacaccttccagctccaggggactagatactctggcttccctaggcagcccccccctccacacacacgtgcgtggcacacactcagcatacatttacacactgcgacagacatgaatacatgcatatctttaaaagccgcttcttgcagagagagcataatgtgccatcttggtttctacagatttttatctgtgtgcaccactctgagctcacccataagcaaatgtggttgcagtttgaattgggtcagctctccatgacttgctttctctggtgtggaagctgcccctgctctcttccacaccgatgttaagcactttacttcttgatgggtaccgaccgaggagcctatatcggaatgctcggggtcaggagtgttttgcatctcctccccaactccccacctcgctccaattttggaatattttcagatacacagtaacatgcctcacatatgggacccgagtccaaacaagaattcatttgtcgtctcctcttctttcttatcttcctggcttcccctccgcctctctcttctccttctttctcagtactgggagtgaatctagggctcatgatcataggccagcactttactactacaatataacccactgcctgtgtgtgtctgtgtgtgtgtgtgcatgtgtgtgtgtctgtgtgtatgtgtgcctgcacatgtgtgaggaagccacaggtcaatatccagcatgttggttcccagtcactctttaccctatttttgtgacgaggtctgtcactcagctggggctcaccaactgtgtcagctgatcggcctgaagccgtggggaccctcttgtctctgcctcctcatgttagggttataggcccatatcaccatgtcagcttttacacgggggctggggatcgaactcaggtccttgtgattgggcggcaagcactttactgtctaagtcatccttaacccctgagtacccccttttaagacgtttattttgagacagggtttaagtagcctggatgattttaaacttcctttgcttcagcctcctgagctgttgggaggacaggcctgtgccatcttgcctggcttcatgtttgtttgttcttttaaatatacactgtctacaaaacctgaaggtgatttattatcatgttgtttagtgtgctgggtttaactgtggtctgccatgggtcagggtgaaactgtccctttatgccttcacggcagatctaaaaaggctttggctcctggagcgttttggattttggatatttggtcactcaacctgtaaaatagcctgagcctggttgtgcagtaaatcagctttttttgaccattcgatggtgcctttataaagattgttcaatattcaggagctccattccgcttggccttacacttctcattaaatataaaattaaattaagccagcatccacccttaagttgatctcatctcctagggttggcagacaagtcgttggataaagcaagagcaaaacagtgtagttcaggtcataccccgggggtgcgtgcgtgtctaagccagttgctactgatcaaacctagcttcacggtcggcaccatgagctcgtcagaaacaacaaggactgtatcctggagtgaggtggttgacagtctcagaagaaaacagcttgaagtcagccatggtggtggtgtgtgcccgtataatcctggcacttcaaaaggatcgtgagttcaaggccagcctgggctacctaccaagattctgtcttacaccccataggggtgtggtgtggggagggggaagagagagagttgtgtagggggagatcttgatgagaatcagaaaaaatgacttagctacctcaggagcagcggagggagctggaagttaggaagagtcgattgaaactaggctttatggtggtttccaaggatactgatgggcttcattggagaaaggtcttgcagacccccctcaggtaaatcggtagcgggcaatgatttctgatccctcccatgtgggaggagccatctgctagtccagaaagacagagatctcgagggaccccagggcttatttcagaactcgtactgttggaggtcacaaaggttggatgtgggcagtatgcttggctgtggtgagtcagatgcacagagccattttcaatgaggaagtgaacactagagttctccctgtggtttgctgaggggagcctcctaatgcaacgacaaaaggccaatttacatgggggcctcaccgggtcacaggcagccaagcctgtgccgggcattaagtatttccaggggtctatttactcagttgccacagctcgaggtgaggagcagttgaggatgtcaactgaaaggcactgtagagagcacccacttgctggtctgtgatgttacctggcccatcacgaagctttcactgtagagcgcagtggctcggagaatgagatcctggttctgtaaagttctgcaaccaagccctgactgcagaagcagcttgagcagtggttatgaaggaaggttttggcttggagaggcgacacacttctttgatgttagcacttggtaacacagacaggcaagtatggctttgaggccagcctgttacaccaggcaagtttcaggccaagtaggcctaaatagtgagaccatgtgtcacacaaataaataaaaatgaatgaatgaatgaatgaatgaatacaaaggccgggaagatggcacagtggtaagagttttgactgcaaaatgaggtcttgcgtttgaattcctagccaggcctggctctgcacacttgtaagcccagtactgtgggaggcaaaggcaggattgttggcacttgctgggaccagcctagctttaggatcagcgagagagcctgtctcaagtgagtatggggaacagtgagaaagcaggctactccgttgtctcctggcatccatggttgggtgttcttgcatgcatgcacataccccaccatcacacatgcacacacacacacacacacacacacacacacacacagaaagaaggtatagagtatatttcctgaggcctcttaggagcactacgtctgatagggtaggtaaaacactccgcttggcatgaggagtgtagtcccagttaattccaatggacaaaggcgtcatcttgtcatggagtctgttttctgtgttgggtgtattagcatcctctcggtgtgccttgtcttccacagcagcatcttgctttggaccttctgtggaaggagcgcttgctgctccaagaaacaacagggagggttgccaaggcctgctgtggtggtggctcttggaggcacagcacacccatctgggggaacttttaaacatatcaattcctggctgtatctcagagccatcaaagtagagcatgccaccgtggctctctcgtacatcggtgttcttcttaaagttgtaatgacttattatgaaaagaagcagtgcagaaaatgcatgcaactttgtggaatggcttctctcctttgcctgggactcagagattggaatcgggtcaccaggcttgtgtggcaagtgcctttacccattgagctgccttgttgggtttcttaagaataaaataaaataaaatcggggctggagttaagaggctcaacagttaagagcactgactgctcttctaaaggtcctgagttcaattcccagcaaccacatagtggctcacaaccatctgtaatgggatccgatgccctcttctggtgtatctgaagacagtgacagtgtactcatataaattaaataaataaatctttaaaaaataaaataaaaataaaaaggctgatgtgtgtgtatgtgtgtgtgtgtgtgtgtgtgtgtgctctttagcaactgccttctactgagtctattctagggatgaaattgccagattaagcagtgtgtttacccacatttataggatattgctgggtagttttaaggtgtctggaccactgtgtatcccagtcaggacatgagaatccacacggagccactgctggtcttggtggtcatccctgtgggttttggtgtgtattcctaccctctcctgctctctcttgggaggtgtcaatgggaatgaggaagggctgcataaatgtctgtggaaggcgttcattaaggacccggcctggtgtgccagaggagggtgttttgcagaggaaggtattgttcaggtgtgtgctttgaggcaggggacacatggctcaccaggatggctctggaggctgagctggcacattggagctctggggagaggcctgggaagacttgaacctctttctatttaaggcctgagagagatggggagaccataggtaactagtaatgtgcctggatactaccagagctgatctggattgggggctatgctgtagttttgctcttcaaagcttgcctagatccaggcattagggagacgctggaaaagatagagtaaataccagagccgtgtaattgtccttagcgagaacacagctcatgaggctgcgaaggacaatggagctgggtagcttagatgtgttgggtttttcatcaccacccctcccctcccccctctttttttttctctctcttgaggcagggcctcattatctaacccagaatgatctttaactcaaaatcctgcttctgcctcctgagtaccagaatgtcaggcatgcgctaccatcgcctacttagcatacctaagatttctcatctgtttgttcattacaagcgttaacttcttttacatccttgagcaaagctggcgtgtttgctttaagattccgaatcctgttaatttcggtgtttgtttcattttgagaaagaaccattaattgcctttttctcttaagtttgggttatatttccctaggtttttttttaaacaatttttaattttttataatagttttactttatttttatttatttttaaagagtttttggcaaggtatgctggtacatgcctttactcaagcccttgggaaacagaggtaggtggatctctgtgagtgtaaggcctatgtggttagtgaagcaaattccaggtcagcccgagctatatagtaagaatctgtctcagaaaaaaattattttatgtatatgagggttctgtttgcatgtacatatgtgtactgtgtacatgtctgatgtccacagagaccagagagggtgtcagcgcccctggaactactgttgatgtggccgtgagtctctatgtggatgctgggaaccaaacctgggtcttctggaagaacagtaaatgcaattaacagctgagtcaactctctagcccttttatagtcattttagcctgcatcctgagtgttgtaaagatttggagagagtctggattctactgtgtttctcagaaatgaaagatttttagataactggctactggatcacccaacctccaactccaaacagcatcccctggttgggtgccttagtcaggacagccactgctgtgataaaacatggtgagcaaaagcaacttggggaggaaagagtttatttggcatacataacccgagtcaccatccactgagggaagtgaaggcagtcactcaaacagggtaggtacctggaggcaggagctgatgcagaggccatggaagagggctgcttactggcctgctcctaacagcctgctttcttagagatccctggaccaccagcccatgaatggccctctccacactgggctgagctttcccatatcaatcaccaattaagaagatgctctaaggcttgcctagggcccagtcttaatggagacattttctgaattgagactctcttatctccaatgactctagcccgtgtcaagttaaataaaaagagccagcacagtaggcaccagctgggatctcgtcacttctttgagcctgatttgcactgcttggcatctttgcatggcgtatgccattcaggcggcgctgggcacagcctcccatcccgtttctctccccaccccctttctctccccaccccctttctattttgactgaatataatgtagccttgactggcttcaaatcactatgagctgagaatggccttcaattcctgcttccttctccaggtgtgtgctactgcatgtgaagccatgaaaataccatgtagcgtttaggcaactgtcctgtagctttatcttttagggagggataccttccttcacttctagctgacacggactgaattttgccctctcaagtcacgagagagaaatctttacccaaagattagccaccacacacaggtctgatggagggaagttccctcccattcctttaaatgctgagtcccttccaggttttgcctgatacttggtgttttccgccttctttggaaggaggatggatggtgtctagagcccacagttgtatggaggctggaaggttggtccggcaggaacactctgcccttgctagctgtggaatgttgctgaacagcagcgctgtccattcaggagtcctcagaaccacccaccttcccgcttctggtacagcagggacaatacacactcatctgttgactaagtaaggctttacgctgaaagcagaagtgagaagccagaagaaaaccccaagtttagggccaaggagatggagcctttagtagagtgcttgcacacaagcataagactctgaagtgtgaaagtcagggtagcacacacacctgtagccccactgctgggaagtcaaaggcaggtggactcctggaattcaccgcttagcccagccagtctagccaatcagtgaatttcaggcccatggaaagactgagtctcataaacacggtggaaagtgatggaggaagattccagacatcagccccgtgacctctgaccttctcccatgtgggcttagaagccacaccacgcataggggtgcacccctataaccccaagacctaggttgaaataggagaactaagagttcaaggttaatctcagtacatagtcacacacacacacacacacacacacacacacgcctacaccccgcaaaaaagaacctgtccaaactagtgacttgctaatgacctgggatttgagctagagagaagctatcatttgagaggaaatgagagcgtcccagacatctgagtgcaaagcaccatggttaatagagtgagcctggggttttgatgcaggaagctgaattctattgctatagtaacacggcttcctgcattgggactttcaggttcaaagggaatagggaagccgggtctgctcgagttctgcatgcccaggagggaatcaaagggaggaactctggctgcagatcacaggggagtgactgaaacactcagccacagcatgcatccctgcactgtaacccaggaggtcactggtgcagtaccgggaaacttcaaaacctgcatttgaggagaaaaaaaaaaatcatcaaactggggagggtctggagacttcctattttatgtcccaggcaagagaggaccagacagtcgctgttgtgaatctggtctgagagttgttctgcgtgccatgaggataaaactcactcatcagaaaggggatatttggttatggagccttcaaggggacaggagatgaagttcagaatgggtatatccatttcctgcccaagcccacacacgtagtccattcctacaatcagtgaagttctgattggaatctgctttaaaacaaacaaacaaacaaacaaacaaacaaacaaaaaaccccaaaaaaacaaaaacaaaaacaaaaaaaaccctctatgtggattttattcatttcccttaagaatccctcttttaccaagtatcactgttcaggcccgagatcccagcgctcagggactagaggcaggagaatcaggacctcaagttcatctttgtctacaaacggagttctgggttagcctagactacatgagagtttgactcaaaacaaaacaaaatgaaaaaaaaaaaaacccaaccagaacagaatacaaaccaataaacaaaacaagaactcttcctatatcagttagacttctgagctcatctttgcctgagttttttttttttttccttttattctcgagtaggggagatattaagcataccaagcgaatggcgtaggcactggcccatcaaacaaatggcaggttgagaaagaagagatgccaagatggaaatgctgggacctagctctatttacaagcgtcctaacctttccgagtctgccttctgtttttgttttgttttgtgacagtctcgtatctctcaagctggtctcaaagttgatatgtagccagggatggttttgaactcccaatccacctgcttctccctccaggatgctaggggtgcagatgtttatcaccagacttagtttatgaggtgctgaggattgaactcggggccttgtgaatgctaggcaaggactctcccaactgagctataacctcagcctagtcttctccgctttggaatgaagacaatgcctagatcttcagaactaatgcagtattcccaagaggtgttccggtggaccttggtggggggaggggtgctaattggaggagctgctgctgtttcttggcattctctcactgtgggttcatttcatgggcacagataacagggccctgaaaggcttcccgttagctcagctaagcgtgtgtcttgctgtgtgccttgacagttttctctcttgtgaattggtctgtctgctcacttgaaccaatacgtcttcttagttgtctcgttgctaatgctgcagactctgaaatcttgcacttcacgtggaagatcttttaaaacacttagggtgctttgggagtctctcctgctgttgttttcgtgcacaaattttgcatttggattcccagatctgccactgactggcagagagctgccatcaattctgagtcactttggctcctccctctctcatcctgtcctccaggtaggaccaacttaactgcttctcagcatcatttcacacaccgcagcaaatagttcatatgagaagtcttgtaaaattcctcatcccagcaacttcgcaactggctaagcctgcccctggctacaggggggaaggaaggggtgtgggtggggtgtgggtatagggatgacagctctccaagactgtgatccaagagtctgcagtggagagaggagtcttgctagggattggaccacagtgttttctctttgttaggaaggccgtgcattccacagtactggggatggacaagcaggtgatctctggattgagagggatgtcagttggtggcagggcctcagctctctcatcctttaaaaatggaccctccacaatatgctgtgtttctgtgcttcaaggacagtctgaggagagggggcagctagctggacatgttgccatcttcctgtaggtggttcgggatgtcagtttctagaacctggccctcagctccttagcaggatggagccgaggtcattctatccacaagagcagcttaggatcttgtccatctctgaagtgacagccatcatgtgttgttcaaatagtgtcctggaatccggatcctagaggtccttctatctgggttgataacattatagatctttaagactagaagattaaactggcattgcatgtgtgtgtctgtgtgtgcgcgcgcatgcatgcttgtgtatgtgtgtgtattaatatgtatgtggacacatgtagaagctagcggtttgtcttagagtttctgttgctgtgatgaaaataccatgatcaaaaatcaagttgggaaggaaaggatttatccagtttatacttccagatcatggtccatcattggaggaagtcaggtcaggcactcaagcagggcaggaacctgaaggcaggagctgatgcagaggccatgggggtgggggtggtgggggtnnnnnnnnnnnnnnnnnnnnnnnnnnnnnnnnnnnnnnnnnnnnnnnnnnnnnnnnnnnnnnnnnnnnnnnnnnnnnnnnnnnnnnnnnnnnnnnnnnnnnnnnnnnnnnnnnnnnnnnnnnnnnnnnnnnnnnnnnnnnnnnnnnnnnnnnnnnnnnnnnnnnnnnnnnnnnnnnnnnnnnnnnnnnnnnnnnnnnnnnnnnnnnnnnnnnnnnnnnnnnnnnnnnnnnnnnnnnnnnnnnnnnnnnnnnnnnnnnnnnnnnnnnnnnnnnnnnnnnnnnnnnnnnnnnnnnnnnnnnnnnnnnnnnnnnnnnnnnnnnnnnnnnnnnnnnnnnnnnnnnnnnnnnnnnnnnnnnnnnnnnnnnnnnnnnnnnnnnnnnnnnnnnnnnnnnnnnnnnnnnnnnnnnnnnnnnnnnnnnnnnnnnnnnnnnnnnnnnnnnnnnnnnnnnnnnnnnnnnnnnnnnnnnnnnnnnnnnnnnnnnnnnnnnnnnnnnnnnnnnnnnnnnnnnnnnnnnnnnnnnnnnnnnnnnnnnnnnnnnnnnnnnnnnnngagaatgatcctgtggctttggaggaaggtttgtttgtttgtttgtttgtctgtttgtgcacaggggatgggggtgggggttccacacccccaatcttggaggaactgtgttcgtaatatgactcccatttccctctacctagctgttatataagcttctttgggaaaccggtgactgtgattgatgggaccacatgggacgtttacagatattatatctgcatgtccctgtcctttgtgtgtgtcccctgggcccctccccacactggcattcttacctacaagtagtctggcttctctgggttcacgtgtctaacaggaggctcagtgtggatgactgatgtgttcatgggcttcctgtgtccactgaaccatcgacccctttgaaatccatctcttggaagcctaaggaggccatctcacctttacatgaagcgccaaccccaaacatcaacccatcatctgcttggaatggacctgacaggttgtgttgtcagatgcgggctccagacatgctcagcaaaatccttattctgttggatgctttcccagcccagtcaggattggggctcctgggaaactgtctaccacaccgctggcccttgtctctttgcagcctgatgggtggttattgagtataggggagagggaccccaacattgttctagggctggcctctgattttgcattagaagtttttttccctcaggcctggctgacagcatccctatattacctgcccacaagtctgattctacctgaggctgaagcaaccagtgtcctcaactagtccaaggaaatgtcattggtgccccagagctgaccatgattcatctccagagagagcccgggccatgggttatctggtcactctttattccgatgaattatgaattctgcctctcttctttataaatgtgaaaccctgtaaatgagcttcagggtcaccattaagagatctgaatgaagtgacatgtctgggagaagtagagttgaggagcagttccttggggaccctggtcctccatcaggtttagaaccaggaggcctgggtatggtgactgtgcccagagtctaaaggggtcattcttgcaggagtaggacagtcagtgcaccgagtcccctgacggtggggccggagggacagaggagattgctaattcggatatctggagcaagtctccttgctcatgcgtggagcatctcgagctctcgagggtgatgttatgcagctgtactgtgggagggcgggggtgtgcatccctttagtgaagaagcaagccctgagtgagagctggaagggaggaggcaccgcccgccccgccgccgctgcccgcccgggctgtttgttttgttttctttttcccctcatgctcagtggcacaggaaacacgaggagaaaagcactcgtggcccttcctcccgcagcgcctgccaagaccgccgagaagaatagccgaggaactgggagaaaaagccgaacattttaacagtgtgaactttgaaacgctctctctctgactcatgttcgacagtctcttcaattcgaattcaccttccctcgtgttgtttttctcaaactggtaggcttgattccaaagatgtgtcaatcagctgctccctcctgtgtgtgtgtgtgtgtggtgtgtgtgtgtgtgtgtgtgtgtgtgtgtgtgtgcgcgcctgtgtgcgtgtgcatgtgtgtgtcctttctcccaagtcaacacacatgaatgctgttggaacccagccttgaccttcttcccttcctcaaggctggccttccacttagacctgttgagtctgtaatggcctttgtaggggaaagtccgcatattgataatagtcttctgcaagaggccacaacccttcctggggtccctagacctgcatctttaaaagcatccttgccgcactttaagatattctgggtaataaggaactgggttatataatatatgaggtgtgttggtttggctagctggagtccagcgtctcattgttcaaaggaccccttattcatctcctttaccaccaagcactggctgcatgtagagactgccttcagagcaccttggcttcagtctcctggctcctcagacagagggaagagaaagcttctggttgggccaacttaaggcctaggcctgccctagaaccaatccctgtctgggctcaggcccttaccaagacctctgaccaatcagggctcaggataatgaaggagttctaagacctcccattactgtgctcttctcaggagtacgctcagtagcaggagcaaccccaccaacagcctttcatctgttgtgcctcctgctatcccatggctccgcttccactgagcactcttccccttaagggccaatctcacggtgcccagatgcgcaccctggtcccttctcctcaaggcagcaaggatgagtgtgtgcatagagaagaaccaagttaagactctgccagcctgggggatggggggtaaggtgacgacaccttggtggcctgttcccgcttctcccagggcccaatgccttggccttaaacttcctgttggtcacaattgagctattttggtatgtggcccagatgttggggaaagtcagtaccccaccctacttcccctggactcagttttctcacacttgcacacacttcctgatgacctcattgcctgcgcagacccccatatcatacccccagcccagtccctttatgagctgaggtctcacaggcctgtgtgatggttcattgatactttcaccatgcaccaagcttaaaatattgccattccactgatttacctcgaagcctggcctccttaaaatactgagattgttgttctcccagggccagatagataaccttgctctgtttccactgtccaagtatggactgggatgcaagagtctcttgaagccacctccaagctcaatggagtcctgaattcctgggatctcccagcacccaggccagagtccttcagggggtgggggtggggggctgggaggccgcagggagtgcggctgcctggctgctgttggcctgcaccaggcaattctttaattagcgtgagcagggttttctcgaatgggggcggaggaggtgtgtgggtctattgggggaaactaggtcacctgaaaactagcagtcaggagggaactgtcctggggccctgctgcaagggaacccaaggggtaaggtgggaggggcaaagtcacagaaaatatgccctggccccttttactgctcttgggagatgctgtccctagctttctctagggggctggtcgactgtccttaaattcttcgcccagagcaaagagggcaatacagtaaacaagttctgactgtctggagcttgtagagagagcatcatggtaggagtcaggcccctgcctccgctgctgctcattctgtactcccttgcccgtttgccatacatcagtgagacagggaccatgtctgcctttcaccagctattttcctcatcccttagcacagtcctggtgtgtggcaaatgcttgaaaggtattggctgggttcgtatgggtgcttctaggatcgaggctgcaactcagcggcagagagcatatggaaggccttgggttccccccccccccaccactaaaactaaaccacagaacacgccccccaaacccatgtgagttgttctcctctaagacggttgtcatgagaaccagttgtcgttgtgaggcggcttccccaaatgtcagtgacttacatatcctgccaacactgaattctgacactatttcattttgctttactatcaagccactagttgtagattgaaatgaagttatataaaaaaaaaaggaaatttcatgtcacctccataaataaacagtagctgtgaacacagccaccaaaccaagcgatgcttttacatttcttcttaaataccatcgctgtccccctccccaggccgggaacctcagggggactgactggcatggctctaaagaggttaccacctatgagcatcagactgatgcttttttttttttcttcagaaacctttgaagatttttttttttaaaggcatggaaaggctgtattctgctgtctgcaaaggcccatgctgcaagccccctaccaatgaactgtgcctccagatttttctttcttttgagacagagtcttgcaaagtttttcaggctggtattgaacttgccgctctcccatctccggctcctgtggagagaaaaggagagggagggcaggggagaggagattacaggcctatactaccaggtttggtttcaatagtttttattagtgtgtattaaatatataaaagagtgactttcattggttctgatctctttctatgtttagaactcctggttgaggtgatggctgaaaaaggtttctttcttttttttacttttattattattatttttttgagacacagtctcatactgttagcccaggctatcttggaactcactgtatagcccaggctggtctcagactcactggggccatcctgtctcagcctcttgagtgctgtaccacaggcatgtgcttttatacccagtttggaaggtgtttgagaagaggaaggcatttttacatgcagttgcatggcatggcttattcctacttcagttggcatgttttggggctcccctacccagggtgtgatcagtgttgataatgaagaagtggatgtgtgtgaagttatatcgctgtaagacaccaacagaatacttaggagagttcaacacggatggaagctctccttcagggagtgacataagtgtaagggtgctgtctcttttcagtccctagaatcctatacacctttgctgagtgcttgctggacagctctgcaggcctgtttatgccttgaggtataaatagctgcactctgatcagggctgtggagattccaagatggccttcccttttctgtgctgagtaggtctctgatgtttggaggctgctgtgtccaaacacaaggctgtgtcctaacacaaggcttcagactcagtgactataggagctagtgatcgggacagttaacatgaggtcaggtgggatagaacggtggtagggactggggtaaattagaaggtatgtgtttcattagagggcacagattttctctgcactttttagtggctgctgtgtaagtccacatggccagatgtttaaatgttctaaaagctaaacgtctgatattagatataaaaactacattaaaaacaagtattaaatatgaacaattaactgagatgttgaggatggcgtgggctaaacccaaatagaatgataaacatgaatagaccaaaggaagtttgctggttaagtctggcctgtagtcagaaagtgcatctcacagacctcaaacttccttgatcttttggtcggggcagccctgttcccagggctttatgtgtgttaggaagcaggccaacaaccgaggtacatccctagaccacggatcctctattttctagctgtgtgatgtttgttaaatggcttcatctttctgttttctttacctgggaggcagcactggtggtgtctacttctttaagtggctgtgaaatttaggtggaacctcccagaaggcagagctggtcctccttccatctctgaatcatgctagtcctccgggcaggtgttcacttgaagaaggagaggcaaaattagcatctggccctccagctcgtagggcccgatgtcaccatgacactgtgtgttggtgtattcctttcaatcccatatgctcaaaaaccccagccgcagtagctatctcagcggctgaaatagagagcagggacaactctgagagctgctggggagccctgctcattcatgccgaagctctctggagaggacagtagcaatttctctaaaactaactggggcgattaccagggcccctggcaactgcagaatgagggcattcgcccaagagaaaggaaaacttacgccttcacaaaaacctgcccacgaatctaatagccacaaactggacaccacaacccagatcttttccagtgtctggatggggaaacaaattaatgtgcagtgaaatactagatagtaatagaagaagaacgaactattgatacatgtgatagtttgggtgaccctaaaaggaatgatgtggggtgaagacagccagccatcagatgttacttgcttcctactcctagaggcaggcaatagattggtgccacgggctaggatgtcagtgggttttagggcacttaggatagatgttggggggttcccgagaggggtgtgtatagctgaggagctgttggtgttttactgtggtggtatgcactggtgaaattgttttagaggaaacatacaagtaagaatctgtaacactggagagtatggattgcagttggtgggtcatgtcattgttctcaaattcaatgctcctctcctctgattcctgagaaggtggctgttttgcatcccacaaatgtggacccgcccatctttccatgtctcccagcagcctgaggcagccttgtcgggtgggccaagggagttctgcctttacgcctccgtctcttcttcctcccgagttccattttctgctagtagatggacaactgtggccagctccttgatctcttgactaccctggaattcggggaggagatagagcattttgcagataggaatttggttttcaagaggcttcaagtgattgtccaaagacctcgtttttttgccttggagaacccccaggtctgtgctgatggcccagtcgcacttcaacctctggaggcagattgtgttgttttcctttgaaggctctccaaggcctgtgttctggtggaggaggggtagggaggggtgggggaagaggaggggcttcaaccaaacgtttccaggtccaatggtaagcaaactttggggtttgggagcactttaatccttgaaactcaggatcctaaaaaaaatcttttgtttatacaaactgtttattttttaatattttaaattttatgagacagcctcccagttccaaactgagggctggcaagatggctcagttggtaaatttgcttgccaccaagtctgatgacctggggttggtccctagaatcctcatggagggaagaaagacatcgactcttgcaggttatcctttgacctccacgtgtatgtacatcatggtgctatgcacattcacacacaaaccaaataacatgtaaaaaatataaacctatcatgtgttataaccatgctggacattttgatgaaaaaaagagtaactgtcctaaaccaaccaaaaatagtgagagagagagagagagaatgagagggagagggagagagagaaagagagagagaggggagagggagagagaaagaaagagagggagagagagggagagagagggagagagggagagagagaaagagagagagaggaagagagagagaaagagagaaaggtaaagagagagggagagagagagggagagagaggaagagagagagggagagagagagaaagagagaaagagagagaaagatagagagagggagagagagagggagagggagagagggagagaaaaagagagagagggagagagagggagagagagggagagaaagagagagggagagagagagagagagggagagaaagagagagagagagagagagagagagagggagagagagaaagagagagaaagagagagagagagagagagggagagggaaagagagagggagagagggggggagagagagagagatgctgtttatactttgcacatctctgtgttgggctttacatgtgagtgtcacagcatgtctgtgctaatctggcacacgtctcctgctggacatcacgaggacccttgcacaccagggtcacaacgtgaatggaaaaggttgactaagagttttgacttcgttgaaacccacggggtgcccaggccgatctttgagaaccatggcagctacaccttacttacgtcctcgtgtccatcctcgttacagtgtgcaccacagcgagcaaaataacagaagctgaagtgcctggcgtcgtgtgtatgatgatttggcttctagttgttgctttttttttttttaaggctgggtctcatgtggttcagactagccctcaaactcacaatgtagccaaggatgaccctaaacttttcatcctcctgccattacttcgttacttcggcagggctgggatcacaggcattcacttccacaccccgtttatgtggtgctggggatggaatcccgacttggttcctgccagctaagtgctctacctgcagaaccctattcccagcccaaaggcttccttttccacaccgttcggtctggggtttcctgggttcgccagtccccatggtgtcctgagctccaagaatgaatgccctttggttccagtgtcacataacttatttcaaagtaggattcctttgtacaataatgctgccaagatcaggctcttgttagcgaactatggcttgagaggtgagtgttcgcatcagggcctcccaaacctatgacatcacataggtgacagcgggacctgcgacctgcagactggttgccaagtcaacaggcaccatcttcccagcatccacttggctcacctcccacctttttacctgccttacatcattttccatataaataaggagaacgcccctcccttactctctcccctcctccctttctgctgctaccttgtctctctcactctctcaacaaaaaccttggtcacgtggaactgcctcggcctagtgtgctgttgaaactcgacccaccattctaacacatcagtgagcaagcactatcatgcagcagaactttctggaataatgggatggcttctatctgggcattcaacatagaaaccactaggaagtctgcacttggatgtgtcagtgagattgggttttatttactgtaattaattcaatgtgagtggccaccactggctcagctcacagcagggccaggccttgctgggactccactctaagaatctgcccttttgcttttggcacaaatagagaacctcaaaggagctttgaactcggttgtgggaggtcaggtgactttgtatactctgcgatgtgtgtgtcgtcgtcggggctgaccagtccatctctgtgtctgtctccctgctgcaggccccaccatgaggctccagccccttgggagcccctgtgctcccctggccccgggctcaccgcgctagccccaggcagagcaagggcaggcgcggggccatggccagccacgtggacctgctcacagagctgcagctgctggagaaggtgcctacgctggagcgcctgcgcgcagcccagaagcgccgggctcagcagctgaagaagtgggcacagtacgagcaggacctgcttcatcgcaagcgcaagcatgagcggaagcgcagcacgggtggacgtcgcaagaaggtgtccttcgaggccagtgtagcgttgctggaagcctcactgaggaatgacgccgaagaaggtaaagtcccctgctctccagggcaccgactgtgcggggtgtgtgtgtgtgtgtgtgtatatataaaaaccatacacagctgtgcctgaggtccagtgcgcaccataccatcagcccacattaggaaggggatggccctaggaaagatctctccccaacttctgagacagtctcatgtagcccaggctggcctccagcttgtaatgcaaccttgaacttctgattctccggagctgggatcgcaggcctgtgcctttgacaacctttcccacccccattctcacccccaccccatcccaccccatccccaccgctacttcagctttatcttagctattttcattcttggagacaatgagtccagcttttggctaatgaatacaataacaatttcccttccctcccacaaatatttacagacagactgcttcctgcagcactggtactctgcacgcagaataatgagcacgtgatatcccacccagccccacccccacccccagccagacactccaggatgctaggatgttgcctttctccgagtcctgtcttctccatggtcctcacttggcccctggcatggtgttctggtatcttcttttccacactgggaaggagcccagggtcttaccgaacaaggcagcgctcagtcacagagtcacatccctgatccagttcttggttcactttccactgttgtgttcatgctgtaaggtgattaagatggctcagaggttcagagcactgactgcccttccagaggacctgggttctgttcccagcacccacatggcagctcacaaccagcccggggatctgacatgcttctgccccccctaggcatcagacatagtcaccccacagacatgcatgcagacaaacacccatacacataaaataagaataatgaacatttagaaatgtatctagaccctggaggcagacatcttgggtgtaagactggttgtgcaggtcctcatgtgaccctggcacagagaagtcctttaactgtctgtccttagactctgcttatataaaacgggggagacagtcacatcctcgtgaaggccttgtgagtgttcagttgggtgattgcccctgaagtatcttgcacatggcccttcgtgttaagtatgtggctatgaatttcttgaaatgttgctttttgagttttgagacaggctcttaagtagctaagactggtctctgtgtatctgaagatgaccatgaattcttgatcttcctgcctcttagatgctaagatggtagttataaaccacctcagctggcttattgatatgttttattatattataacatatatattttttgagacagaatttctctgtgtgaccctggctgtcctagaactcactttgtagagcaggctggcctcagactaggggatccacttgcctctgcctcctgagttctgagattaaagacgtgagccaccacactcaaccatgttgttatcttttatttcgttaaatgtgtggcttatatcgtcatggaatttccataagtctggaagcagagaccagtgcacaccacagtgtccgggatgatttcattcttcaaactgtgattgtcacagtcaatgcaagttcacacccttaccctggactggttatgtttaataatacccattttacagatggggatattggagtcagagagatttagaaccttgatccagatggtctaacaggaccaaaacccctaggataccaccctgtcgcttttcaggtttgctttccactgccaggatgcttggaggactcaggcttcgatcaggcttccttttctgtgcatagacacacgcttgctcattatagctgacgtttgtgcataggccttttgaccactcagtagcatctgccttacccctggagaggtctgtctgtgtctgctgggcccatctgcaccctctcctggtattaggtactaaagcagtcactggaagagctgagggctggtatcactaagaacagggactctcctaggctgagcatccctaaccatggaaactggaaacatttcgggtgcctacatgatgtcccacatagaaactaacacacctgacctcatggggtgggttgtaaagtgaaagtgggctagaaattacactcaaactgcttgcagcaagtacccaggaaacagagcgaacgtatgttgacttgggtcctgtgcttaggatatcatcctgtacaccaaacacctctttcgaaagcctttcagataagagacaccaacctgtgctcgccttaccctttgagttccagaatgctctgaaagctccgttcagatcctgtttttatcctggtgatgcagggcctctaagatgtgagcagggacagggtcccaacccgctgagcttccagctgctcaggtagagctggggtgagcccctgagaggccgggtggctcagactggggatgtggccctggggctccttccacgtgcagtttggtttgctgggtgacgtggcgccctatcccactcagggggtggctgcctcatgacaaagtctaatttttggtaggcgtggcagttcaccaactcctctctcccaacttgtcagttatccccttctttgggaagccccattcccctctccaggggcctctgcagaggctctgggaattggccatatgttatagaatagctagcaatgacatgacacctccccagcccactactcaaatatcatccctttttgatagtcaagtgccttgcttagaagaaacataggtcagagtttaacgacacccctctaccacattcctagcctacaaccttgaacaatttgttttgcctctccagtttcaatttttaaaatctgtgtcacaaagcacgaagggcttggcttcaagaaagtgtggcaggaattagaaattgttcaaggtgtatgttgttcagtggacggagggtttgcctagcgagtgtgaggccttgtgtttgaaccacaggactctatcatctgaccgtagtgtcacacacctgtgatgctggtaccagagacaggaagatcagaaattctgtcatcctcagctacatactgagttcaaggccccagtccaggctatatgtgaccctgtctctacagaacaacaagcgagcatccttgacctttgaaagtttccctgaaccctgagcctgaacagcaataatttaaatggttcttcaggttcaaagactttaatgcttaaaaaaaaatcaaattcatacagatgagttcttattaaaattaaacattagagagatgtgcagagcaataggtcccttcctctcccttctttctcctctctcttttttctccctgtttccttctggcagtttttctcctttgtggaccaggaggctcatagacctccttatctccagaagtttttaatgcaagtaatgacatcttggaatctctgtcacgtgactctagttttcacccacacccccgcccccttatgatgtcttgcagttatgtctgccagacagaccgcagcacagcagacccgaacagttcactgttcggtaacatttttttttttgcagttggcttcaccagactccttaaaatgtccctagtagtttttcttgtgaaaagtgaacttttgagcaggtgtcttaagtgtttaccttgggtgaatgtggaagcacggttgagcacggttgaagtccttaaatctgatcgagaaaggatctttggggtcggtgtcatcgtggtgtgtggaatgcggtaggggttgcatgacaaggaccctggggtccacgggtggatgtgtttgaggctgccagcagtcagcagctcttttacttgctgagctcagctcagctccctggcagcctgaccgagcccactgtgcctggctggctggctgagttggtgtttgagaggctgctgggttcacattggcgtgggagcacagggtgggagcacagggtggcagctccagggtggcagctccagggtggcagctccccactccctcaagctcagagcattctgagtcagcttccccacctgcagtgggggtgtgtgtgtgagttgttccccctgaagagcactccttctctggctaatgtccttgaccttggacccactcgagccccatccttcccacttccagtatcttccatccctccaccaggctcccctgatgttccctgaggtctttcctctcctctacacctctgggtgggtggttccctcacctgactagcctccctgactcttcaggtccagaaggagagctatccacagacaccttcgccatcactaccatagaagccctgtacctagatagccctgcacctagctgtttcctagaggcaagggagagccagggaattgggctgcagtctgtcctcccgaattgagacctcagctctaccgctaatgacctgcacatttcgggggtgggtgggtagtggtgacctgacttctccagtcctcagtttcttcgattgagctccttaagaacgcacctgccacgtgacgttgaggggatgacttgagttggaaaatgctgaggaggtgtggtaagacgtggggaagcggcaggggctgttatttctgtggtacctattattctccatttgcataagctctccttgttatgtattctgactctcaccttcatgattatttatcaggtactgtgcaccaggccggctgcttttcttacgccacctcgcctaatcctcatggtagtcaaaccctattttggaaaagtaacttgggtttttttttttttttttttgcatatcataagatgcactgcccatttttaactattcagtttaggggttttccacaacaccccagagctctgcacccagctacttttagaacttattcatcaccgcctgctcctgtgcagtcatgcccaggtcctgctcccagtcccaggcaaccacgaatcatgcagtgtaggatccagttttaagcttggccaggttgtagtgcacgtgggcgcttgctcctttgtttcaaccttatagtgctccactgtatgggtataccacagtcaatttccactcaccgacacctgagcatgtgggtcctcgccgttttgggttgatgatccaatgctgctaagaacatggtgttcgagtctttacgtggacatcatcattatccatcatttttgggtggatcattttgtgtggaaaagagctgctgggtcacatggctcatgtcctcgatgtaacttgctaagaaacagatgaatggttttctatgggttttagagtaggcaagaccaccacggctgggaataagaggtctagctaccccaaaagccaagagcctatggccagcagaaataccaatatccatagacccaaaggagcacaaattacaaccacagatgagctgttgttttacaggaaaaagcgaaagcgagaggtaccgatgagctgggggggggggggttggagacgcagttgagtcctgggtctgatttgtaagccccacagaaccctgcagatgactcagcctctctaagcttccaaatctgccctgcaaatgggcttgcggaggataacagtactgcctctgctttagaaaacctaccaggttgtagcttatgtgtgtgcttacgttttggcttcagccttgtggtacctcactggacgggcgcggctcaagtgttttccactcaccaaggcaggggaagcctacttaggtgaaacatgcagaaattaaacatgtaaagcgattctaaagctctgttctgatgctggcaaaatggctcggagggtgaaggcactcgccactaagcctatggcctgagtttggtcttcagaacccacgtggtggaaggaaagaaccagctcccataggttgacctccatgtgtgtgccatggcacagaacacacacacacacacacacacacacacacacacacacacacacacacagagcgtaacaacaacaataataaaaagactgtctgccataagttagcgtgaggtgcaggaccctcatctgctcagccctggctaatctgaaggaaatggttctgactttcatttttgatgatgtttgaacaggaaattctcctttcctctcattctaaaaataatgcgtccttgtagaatattccaaaaaccataggaaagggaagcactaagaagataaggctcacatatacaatgactaccaacagcctcgggtaatattttcatctttatctaggaagtaccccgtgctttcccatggggtgtatgaaggaaagtttaagtaaggggtggaatgtggagggcttgtttacttaaccgctgagaaccctgagagcttctgtttagcaagggtctgtcatgagtatctaccgcattataggttaggcacacacctgtagtcctagggtacagagtctgggactgaaggattgtgagttcgaagtcagcctgggctatatattgagaccctgtctcaaaaataggcggatgggcaggaagagagggttcagcagttaagagtaccgactgttctcaaagaggacctgagttgagtttttagcccccatgtcaggtggctcacaactccagggaacccaatacctccttctgggactctttgaacacctgcatttgcacgcacataccctcacagactcacatacgtaattaaaaacttaaaaattaaatgaagaaattaaaatatccgggtacattttctttggtcattaggtcagagttgtaccctgttggtttttatgtttcttctgcacagtggagctcatcaactggctaaaacagatgtttctgtcttccgtgggaaggcagggccagctttgctgggctgctctagctgggatctctgttaggatgtggccactctgaggttcccatgaggctggaggatcaatgccaaatgctcttgagtaatgtggtcagatactgtgtcctgtcttaatagggtctttgaaatcagatttttaatagattgacatctcttctaatgttcaatgtaatgagatttacaggccaagccctgcccagcttctctcagttacagatttggggtttgccttttgcacacacacaatgtattttgatcacatcctccagcatatagatttttaatgccgacctctgaatgggagtctgagtgtaccatcatctgtgcagtctctcttgttactgcactctgagctgtccccaggttattttcctaatgtaaaccttgcattctatcaatgtatggaaggaagcctttggccacagcttggattattaattagggtggattcttagagatttgttggatgtgagtatataaaagcctgtgaagtttccagtagtgtctctagtaaggtttcactgccatgttctgccaggcctgctttgcccttgctttgcaaattctcactggattgccaccagatacattggtggtgtgaataagaatggttcctatagacgcatatatctgaatgcttggtccccatttggtggaactgtttgggagggattagaagttgtgttcttggtatatatgtgtgtgtgcatacatgtgtagatgtgtgtgtgtgtatgtgtgtgtgtgtgttgggaggtattagtaagtgcaggctttgaggtttccaaagcctataataatataaagcctctccctgcctgtgcttgtcgatcactgtgtgagttctcagtgactgcttccagctgccacgctccctgtcacaatggtcacggactctcactctccgaaactgtattcctcaataaaccatgtcttctataagttgtcttggcgatggtgtctcttcatagcaatagaaaagtaagacacgctgggcgtggtggcgcacgcctttaatcccagcactcgggaggcagaggcaggcggatttctgagtttgaggccagcctggtctacaagagttccaggacagcaagaagaagaagaagaaggaggaggaggaaggaggaaggaggaaggaggaaggaggaaggaggaaggaggaagaaggaagaaggaagaaggaagaaggaagaagaagaagaagaagaagaagaagaagaagaagaagaagaagaagaagaagatgatgacaaaccacggacataggaacaggagaggggaggagagagagagatggaccatgagcagcagcctgagtgatatgcccttgaggacagagtgatggagcagacagaactcagcaagtacttagggagtgcagctgggaattagtcagtcgagcataaggaaaaatgattggggtaatttgcccagtaattgtgataaagctgattaaataaatctagaaggcctcactcagtctcacctgtttatgagctagctgaggatagagatatttagttttaaaaaatgcatttacaagttcctccattcacttctgaaatatttttgtcatgttgctatttagttgttcattaaaattttcagacattaacccannnnnnnnnnnnnnnnnnnngaggaggaggaggaagaagaagaagaagaagaagaggaggaggaggaggaggaggaggagaaaagtaagacactcacatccacctgtagggattttctcatcactctgtaaaatgtatttaaggctgagaaactctccctaatcttactgattgcctgttgcttgttttctgaactacctggttttttttggtctatattttctactacccccaaaagtttatttgtttttaaattgtgtttaatggctgttcatgtttgagaagggaagatgggtgagaaggggaacagtgggagggggtgtcaaccctctgctgtcagtcacggttcatgtgctttctacagtatgtacctttatgtgcttgctttaaagctgttttaagaacatagtttattttcacagtgctggagcttgaagccagggatttggcatgctaggcaaggactctaccactgagccacaccccaagctatggttatggtgaaggttttgtttatgccttgaaggtcttaactttatgtaataaaaatctataactgctttccccattctcttattattttatcattttcttttatacccttaaaagcaagagtttgggacaggagagttgggttagcagttcttgttgctcttccagaggacccaagtttggttcctagcatccacaagggggctcacgactatctatgactccagttccaggggatctaacacagtctttggacctccttgaacctcagacacacacagggtggatatacatatgcatacgcacatacgtgcaggcaaaatacccatacacataaaacctaaaatagaggaacctttaaaagagagtaggggtttggaaaattcaagttgaaagccagctctccccatggactgttttgtgacaatgttttcttagcgcagagctatgactgtgtatcatctgtgacagcggtcacacagttgagtttgtagcagaaaccgcagagctcataaaggtgagagtatttactcagtgtcttgaccttcagagaaaataccaatcaagtttcaagcatttcctcatcttgcaatacctaatcacttgcaatttcttccaggtctccgtgacattgtttaactaaatcaaacatgtaatcccactggagttcattttagtatgaagtagtaaatgaaagcctgtctctattttcttctccaagagctatcagcttctcaacaccccttgctttccataaggactttgacactgcttttaggccccagggcctcctctgcaaatatgggaacctgccaagctcattcttcaagacccggggctccatattgtggcgggatgcttgactgaaaattgtgttaatagtacagctcaattcttacagtgctgggactcgaacccagagctcgtgcatgccaggaaaaggctctaccactgagccacaccctaagccgtggctatggtggagtttttcttaatgctttgaagtcttattttttatgtgacaaacctaagaatgcttgcctcatcctctcattgattttatcctttgctttcagtttctctgaacaaggcttagaagacttgctcgacagccatgttagtccttctccttggcttctttttcagaatgtcttgattcttattgggaattcatgtaatatttaggccttggtgaagtctctctctctgaacatttggaggtattgattggtgctatagtaaccaataaatttaatttggaccaaactgctgccctctttgccatggtgagctttttctaagtaggtctggagtataggggctagaaagcgagtctgtgtttctcctgggaacatttcgtgttcttgagggatgctgggggtgagggttgtctttttttctatctgttgaagtaccatttttcttcctgagaggaaagctgttaggcattgtctaccaatgtcacatcaatgtctctatcttgagttttcagcaggttctttcagggttttctatgtagaaaaaaaccagtttttgccaaaagcatgtttgatccccctgtttgatcaggagggaatcaggaggggatcagcctgctccatgctccctcagctgtctcttctcttcagccttctgctcctcccactgtgtctatatggccaatatattcaagtaaatatggacacttaacgtatatttagtgacatgtggctttgagacttgggaacatcctctacagactgtgtcctccccagaatctaatctggctatccttggagtgactgatagacacctttctttctggtcgagtttgtctcttcgtttggggtatatcgcacatgtgtgtgggtgcgtgtttgtgtgtgtgtgtgtgtgtgtgtgtgtgtgggtgcgtgtgtgtgtgtgtgtgtgtgtgtgtgcaagtgcgtgctgaacccttggcgcactcacatatactaggaaagttcttcacctctttgcatctagctctctttttacttttttattttgagaccgggtcttaattgctggacctggccccgaactcactgtggtgcccaggtttggccttgaatttgcagagactcttcttcctcagcctctctaatagttgagaccacattggctgagccaccaggactgacctacctaagtccctccccattccctctgtccctctcttcctctttcttccctccttacttccttccttactcccttcatagctactattggcttatagattttaagcaaataagctcccaggttagtttcctgttagttcagcatcttcctgtcctgagtttctcagaactagctatgagtgagcctcttcatacaggaagcaaccaggggctggttgtggttccgtgtgctaagcaccccaccacttgcactcactcccagcagaagccaaatgtcactgtacctggagtccttcctggatgcacttcactcctgacattgaagttaagactctaaatttatcttgttgagttctgaacccattatccacctgctcagacaatttcgggttcttgaatgataaattaagcctcccgcaactccagtgacaaaagcgaaactcagctgcagcagaacaggctggcgtcaccaaaaagcgcaggaagatcacagttttaggccacgtggagaggggattacctctgtgtagttgagcccagcagcctgcgaagggtagatcttgtccactaggcaatcacgctgtcccagggctcagcaaatcccagaaccaaaactctggctaaaatggcctatcgactctctttttaggtcaatcacagtggttaggtctgagaagcaatgctgtgatcggtcctatccaaaccgtacgcccaaccgtggcatccatttctcctgttcacggactaacgcccaggctatgctttgtctaaaccaagacaatgggatgctatgcctggaagcagggaccacaggtgccgacgaggccatagctgcaaactgtacttgttacttttctcaggcagagtacccgactgatgcagcttagagaaatgagggcttaatgtggctcatggtccattgtggtggggaaggtggcctgatggctcaggcagtctgtagtggtggcaatgtatggcatgtaactggcagttggtctatggaaaagaaaacaagagactctgctttggaaagagccatccttccctacaaaagctcaggtgtgttttctccgggggctccacaaactgacagcaacagaatagaagtataggcagagaactctgtggctcccaccaccctgggctctgtcggtttggtagtgagtagtgagctgtgcccgcccttggagctaagcatctagcagagtcaccttgaacagaaccaagcacccacatgctttcctgaggacggaggtgttataaagaggaccttgtcaggaatagacatcaggcaaaggaagctagcagaccctgcgtgaatgatacgctctgcatgctttcctgaggagaggacactgtgaccagcacctttgaagacacccatcctgttgctaagcacactctctcactggagaaaggagccttccgcctctcttggctccgtgccactacacaaaggtactcacgcacctccctgcaaccttctgattgtgacttgtttccctgaccaggtctgcccacacacagagtgggttgatcatgcttaaatcaagtctcgcacgcaaggccattcccatccgcctgtgatgacgaccttgtgctttgggtgtggctggcttcttatctcggagagtaggagactataccgggggaagaaaccgctttcagtgatctggcaaacagtgtccagctaccaaggtgatgtccctggtccttggtgagactgagacaatggagcctccttgaccttgtttcaaactcaacccaccacgagcccgaaccagtatctgcccccaggttattagctaggacacacgtgtaaggtttgtcacatgtccacaaaatccagatagttcctgtgttggcttttcactgtcatgatcaaatactttagacagtcatgttgaaaggaggaacagtttgcttttggcccctggtttcagagatttccatccatggtcagttggctcggttgctttgggtctatgttggcccagtgcttcacgctcagaatgaccagtagaagagactgctgatctcacctgccaccaagactcttacaggctttaaaaatgagcaaacctgaagcccttctctcaactgcccagtcatcaaacagttccgtagggggaaggctgggctttgaacaacagaagaacagtccagattcttcctcaagtattcctccatcaacacaaccatcttacttgtgtgtcagcagagctggtcccccacctgtcctctgtctggctaatacagttgcatccagagctggtgaggacagagaaaggatatagaagaaaacaacggctcaggagggagggagggaaactgcactttcccacaaacccagaaaaactgagatcaaatcccacatcctgatggacagggctccagtacctcaaaagaaactcaaaacacaggctttttgactgaggtactatgaatgccctgaaccccacaaaggtgataatggcagccctacaggtgagtcacgtcttgttataagcagccatcctccaagtctgtttatggatgctccgttactccttgagtagtcctggtggtcttgtggtatggtttgatttggcatgtcccccacatgtcatatgctgaaggcttggtcctcagcatggtttagagatggggcttttgggaagcaactggatcgtgagggctctgatcttgttgattgacaggtgggttcgtagttgaatggacttctcagaagcagaggagagccttgttggaggcagtaggttattgggagtgagctcttatagcatggcttgaccctctgtgctctcacacaacctcatctgttcttcccctcttgatgctttctggcagccattagccatgtaccctggctccaccacacccttctgctatgatgttctgcctcaccataggcccaggcacaatggaagcagccaagcatggaaccatgagtcaaggccaatctttgctcatttgttaaaaaatattattacattcatatttaatgtgtgtggggtgtgggcgtgagtgtgtgtacatgtagagaggtcagagaacaacttacaggagttagttttctccctctaccatgtgggtcccagagattgatctcaggtaatcaggttttgtacattgaaccatcttgatggcccctttcctctttaaggtttttggggtttttttgtggtatttttttttcacagcaatggaatgctgattcacacatcttgccttggttgtagttagcggcagctagtgtgaatcttcttccatgtgattttcatcaagcacagtgctcttagggctctaagaaggcaaacaccagtgcgcaagtgtctgcccagcctttgtctgtatcatacttactgatgtctcattgggtagaatgagtcacgtggcttagttcagcaccaatgtgggaaaaggcaccattcaggggtggccactgttgttataatccaccattcatattcattctagacttaaaaaatattattagtatatatttgttatacaaggtgatgggcttcctaatgatagtgtgctcaaatgaattatgtactttgaccatattcttgccttgacccctcccctgtctctattctccactccctttttcccctcttctcaaatagctcctcttatattttcttgtcataaatataggtatatatctgcatatgtaaatgtacgtgtgtgtgtatatagacacgggtttcacatgtgagagaaacatgcactattttgtctttctgggtctggtttgttttgcttgacacgacattctctaattcagcccattgccctgccaacactgtaactgtctcctttctgtttcagatgtttaaattattctttaaaggttcatttacatatttgtttttgtgtgcccatgtgtgtgcaagatgtgggtgagtgcccatcgaggccagaaggaggtgttggattccctgtgagcaccctaacatgggtgctgagaactagtctccagctctcagcccagccgcttttcttcattttgtggctgaggaatccccacggtgtgtccactaggctgaatctaatggggctggcagcttttctttagaccgaaatcctcacaacgtgatccggtggctcccggcagtcacgctgactgatggtcagatgcagatgcctctgaagtccccagatctgctgcatgacccaaacaccgcagcctggagtagggaatgccgagcgtccggttggcatggactcgaagatggcgaggcagtcaggactcagtgctgggcgtgggcttgtgcttaccatggattttcttgcttattagctccagagcaggccagtgattcatgtgatctcataatattttactgcatatacaatatcttgggtcagtgtaaaacagagacgggaccaagcagtaagccacagccagatgcaatgggttattagttcacgggtgccgttcgctcccatggagataataaaacagctttcaaggagcagatgacgggggaagtggactcgaaagggcctgtgggtgagagagggcagtgccggggtaggccttgaggctcagagcatggaatcatgtgactcttaagttttagcctctattccatagccaggggcaaattacttcaactcttttggactcaaggttccttgggaaactgtaatattcagagttgaagactgggaaggggagcatagctgaggtaaatattgctgttatttgcttctggtctctgtcacaaaaggccagaagcaaagttagcatgtcttcctggtcttcctcctcctgttgctgctcgccgtctgactgtatccactctattgctctttactaacctgtcagtcattcacactgagggttgttcttactgtactcaccttccctttagtgtgaaagagacggcggtttgttttgtaggtttgttttgtaacaagcagggccgcggtggtgcgtgcttttaatcccagcactcaggaggcagaggcaggctgacctctgagttcaaggctctacagaatgagttccaggacagccagagctacacagagaaagcctgtaaaacagcttgaccccactcaccccaccccaacccccacctcccacctagacacacacacacactacacaatgtgtcacttaaagtgtgtttgcctcagggagatctttcagggtctctgtaactaaaagacccagcctttaacttacttctgagtgataccatagactttttctgatctattgagctagtgggactgtgtgtttggattggctccggcagtgtgtatcttaattacaaaacccctttggcaggcccctaattagcgtctgtaaattgctctctctaacctcttggagccaatgcaatctgctctctggttattaaaagattcctcaaccctggacaattttgttaaagctttcccaagttgcttggcacctagcttttttgtcaagaagacatggcggccacccttgctggacgggctctgtgtctgcagtcactccttccggctcatggcttccttctccatttgctgcctacgctactgaaaataacttgtgttctggcaagcctgaaatgagattccttctgatttaatcagagccatggcgaagctcttccagctctctagaggaatcctctagagcctgagggccgcttagaggccgggcatggcaagggggtggagcctgccggagcatcacagttggagccctgccaggcccagcatggatttatcttttagccttttagagtgagaccttgatggcttgcaggtgttttgtggcctatgccacgtggggtccattgtctcagttccctgtaacctcacctgacagcctcaaagacagcaggcaggacacggtgtccctccatgccagctgctcaggctggaggagccagtattttccagatagggagagaataggacgtgtttgtccccactgaagctggggattcactcaggttttgttttttgtttttttcccaaagtggcattcaactagaaagtgactgccctagataagagaagctggggatgatagagtagctgatgagtgagtgtgggtgggtgagagtgttggccactaaaggagctgacaaggtaaggagagggactggggacaggggacagggaatggctacgaagagggggtagctctcgagtgggttaaatgtgagctgtggtggctgaagacagcccagctgggagaggctgctctgccttgtgtacagctgcctcctgttagggctggtgtctgggtcacagttggtacccgaacccggtctgctgcatatccgtggggtacagccctcctggaccaggctgcgttgttactgtgacaagggggtgggtgaggtggctaggtgaggctctcaccttggggaagatactctgaggacctggcatcaccacagctccaccttttctcaccataacctacatttcaccagcatccctcaacccctccttctgtcgctcagttcctccctccctcccttgcaccgtctctcctctatctatctatctatctatctatctatctatctatctatctatctacctacctatctatctatctatatttttgagacagtagtccctctgtagccctggctggcctggaattcactgtgtagaccaagctggccttaaaatcacagacagcacttgcctgcctctgtctcctgaatctcctgctgcgatatgcaccaccacacctggccccatttatttatccatttgtttgttgtcagtgtagtaccacaggctggccttgaaactctatgcagccgaggaggatcttcaacttctaatcttcccgccccctcccaggattaaaggtgtgcctcactgtgtctgcatttcgtggtgttggagtgatagaaccccagggcctcacgatagtaggcaaacactctaccccctaagctacatcccagcctcctcccacccctgagccaatgtctgttgggtgcttcagagtcaagcaaatcaccatacaccaacccactgatgctcttagggactctctaaacctctcgaacatccccatatttcagatgaacaaactgaggctgggagaagtctagtgacttgccaggatcgtgtgctgttgggttctatgtgctgagtctgatgctgcagcctgggacattcccctctccttaaatcccagtctccctcctctctaggtcactgcacttggcaaggtctgggctagcaaaagctcaacatgagcctcctgcctaagcaagaaaccagaggaacaagcccagtgctcctggcccccatctgcccagaggtacaactgcctggccccacggatgcagacttcatctccagagagggtcacataaagtcctagcctctggccaggctcccctcagacatcatttgcgtggagatgtttatagtctgggtgattttccatcaccccaagcatctgagagatggcggtctcccttctatctgacgctgtccttcggagcatcttaaaacaagcgttatgtcaaaggccacactcagcgaacagttttaacaacatcctcagctaggctttgtggcatacaactgtaatcccagccctgtggcaactgtggcagggggaatcataagttggaggctagcctggaccacagaaaaaccatcttctgccagggatgtagttcagttggtagagcacttgcccagcatgcacgatgccccgggttccatctccaggccacgtaaacctggtgtgatctttcagacctgtaatttcaatactgggcaggctaaggcaggaggatcaaaagttcagagttatccttgactacatagttagcctgggctacgtgagaccctgtctcaaacaaaacactttatcatctggccaggtatttggaatcattgcataagaatgagtctaggacttagaaaaacatgctaattcaggacaggtttgcacgtgggtccggaagagcctatccaactcctcctttctctggttaagccatccactccaggaagctggtgactggctacactgtttttcacgaagggagtcttaaggttaagcgctgattaatggaagggggttggaccggatgtaaacagagcagtaggtaggtttggggatgagccgaatgcaccctccttgcctctgcagctgaaaatacatccttgaagcccacacaacactgtagatgcttcagagttccatttttggcaaggatattctggtcttggtgtgctccatctaatctgtagcttctgactcacggcactgggtggcagatcatggccttgacctgggtgtcttcaggacatagctgatgagctggggaaggcagcatccccagggggtctgagcctatcgaccttggggtggattggtctgagggcccgttaaggcacctgggcactgtctgagctagctgaggctgccatagactgagtacagtaggaggcctctttgatgacacctggctggggttctctataatgttgaataagttagaagagactcttataggtagggaatggtaccgggaagtccgttgtggatggacattcttgtccctcccaccaggctatctgcgctggcaacccacgtgtctcccagccctcttcagtccgatctctccccgatgttgtgttcctgcaggaaagcccaaatgcagccagtggttgggcagggcctcacctttgttgcctcgctctcctggctccaccgggacccacgtgagctgggctgagaacctgagcataagaaaagctatatgaggagtggacagtggatgtcagatgaccaccagccctcagccaaagtccccaagcagatgaatggaggataagaacagcattagtggcgtggacgtggaactgggtggacacagtgggaaggagataggaggcagaagtggggatgctaggatcctgcagaggaaaacagggcgcagaaagacttggagacctactggggcttcttgctcgagttggacttgggcccaaagtctactaaatctgtgctcatcactgcattgtagcctggcaccctgcagagagtggaaggacacactgacagcttgcacagagagtggagctggagccagggggcagagggaagaaccccacaaggctgggacatgaaacaaggctgaccctttgtacagaggtctatagcaccgtggctgacactgaccatccttagatgccttgaaggtttcttctaggtccaagcacaagaaaacaagccctaggaaaggccagtctgataaggagggaactaggggtggggggagctgagtggctgaggccaggccagctgtatgtctgacttcagagagcacaggggttccttctttctgttactatctatcccaggcagcctgagcatcagctccagctgccactcacccaggccccgccttccatccctacagctgcacccgtgctgatgctcagatgtgcagaggacaagcaggggccttctggcctctgaggggagcgagattttggtgtggaaagatcctgaggctttcctcggagcagagagccttgctgtgctctgccagcggaggactggagccccacccccaccctgtcatggtgaccctcagaggcacacagcccagctgtcagcttgtttcctgatgctagctgattctccccacatacatctcagagaggcaaagataaacaaatgggtgggctggggggtgtttccagcagtggcttgcaggggatgagatcttcttgtctgaccactggcactactgacctctcctcctgttgcaaatcaggagctttgcaggttcattccttctcctaccaatgttcctgtcacaggttaaactcccatgtgactgtgagctgagatgggtccttgccacaagattgagggaggactagggtttcccatagttcgttccctcccttagccctggctatacccttacccctttgactctatagtggtgacagaaagaagagggaccttcactggcttgtgtcttgacacctctgtgcatctgctttgcctccctggacctcagcatttttgtggggacagtgatgattatcagttatagccacttggatgaaaccatggctgttggtaggcctgtttggaacagtgatgagccaacagctagggtagcctcagagagatgggataaggagtcccattaaacaaatgcatacagaaccagctgtcgtactgccaactatctccataacttatgtccatatataaacttacctgcatttttatgataactctgatccaaatgcttgtcagcagatgaatggatacattaaatgtggtatatccatacaatggaatattattctaccatgtaaagaataaagtatagacacatgccacagtaggtttgagctggacttcatgacaaaagtcagacaggaaaggtcacatgttatatgattatatttgaatttgcatatttcaaaagtgtgcaaatcaggaaataggatgcatttaatcccagcactcacaaggcagagaggtaggcgaatctctgtgagttcgagaccagcctggtctacagagtttcaggacagccagagctatacatagaataacaaacaaacaaacaaacaaacaaacaaaataagttagcagtaacctagggagagggaggaaatgaaaagtgactggttatacagcttgctgtaagcaagcacagagagagaaagaactatatcctacgatgctttgcaggcagtgagtcacccactgccacagctagaagtcagactatgggcatggccaaagggacaaggcctcctcaacccagagaaactattagtgcccctcctcttgggatcttcgcctagttggcctaggatggggagggtgaaccagcaggaagttaggcttggagctgtagaccagaagtgggcgtgtcctgatgacacctctgacccagtttgagggctacagaaattgatttgcagaaagatggtttccacttaattagtgtggcctgcttctggctgggaatgcaccgttaaatgggctgggtcaccctgcaatcatgccagtggccccagctcctgtctccagggacatgtctgcctcttgggccctgtcctctttgtggggccactatttggaatggcttgagtttccatgtggagccggaagccagctttatcctcttctctacccaggaaacctagggtggagcaaggcaagcatgagatgaccctgggctgtgaaggacccacttggaggctccacctccatgtgcatggcttcagcacagagcctggcactgaccaagcccacacccttatgtgtcaccttcatttctaatgcagcatctcagctgtggctataagttagtggcagtccccagaccacaagtgacagagcagggttcctggctcctggcacaatcttcacttgcctgtcttgtgagggtatcaagtcttgcctggtttttcagaaccctgtaaagtttgattcttgctcctggttttagggggaagcttattatagtctgtggctccctgtgggtcacaggggcatccttttaatagagtgtgcatgtgtgggccctgcgacttgcctgcttgccgtatgactctcagcaagggatttgatctctctgagccttttcacgttggttgtagaactggggtcccgggagcacgttcctgaacattcttgggaagagtgaatggggtgccacagaaagtgagcaaccaaggtgtcttgtccacagcaggtggtttgctgttgtaggtccaccagccttttctcaccatggaaggggagggtagtatgaggggcaacctgggcccaacgtacatctactttttggttttgtttttttgagacagggtttcactctttataacttgctagattggaactctgtgtagaccaggcttgcctggaactcgtaaagatccacttgcctctgcctcctgattgctgggataaaaatgtgtgcacctctactcttggctctgcacttttttttctttttttttcttttttttagaaacgtctattcagttcaaagtgatgtttttaaagggcactacactatacttagcttctttgacttctgcagccattatgtggatatgcagcggatgacgctgatgtagggtgtggccccaggggatggcctggttaaagatctacccctgtactgaagaccagcttcctgtggggtccagccaagaatcaccaaggtacatggttcagaccctgggctctggagcgagaccatttgggctccaaccccagctccattcagtaacctcagaaagaccactctgtgcctcagtttctccattgcttgagtgaggccctgttctcgagtaatttttggcacagagacggttccctctgggttatgtcagcatctgtcgtcagttggcatttccctccaaaattgggcctgtgtctgccacactgtgtgtcagtcttacgcaggctgtggtcgctgtgggactcgggttgtctttgtctttggtggctgtgcagggctgaggttaggtacacaggtgtctgcctgggcccgtggttttcatctgtggtggtggctttcccctttaaccttctggggaacatcacaccatttgctcttactcgtgaagctttgtttaccccacatcctcaccagcacttgtgattcatattctctctctgtctctgtctgtctgtctgtctgtctgtctgtctgtctctgcctttggctctccctctccttctctctgtctctccctctccctctcttcctctctctgtctttctccagttgtatgtagcccaggctggcctcaaaccttctacatagctaatgaccttgaatccccaatcctcctgcctctacctccccagtgctgggatatgcttgagctataatgcttgactcgttgccctgaagccattaatagaactatcctgtgggtgtgtactcaagtcactttcgtttcttctagatgcttgtgcaagggatactgtacagtatggcccccagggctccttttgagggaggtactggattaagggtttcaaaaaacccatctcgtggcctgtggaagagatggtccttatgcaagggggcagcgctcttgtgcccaccctcactccctatccccctactcccgtatacccctgcttgtagctgagcgtattcgtcttccttcacagacacctgtgagccttgtgtcaggatgcctgaggttccttagtgagcaacagccgacagccgggacccctgcccagtggggctgatgacccttaggagagctgatagcctgagactaactggaaggtgactgggcatgggggtgggctcagtggccaagcacctgcccagcattcaggaggctctgagtttgattcccaacctgacaataataataataataataataataataataataataatgatgatgatgatgatgactaaatggcaaaggtctcttagggcagatctctctgaggaagtgacttaagtgacatgaatccctgcagggtctagacatagaggtaaatggcacaagtagggatctggggcagagatccctggtgattgcgtgccagcctgagaggtatgactccagtgggcagggagctgtcaggggaggccaggctgtatggatgcccgaccaacttccttgttgcctttccagctgtggtggagagccaggccagcacagggcagcttctcccagggtctagctccatctcatctcatcccagggctgggactggggagtgggccagggtcagttgcctcagagagcacaggacacagtgtgactccgacgtccctctagcctattctaaggcatgcattgatgcctgtatccattatctttggagcctcttcttcccaggtttggcctgatgtcctctccttactgcagagcttagcctcaaggcatggaagtccaggttaatgtcctggccaccctcctggctcgaagagaacaaggtgttccaccgcaaagccctggcctgaggacatgagtgcacctgacccggggcacaggaagaaagctgacccagcgcctgggttacataaggtgtctttggaacttggctccttttgagctgatatggggaaaggatgcccaaacaggcaagcaggtggaaccggagaggagggtggtgccttcgggtcacttccaggtcagcctgcattctgggcgatggttgattcattcatcaaacactgctggcatctactctgtgtccaacctgctgctgcgttcatgaggcctcaccctggctgcaggggtgcccaaagtcacgtggggtgcccaaagttacgtagggtgcccaaagtcacgtgaccatgtagctccgctcttgccattagaaaagtagcatcctcttatggagctctaaacctcgccttagccgagctgttgggggggaggggagaggagctggtgcaagaacccgaatacattaacgcaaggacaaatccagagaacaattgtaaatgacacatggtacactgatttatttttgtagccaatcttcaaagtccagtgtgggcgtactataccccagcccatctctgtgggaatcatgtttaactagcccactgtggcccccacaggatctggggatgccgtggaaggtgacaggtgctggctgagccccacactgcctgctgagggtgctggggacaggatcaagggaggggtggtggggtgagccattcattcatttattcattcgattatctaagaatattcagtgggtgtggattgaatggctgcactgctgtgggagcaagaaaggatcgttctgggtggagagaaggaggagccccagaggggattggtcagtgcagaggcagagccattgttctcagacatgatggcatgagatcactcagggccctagcttgtgtgtagaaccaccctgagtgctcctggatcatggattggggtgggatgtagtttttttatatctaacaaattcccaggtcattctcctccccctcctcctcctcttcctcctcctcgtcttcctcctcttgctgctgctgctggtggtctaaagaccctgttttaagaacatcagccattaaaactccttctgcccttgcaaaggacccaggttcaattccttgtgcctacattggctaacactgtaactccagttttagggaaagacagttggaaacgttttttctttagtatttgtgtgtgtgtgtatgtgtgtgtgtgtgtgtgtgtgtgtgtgtgtgtatactatggcatgtgtatggagatcaggactacttttagaagtcagttctcttttccaccaggtggattccgggaacccagagtgtcaggtttggcagaaagtacctttacccactgagacatctcaccgccccccccccccccaccacactatgaaaggttttcagacaggaaagaaatgtgccaggcttgtgatttcagaaattctgaggagctgctgacagctgctttcctgccaggccaaagtgacccttagctcaggagggctccatcttcacatggccggaaagcctgagctatcctgctggaaccaggaagacacaggtacaaagtgatatgtgtggacagctcagcattgtgaccggaaataaaccctgaatcagctggaggcttcacagaagagtttccccagctaagggagattgggacagctgtgggcaaggagaaaagttaggggctggggtgtctgagccctgttggggtgctagagtttcctgctggatagtaggttggaatcagtgaattaaattcccggtgcctcagtttctctgcctagaaataggaccacatgctaatcctacttctctcctgcatgaggttgttaaaaggggactaaatgggaccatctctaattgtgctggacattggcctgggcatatagcaagcacttaataaatgtgggctcttgttagtccacctgtgtctgtttctctatctgcctgcgctgggaggacatgaaggctgaggactctgccatctttgtctgtccctgggaacatccaaatgatcttccagcttccatagctcagagcattctcagaccctacccaagacctgcacttgactgtgcctgaatcgggtccctgctgtctctgagccagggtgggctgaggacagtgggatccagcagctctagagacctgcaggctgctctccccccccaggctgcagcatcccccacccagggctgctgtgtctctttagctgttcctgtctgataagagtggatttttccatttcctgcagcagagatgccccggtttcccctctgcccaccagctgccctgatttctactcctgcataggctgagatggctgtcttgcagccacaggaggttgtggcaggagggaagatgtgtgcgtgggccagggacctacagagccggcagcagattccattaggagggcaacttcttggttctgatgtgacaagaaagcccggtctttatcagaaatggcttaacctaaccccagcaaacaatgcccccccccaaccccccagccagcaaacaggaagcagaggctggataaaaatactgtcctctgcagctgcggctgagccatctagctttcagaaaaccctgctcttgacaggaaacacagctgctgctgagaggagagagaagagtcgggtgaggggacctggggtagagacatgggtgacaaaggcaagtgaaagcagagaccctggaacccatcagtccatagcaggtgaagaaaaaaggctgggccacctctgcctgcctggcctccattctaggtttgtctggggacagacaaccaattcctctccccctacttggaactgggagaccatcattgtatgggagagattagactgtggctttgaatttattttgttagttgcaaagcatgactcctggaatcaaaaaacaaagcgcttctaaaggaccagataaaaaatattttataggctgtgtatgccatgcagtctctcacacctgagccctgctgctgaagcagagaagccatagaaggcagtgagaagccggagcactaactccagccagctcaggccagtgactctcacggactgttcctgtgtcacacagtactctgtctttgatggttttcaaccacttcaaaagtagcaacctggaactaggcagatagctcagtcagtaaagtatttgccttgcagacagagagacccgacttttatctcctgagcccctccccctttttaaaaagctgggcgtgggagtatgcacttataatcttggcgttggcaaagacagacggatccccaggactctgtggccagagagcctagcttaacaggagagtcccaggccagtaagagaccccctctcaataaaacaaaagggacaactcctgaggagggacagttgaggtgctctctggctaccacacacacacacacacacacacacacacacacacagagagagagagagagagagagagagacagagacagagacagagagacagagacagagagacacatagagagacagagagacagagacagagagacagaggtgggggtggagatcattcttcatcttttgctctgtttagtttcagacagggtttccctgggtaagttcactggtctcaaagtttactatgtagcccaggctggcctccaactcctaatcctcttccccagtctcttgagtgttcttgagtgggggggtcctcattcttaactttcaattggtacaagcataagtttgcaggcctggtttgagcttacaaagagcaattggctgactcctgcactataaaacatactagttagtcttaatttctttctttctttctttctttctttctttctttctttctttctttctttcttccttccttccttcctttttttttttttttcttttttcgagacagggtttctctgtatagccctggctgtcctggaactcactttgtagaccaggctggcctcgaactcagaaatctgcctgcctctgcctcctgagtgctgggattaaaggtgtgtgccaccacgcccggctcgctctttctttctttctttctttctttctttctttctttctttctttctttctttctttcttccttccttccttccttccttccttccttcctttctttctctccccctctttctctttcttctctctcttctctctctttctctcttctctctctctctctctctctctctctctctctctctcttttcaattactgctgttgagtttcctgcccaaaacagatgtctcagctctgccttgtcctttgaggtctcagcatgaaatgtcatttctgctctagcaatgtgtaacagcagcaatccttagttcttgtctaccctgtggagggttcttgtcatttagtgaaaatgaaaatttctgactctaagggctgaacccacagatctcaaaatgtaaaacaaaacagaacaaaacaaaacaaaataaaacaaaacaaaaacaaaaacaaaaaacccctatcccactggcaaccatagcatacatgtcacaggtgaatttgtgtcttcattttttccagcaatgagtgtgtgtatgtgtgaaccataagctgcgttcttttccagccgaaacctcaccatgtgtgttggtttaaatctcccattccattacatgtcaacatattcctaggccatgaaaagcctctcagagaccagctcagaatctcctgccagacgatgctccaaacactgtggcatgaatgcccagttgtttagacttgtggatcacttccactgtgccttgatcataaacaatgtgggcagccagccctgctgtgggcagagttgtctgttcatctctggctgttttctttctttatacaccttttggtatttatatatttatttattatgtgtgtgtggtgtgtaaacaggctgtggacctgtggtggtcagagcacagcattcttgaatcagcttccaccacgtgggtcctaggatcaaataggtcttcaggcttggtggcaagccccctcagccactgagtcatctcactggccccatatctggctattctctctctctctcttttttttttttttttgagacagggtttctctgtgtagccctggctgtcctggaactcactctgtcgaccaggctggcctcgaactcagaaatccgcctgcctctgcttcccaagtactgggactaaagatgtgcaccaccacacccagctctgactattactctaatcttattactttattttatttatttacttattttattaattgatttatttattcattcatttgaggtatgtgagtatgctttcgctatcttcagacacactagaagagggcatcggatcccattacagatggctgtgagccatcatgtggttgctgggaattgaactcaggacatctggaagagcagtcagtgctcttaaccactgagccatctctccagccctactttattattttttttttagcagatcttatttttattttcaattccgtgtatgtgtgtgtgtttgggtataggtgtgctcacacgtgcagatgcttgcagagtccagaagagggcatcagatgcgctacagctggagttacaggtggctgtgagctccttgatgtggatgctaagaacgaaacctgagtcctctgctcttaatgaccaggccatctctccaatcccattctcgaatcttttcttcagactgtgtgtctgctgagggctgctaagatagccatgcttttgatgtctagcagtttttgccttgctgggtttcgctctcctgactgaccgtgaatttcagagtcccttaactgataggactgacttcccacccctgccccaggcagccattgctctgctttctggtttgaacataactttgcctccatgaaacacaaggagagactcttttgtcctgtagtgtctgttttgaccaacctcaagttcattgccttcttattttcccagaattccattctgcatcatagtaatgccgctgccccctctttctctgtgttttcatctgctggttttagactagaacattcctttatttttagcctctctgttgttgtgtttacaccagtgctctttgttaccagcatacactgaacatttttccttctttgcaaagcaaatctttactgtctttagagcagaggggaggaaagcatttgtgttagtgtagacatctggcttggagtcaccttgtcccacactttcatgcacttgagtttcattgttccttctttctttctgtgatgtcagatgtacacacacacttgcatgtagaggtcagaggacaacctcaggccttgttcttcaggagctggccaccgtggttttttgtttgtttgctttagatttattatgtgtacggatgtcttgcctgcatttatatatgtgccttgtgcaagcctggtgcctacaggaactagaagaaggtgtcagatccctgaccatgtgggtcctggcaaattgaacctcagtcctcagaaagaacaagtgctcttaactactgaacctcttctccaggcccacttaaccttgttcttgaaacaaggcccatattggcctggggcttagcaatttgactgggctgactggctagcatgcaccagagagctacttatctctgcttcttaaattttggggtaacaagtatatgccactgtgcctggctttttaagaattgaaattctctctctctctctctctctctctctctctctctctctctctgtgtgtgtgtgtgtgtgtgtgtgtgtacaccatgtgtacaggtttcttcagaatccaaaagagggcttcagaccccctggagacaagagttacaggcagttgtgagcagctctatatgggtgctgggaactaaacttgagctctctggaagtggaccatctcacagccacagtgcctggctttaacacttagattttggggactggcaccagttacacatggaatcagtcaatagttcctagcaaaacaagctgggacatgccagttctctgttgaatgggctgattgcagccccaagttatagggtcgttctatggattggctggggaaatgacatcttagcgtggtgttgcttgcttggaaagaggttaacctgtgttagctgttgttatggtggccgtgaggcgaggccatagcagggtctgtatgtatgtatctcatacctggaaggttgggagtatttttatgtagtccttgcctggagatatgaaataattggactattttaaaaactcagaagagatggaaagagacatgtgctcagagagatgggactgagggagcaaagggaggcaaggaaagaggattgaaagtggaggcctctggggagagatgggacagagaggaagtgcagaaccttggagagctcccaagcagcttgaggttctgcagacagggcgtggaatagaaagagtttctgctgcgcagcttctgggggggggggtggcatctggggatgcagccagtgaagtatttgggagctggtgatgttgggggtcattccaaaggggatgggaaaagccttgggcttgtgttggaggacacgtggtccccttgtcagacttaaagactaaatgctgtaaggagcatgacaacctaagggagagttaatggtgggggaggggaggggnnnnnnnnnnnnnnnnnnnnnnnnnnnnnnnnnnnnnnnnnnnnnnnnnnnnnnnnnnnnnnnnnnnnnnnnnnnnnnnngagggggaggggggtgcacaggccacgcctgaagctctgttctccatgcctgttgtgtttatgggtgtggttctctcagcaaggagatttggtgcaggctctctcatatgttagcaggtcccctgctgccctgccctgtgcttctgagagagcttacaagtccaagaaggatgaactgcaaaccttgcactccgctcactgtaaatcttcatgtgcgctttttagaagagaaagaaattaagtttgtgtgtttgctcaactcaaccaccgtttctgagagacttctgagaaccccacaagttggttcttcagacaagaaaactaggcaccatagtgcgcacgtgttatccaagcacttgagggggggtgttaatagttcaaagccagcttgggctacaaaatgagttcaaatctagtctgagatacaatgtaagagtctgtttcgggttggagagatggctcagcgggttaagagcactaaactgctcttccgaaggtccttagttcaaatcccagcaaccacctggtagctcacaacaacctgaaatgagatctgacgcccacttctggtgtgtctgaagacagctacagtgtacttagatataataataaataaatctaagagagagagagagagagagagagactgtttcaatcaatcaagcactcagtagcagagacagacaagattacctcttaaaggagatttggtctctttccctgcgtaactctgacacgaagtgaaagttacacattgtcagaggcatttggtagccaatattaatgtctaccaacatgttttgtccaagatagccacatatcctggatacacaagttctggagagcgaatggtggctatgtgcctggggtggccctgactgtcttctgattacatcagagatgctaagagagagacaggcttcttggcacagggtcagacgatgacccttctctctgagatggaagagtctggggccttgcctggggatacttctgatccacagggaaggcagtcagctctgaaatgtgggcagaggctgcgtgggccttttcccttgcagattcaattactgattgggagcctgaacttcattacaggagcaaagagtggcttgcccaccctgcctgcctccagagctcccctacaccatccacctccagagctaactgcctaggaaagacatgggcccatacacacacacacacacacacacctctactctagtgttgtgttcttaggactggacagaaacagcatcctggaaaggtaccgggctatcccgagagtcaggggctgggatgtggaagtaggggagtcctcacagacacagtgacatttaagatgggacctggagactaagccatgactgacaggttaagggaaattaagaaatgcaagttgaaggaacaacacacatgacgtgaaggcccggaggtgcagaggtggtagggccttggatggcccagaaaggagcccacgatgattggagggatgatgccaggctatgtaggtagaggccatatcatggaaactcatcgaagaccaagtgtattgtgtattgctgtgtattgtgtactgggcctgtttcggccttctgggtacagtaatgaggggagtagatgatactgagatttcacagaactctcaagcatgattgaagccctctctttctcttcaaggtgatgggtgactcacctaccattgaatgcagagtttctgaggtgggcttctgcagtcgttagtacaaggccttctgcagctcgcattactgcctgactctggtacttgcacatcatctccaagggaaactctggctttctagcagtcacttcattgtgcctgcttgatcctcaaccctgccacaccccagtgcgcctgcgtgttctggacatttccccgcatgcacacaggatcatgtaacaggaggtctttttatctagctcttttggccaaccacaatgctttcaaattctttcagaataaaattccattgcctggaatcccatgtatccattcatcagttgatggacacataggctgttcgtactttggaattattaagaacaacgctactataaacatgagtgtatacgtttgttttgtttacattttttgagatagggtttcaatgtatacttctggctggcctggaaattatagtcttcctgaatgctgggattactggtatatactacctcaccctacacatgtatttgagtttctgtgtggacacaccggctcagccccctgtgccaaattgctgggtcatatgatcatgtggtcacttgatatttattccaaagcagccgcaccctctcataccctatgagcagtgggtgggagttgtagttaccccatattatcattgtacctccatgcctcctgctctagaacagctggtgtccaggggagaagaggggctggttcctaggcctggggatgtgactttgagaggagccagcatctttctgggctaggcttcatcatggctgactcattgcccagaaccccaggaagctgttggaagagtctctaatgaatctgtcactgagaaaccaccattccacttgactgagcctctgcccccagccccaggaagccacgattccctggaagcaactatttctggcaatttctgctccagggacaagcagtggtgggtggaaagttgaagttgctcagtggagcgattttggaagcacagtcaagtgaggacctggctttctgaatgtgctgggctgagggctagacccactgcgaactctcttagcacactggggagggggagccagatcactgtgggtaggattttccaggcgggaggtgtagttcccttgggtggcaagtgaccgctggagggagaaagcaaggtgcttggaattcagggtagcatggggtctgcccaggatggagaggcagcaggaagatgcaccgagggttggagctctttgcaaagctgccactccttttgccacatgacttcaggctaaatgtcagcctctgtacctggggacctcatttgcacatggtaatagcaaggcttcagcagtggctctgtcatcgtctgtcttcttccccgtgtgatgttctagaacaccgagctccgtcggcagcagtcctggccttagcctgcaccttttgccatctcttccatggtttttatttggcagtgttttggccgagtggttcagtctgcaggctttggagccggctgagcctgggttcaaatccaagccttgggatgacgggagatggctcagtgagtggagttgactgagccatctctaagaacagggtttgatccccaggacacctgtaaaggtagaaggagagaaccaagtcacagagttgtcctttgacctccataggcactctgtggagcgtctatgccccctctagtgcgctctctctctctctctctctctctctctctctttcatacacagacacacacgtgtacagagacacacagacatgcatagatataggcatgagcttacacacacacacacacatacacaaacacacacatatacagatacccacaataataatgttgatgatgtcacgtgatggtgatgaagatgaagaaagtgatcttttcaataatttttttcaatatcaagcctctctcacctctctgctatacttggcaagttgtctcgcacccccaaatcccagtcccagttttccatctgtacaggtacagtagaagccatgggtctcaaatcctcccaactgggttatgaggactggtggatgtgatgcctggaaaacacccagtgatcacaaagttcttcacagcagttactgcattatggaaggaatgagtgagggcccaggatcagagagaggaaagagtagtgtgttagggagcagacaagatggctacttggtgccaaccccgagtggaggccaagtgaggtggggctgatgattcctaagaccagcctgcaggtctcctcacatggctaacggatgccaggggaggacgcttgctccctgctctctcttaacccctaaaggatgctttttggtcatagagtcaccttccgtgaggagcctcatgtcggtaagacagcatgagagatgatgcccaaggccagggagcaagtagctgaggcccctgcagtgtgggagggcatggtgccacagagagccagcattcggtgacccctgccgtgtgggagggcatggtgccacagagagccaacattcggttgcagtctcaaggctgaagaagaaattgctggcccagggtggaaaaaaaagaaggtttcagacgcaggtgatagctttggctggtttgaagaagccagaagcgagtgcagcaggagaaggccacaacagggagggagcaggtgggacttgggggacgaagcgaggactggttgaggcagcggaagagatgagacagggaagaggaagaggtgcttggtacccatgagcatgcccgtcaaagcatctgcttaggtagcaagcagcatgtgggccttggggagctgcatcttgctcaaggtccacctgctgtgggccgaccctgcagcctccttgcccagtcctgaggggcaggggcaggacccactcctgagcttgcatgtcactcgccagcgcttggccaagcagtgacttctggggagcaagatgggtaaaatgtcaaaggaaaacacaatcttgtcagtggtgacgttagcctgtgaagacagctgttaccagctttctccagagaaggcacccctgcagcccagcattgcagctggaaaggctaagagcagatggccttgctggcccagattccggccagattgcctgggaggtgtgggtgtagtgtatgtgtgtgtgtggtggtggtggtggtagaaggagcaagatatgtgggggaggggagcagagccacctcatgccatcttccatggtgctctgcccattggggagcaggggtactctccagggcctctgtggtcttaaaccagtacttgtcagagtcccttggagagaggccacttccatctgtgaggacctgcttgcaagcttgtgggtgactttcagtgcccatggaaatggcccagcatccagtgcccagctcaggtaggacccagatgcagctcaccagttagtttcagtgtttcttctcctggtaactggaaatagtggcacttagaccttctcttcctaaatcctcacggcaccctaaaaccaaagtcctcatttgatccccattttatagctaagggcctgaaggccaaaggccacagctaaccacatacttgagagcagatggttcactctgataaactgagcttaagtctggaggcctgggtctggtgggcagagagcagcctcaggtgcagcaatcaggagagaggctgggactgccggctagaggagacagcatgtcccttttctcttggtgcttcctgagcccctgtcaagccttagatcccaagtttcctccctaggatgtttgtccagtaagacatgagcctggaacagagcccgggacagtaaacacaggatctcggtttaaccgagcaaagccgcatgcagcttctaggcactccattcacacagactatgatgaaaataacctggcctctgagttggttgagagggttgccctctgtggggccacaagctgcagggccttgaaaaccaagcatctgcagaccttgccacacaggatgtgatgcaggcagcgggggactgcacagtctatggggacatttagctctggcgctctgggatgaacacagtctaagtgacccatcaccaggctgtggtttttctgtcctgcttgtggatgaacacagtctaagtgacccatcaccaggctgtggtttttctgtcctgcttgtggggcctggagctcttctgtctgtgtggagacctgtggttatccaatgttcagccagccttaggagtgacccctggctccccatgtcagccatcagcttggttgatgaagatgtgtagtagagccttggcttctagtcccagcacctcaaaaaccaaaaagacattggacagacaagcgcagagtccctcttcttgctgagcccagagaaagggaagctggctgcgtgctgggcggtgggacttggctccagggagctgggctcagagccaggctctggcctcctagggagagctgcctaggcagccttggctcatgggtattcagggtttcttggagctggagatgatctgtcccacttcttgggatgaaaataactgcccgatttcagggtaattacatggcttgggctcccacacagtgcagagagccccccgataattactgtgtggatgctgctgttggcagctgatgcttattttctgcctcagagtctcctggacaggaagcctgggccatcaactgctctagacaatgcaaatctgctcatgtgagcagaaccttctagaaacattttctggacagggttgtgatggcctctctcactccacaaccatctgtcaagctcgggacaccattgccagcccagatacaaacggtgtctggggttctcagtggctatactagtaatttctgatccctgtgacaagaacatctgaccaaagcaacttagggaggaaggggttggcttgtagttccagggtacagtctgccatggaagggaaatagtgatggtggctggttgtgttgtatccccagtcaggaagccgagagtgaatggatgctggttctcagctcttgttttctgttttattcagtccaggatccagcctatgagatcgtgccatccacactcagagtggatcttcccaactcagttaaacatctctggaaatgtcctcctacacatggccagaggtgtgtgtccaccgtgatttcaaatccagccaacattggagattaattatctcagtggctttaccgtcatctcctcaagtagccctgggctaggcccatctactaagttaccgagctctgtaggaggcacctgtgcgtgggcagagcttcctgttacacttcctgtcatagcggtgtatgaagtggaaacttacagcttccttggggtcagttgtgttggatggtgttttgctggggcaaacatgtgaaggagtgttttcctggagtggacacaggtgaaagactcaggcaagacgcgtgaaggaacgtttcactgaaggagatacaggagagaggatgttctgctaaagcaaacctgtgaaaggactcatgatgaaggattctttgctaacaacactcatgtattggtcagacttacattgtgcagttaagctccatttgtcgggactttgagaactcgggctgattggatgtgtgtgctgaggcaaggcacgtggaggacacgcgatgtttggagggtataaagggggctcgatggagtgatggagacagagcttggcttgctggtgcatctagctgtgcaatgcttgtgggtctcaagtcttcattgatctttgcttccctgagagaggcacagctgagaacttctcctggtgttcctgctgtccctcctgatgacttgaactgaagctgaggcctggctgtttctgctaggttgtgtcaccattgttgctaacccaactctactgaactggtctgtgaagtgtttgcaaatggatcaagctgccgctgcctgctaatctgtgaactgaactgcccatttcctgacaacatagacaggagttgctccaaagaacctttttaaacggttccacttccctcacattctttcccactacctctggtggatggtgggctacaagggaggttaaagtgtttaagaaccatcattaagaataagatatggggggctggagagatggctcagcggttaagagcactgactactcttccaaaggtcctgagttcaaatcccagcaaccacatggtggcttacaaccacccgtaatgagatctggcgccctcttctggtgtatctgaaaacagctacagtgtacttacatatagtaaataaataaataccaaaacaaaatacaaacaaacaaacaaacaaagaataagatatgaaaatactaaagttacagatgtctgtctacttgggttcatggtcaaggtggtctgcagcagtctaagatggatcgcctgtatgtactttctcaatatttatttatttgtatttcatgtgtatagtattttgcctacatgtacatctgtgcaccacatgtgtgtccattgcccaagaaggttagaagagggcattggatcccctggaactggaattacagatagttgtgagctgccccatgggtgctgggaatcaaacaggggtcctctgcaagatcggcacatgctttttaccactgaaccatctctccagccgtgtgcttgtgtctttgaactgagctaggggactgccaagggtgccaaggtcctggaggaaggagttcccgggattcattgtgtgtcaggccttaggaatacagtcataaataccaggctacattcctgccttcttgggctggagtttagcatgcagaaaaatacaagaactgtaattacccggttatgcgggtcagggtgtggtatggttgcccatgagatgcgtgtgtgtgtgtgtgtgtgtgtgtgtgtgtgtgtgtgtgtgtgtaacaggaagaggccagggagactgaatgagccctaaaggatgaggaatggggcacatgtgtgtgcacatgtatgtgtgtagcgtgcctgctgctaacttgtgaacgtcttagagacctgttagggagattgcttagatggtggtgcatcgatggatggatggatggatggatggatggatggatggatgcctggctcgctggctatatggatggatggatacataattgagtcttccatgcaatgagaatgtgactcttgtagttgacacaaatgactgttgcagaaaatgttaggagcttaagaaatgaagtactactcagctattaaaaagaatgaatttatgaaattcctaggcaaatggatggacctggagggcatcatcctgactgagataactcaatcacaaaagaactcacatgatatgtactcactgatcagtggatattagcccagaaatttagaatacccaagatataagatacaatttgcgaaacacatgaagctcgggaagaacaaagaccaaggtgtggatactttgccccttcttggaattgggagcaaggcacccatggaaggagctacagagactgagtttggagctgagacgaaaggatggaccatctagaggctgccatacccggagatccatcccataatcagcctccaaacgctgacaccattgcatacactagcaagatttcgctgaaaggacccagatatagctgtctcttgtgagactatgctggggcctagcaaacacagaagtggatgctcacagtcagctattggatggatcacagggcccccaatggaggagctggaggaagtacccagggagctggggggatctgcaaccctataggtggaacaacaatatgaactaaccagtacatccccctcccccagagctcgtgtctctagctgcatatgtatcagaagatggcctggtcggccattagtggaaagagaggcccattggtcgtgcagactttatatgcctcagtacaggggaacaccagggccaagaggtgggagtggggtggggggagtgggtatgggagggcgtgggggacttttgggatagcattggaaatgtaaatgaaatcaatacccaataaaaaaatttcaaaaaaaaaaaagaaatgaaagtggagaggcagatagacagacagacagacaggcaggcaggcaggattagctcacaagccccgcactgcacagcttcaagactccaaacagaaacttgaatggtgccccgtggaatcaggcaagccagtgacctgcaagcagggattgtatcgtccaagacctcatatggaaggcaagggtgggggatgctgttctccgtgtcgtggggggaagcagggaagggctcaaaccttctgtgatgaagctgatttccatttgcagtgccttcgtgctgcactgtcccctagaaatccccatgaagctaaacccgcttaacttccagtctgcctactttgtaccacatgcggcagttgaactaagcggtggacaatgggttttacatgcgtattgattccaatttaagtagccatggcagccggatgtggctccgtaggggacaagcagctgaaggatctggctgggactgggcaaagtcctggcacatatatgcctcggtagcagtgtgtcttgggcaggtctacccgagacattttcttgcagagctgaggcctcaacttctctttcccatagatttctgtccatgctgaggccagggtgctgtgggctgtggtctagaggatggagctgagcaactgctccaacccctgcttctgagacttgaaggctgtcctagtgtccatccctgtcttttccttggcatccttgaggctgttgattgacagttgtcttgcagcataccacagcttgcttctaacctgctccctccaccaggggcactttactgaggagacttcctcagccctgaatggctgtgtaagctacaggcaggagacagtggctacattgggtgtttggcgtgtgacctgggctcatgtgagcagagtgtgagaaggctcaacagggcatggccagctcgctcctcccactcgcagggtcccatgcccctcttcatcagcaccgtgacagtggcccttcccacaaagcagcttgtatatctggcttgtttgcctgtcctcactcaggcaatcacccctcatctggtcctctggcccagaattacacttgcccactcaatgttcagcctaggaaaactggagccagggcagccctcctgtcgccccttggacagtagatggtcctgagagagaactgtgggctccagtggaccctgctgtcagccctgtgaatagctccctccatggggagagacatagctgaaggctggacagagggaatccctctatgctgagcagggtggggccatgcaggctgacagacaggccagcttctcagtttttaccctttgcacatggcttctagctgacattgagaccctggatgggacaggaggaagagaaaggacattggtaagccatcatgtgtgcagcatacagctatgctaataaaaccagccatagccagacacctataaaaccatgcactgagcacagacctgatgctgagcccctgacatggctcaacttgatgccatatgaccccatgtgaagtagagtcaacatcatttccactttacagatgagaaaactgaggtggtgagagggaaatgtattgatcatgattgccctgtcagtaagactccaggtgtagattttagggatgaaaaaagtacttcatatttgacaacccattccaatttctcgactttgctttttttgtttgtttgtttgttttttgtttggttgggtttttttgtttgtttgtttgtttgagacagggtttttctgtgtagccatggctgtcctggaactcactctgtagaccaggctggccttggactcagaaatacacctgcctctgcctcccgagtgctgggactaaaggcatgcgccaccactgcctggctgccatgctaacttctcagctcagtcaggagtagtggcatctctggtgagtcagctcttttggagggaagctgaggcaggggaattgtatatttgagatcttcttgggctacatagcaagttccaggctagcctgggctacttagcaagactttctctcaaaataaaaaatggtcagaggtgtagctcagcagtatagcacttgcttagcatgcacaagttcccatccccatcacagccaaaaacaaacacccacagtgctcagactggcaccaaggaagatgggactgttgtcagcacttgtatgtatgacccgttctatgcctcagtttcctcatctgtgaaatggggatgctgttaacaactcattacccttttgttgggaataagtaagagcatttatggtggagtctggaggagggtgggtcttgctgggtacccacaagtgagtggcaggaacctcactcctgtcctttcctcttgcagttcgctacttcctgaagaacaaggttagccctgatttgtgcaacgaggatggacttacagccttgcaccaggtaagcaggcagatctgaggtcccctggcctctctgctccctgataactcgctccccaaaccctccgggaagaggggacatgagacaggaacacagagagcccagctgaaaggcttttgtcctttggagatgcctgtgtctgacacagactggccttggagctcacacacacacacacacacacacacacacacacacacacacacacacaagctcctggttgtgcacgtgtgcgcggtcacaggctctgaggacaggggttctttgttcactgtgtcctcacaggcagctgagaaaattcattgtagaagttgagaattgacagagtattcacggccaccaggacatcccactcgccctgaggacaaagccgactgactgttttgttgtctaaggtcacatggccaagacctatggccatgaagtgggtgctatcgaacacatgtcctttccaagggaatgtggtgacatccctccctgcctggggacagccttggctgtcaccacccacatagaagctttgtcttccacggccagcctgtagcccccaagggttagtcctgcgggaattctttctccaaaagctgaaagttggctttagttcaaggctgtattgtgtctccttcctaatgctcagagtaaaggacaaatctcggctgtcctgcatgagaccctggaggcctgacgtgttcagcctccacagcgggctcctccctatcatttgttctccattgcccgtgtcctcactcagtagctcttgtccccagcaagtgcttgagagctggactgtgacaaaggtactctcttcttccaagtgacccatcctctcctgtcatttagcactagcctgaccctctgagatgacctcatcccagaagctgagcctcaccgcaacgtagcctgcatcttctgtccattgttgtgttccagcatctttccccatgcttgcagactgtaggcactcagcaggcgcacactgaatcagtgaatgaccatacctgacccttcccctgtgcttgttgcctgagtttttgagcagacagacttgagggtagcctggtgaggagaaaccaggcagcttgaaccccatggactgagacaagccacacatatctgatacctgtaagatgctgggacaaggccacacccaccgcattcagctcttagctggaaggctgtctgcctgtgtactcttggcccttactgtcctctagggcctcaggcatccacacttaggtaactggcttagtaacctcactgggtcttacccaaggactctcccccccaccccaccccccaaaaaaaagcaaagtccagcttcactcactctggagtgctgaggatacactagaggcgtgaccctcagtctaccttggatttgagacctaaaaggcaaccactgaaactgggtagtattcattagccagaggcctaatgatgggatagccataagggtagagttagatttgaggcctggaactgtcactcacttgtgtgtgaccttggacaagttccttatgctctctgtgcctcagtttcctctcctgtgagagagagagagagagagagagagagagagagagagagagagagagagagtctccatctccctgggttgcagagaggattgaatgagcagaggtaaaaccttgcaagcaacacttaccagaagctatgcagtaatcaggctggggagaacgctcccacggctaagcacacatactgctcttgcaggggaccagagttcagttcctagctcctgtgtcaggcttacaaccacctgtaatgccagctccaggcgatctgacgccctctgctggcctccacaagcacctgcatgcacacatgtatatgcctacatacacataaacatatgcacgcaattaaagatttttaaaataatctcatttcaaaagatttgaattatggggctggagaagtggctcagaggctaagagcattggctgctcttccagaggtcttgagtttaattgccagcaaccacatggtggctcataaccatctataatgagatctggtgccttcttctggttgcaggcatacatgtagatagaacagtatatacaatagtaaatacatgaatcttttaaaaaaagatttatgattacagtttatcatgtgcctacctcacaaagcacctcattggtatatctcattttgatctttatagccacgctcagaaacattgttatcctgttttatatctcaagaaactgaggctcgggatggggcagctctattctgtggacaaagatgtggatatatgtcctgtgtgtctgtatggaccagcatagtggccacagagttctatggttaatgtgacaggaaatggattctaactcttacttagttttagtgaatttaaacacagatgggccattttagatgtaaaatctctgggttctaggtcaaatggtagatcatggcagagccaggactaacatcagtagctttgccttgactgtctggatactgtagttagaagggccccagggctctctctaggtgctatctttgcctttataaacttttgggggaccctcccttgaatttggggttccttccattctttcccaccctacctcctcctcttccttgctgatcacatgacctccttgggtcctgcttttcttgggggctactgagcctctaggaacacacaaggagaggtaactacccagggtctgaacctagctatgtagcactctcccctaacgctagcctggccacacttgacttggctccactttgggaaggtccttaggaggcgtctgcccacgctgtcccacagactctcattcttgatcatccaacagtcccttttactcacccactcttgtgtcaggttagggatagagggttaggaagaggccgtgcttacagactgtgtggtgtgctgtgaccagaggcctagacataacagctggggtgacgccgtgtggtcagcgttcacacggatggaagcagaggtatctgcagcttgaagctcgaagctgttggcttgcctgaaaggagaagcgacacaggcttccaagaggaaggacacctgagctggggcttgaagtaagagcttatgagtattgtgtgcatatgagtaagagtctgccagaaagaaaaaaaaaagcagcatttggagcagagcgaacacccacagaggcttgaaagagctgctcagccttgcaagtttgagagtaagggagtaattagaggcatagaggaagtggggctggccaggttgagaatgggaccttcagagtcagactgtttggactttatagaatgattttttttttattgtgctggtaccctatgtctgtctgtctgtctgtctgtctgtcttctctctctctctctctctctctctctctctctctctctctctctctctctcttttccgagacagggtttctctgtgtagccctggctgtcctggaactcactttgtagaccaggctggcctcaaactcagaaatccgcctgcctctgcctcccgagtgctgggattaaaggcatgtgccaccacgctcggctctctctctctctcgctttcttatttgattagctttgtagaatcttactatgcagcgtaggctagccttgaactatggtcccactgcctcacctccctagtactgagagtgttggatgttgatgatataatcttgaatgaatctatttctggctatgtgagtgactttgtgcttctttgagccagtggggaggagaagagccccaggattgttttgagggttaaatgctgcagtgaatggccagagcacctgcctagtgtctggttctacaggccttccagaagtatcagcctttcctgttgataatgaagcagcatgctgtggcctcccagctgtgtattgctacatacaacaggggtggctgggacacccacagagcctctgaaggctagccaggcagctcaggtctgcttctcttggacaaggggaaccttgtgagatgtgcagaggtcacgctgcaggactagatacggtaaagcagagggcatctggaggtagagatgatgcagtgcatgctgagcctcgggaatggagacagacacttaggagcaaacactcagctggctctctccgatgtgggaaatgaagccgcagaagtcagcctagtgcaggtgccaattcccactgtggttccatggtgactgcagggcctgctctctgccccccacccccaccccatcctcatagacacccctgaacccgtcctgggatcactcccacaagacccttcagctctaggtatgcaatcccctggtcctatctccttacaacccggggactacttacttcctttctaccgatgcctcgatccagtgcctgtgtctccctctactggttatattgtgctcctgcatggttctcctgccccatgagacaatagaagccctaatgggctgatctttctttccctttctgtccagaaaagtaccttcagacttagccatgctagaccagctggtaggaagaactggctctgtggcaccatctgtgcacacggctgctcctttcctgtgtgttcttctgttgcagagtcctggctggctgggactatgcttggggctgtgctagtgtcccaccccacccccacctggtgtcagtgggcttacataggagctcctgatctttctgttggcttcctactcttctccaaacatatatttgtgtgtgtgtgtgtgtgtgtgtgtgtgtgtgtgtgtctgtgtgtgtgtgtgtctctgtgtatgatattacaaagtggtgacagtatatgatttctgaggctggagcatgaaaagtgtagctgcttctacctcttagattcatctgggaggaggcagccacctcgggtagcactgaggagaagttgtaaggcggcaagaaactgaggacttctgccagctgccaacactaatgtcatttgttcgagggaaccaccatgaaggagaccaacctcaaatgtgacttcaaccctggtcaaccccatgggaaatgccaagtcggttacccagttaagccattnnnnnnnnnnnnnnnnnnnnnnnnnnnnnnnnnnnnnnnnnnnnnnnnnnnnnnnnnnnnnnnnnnnnnctctccttcacagtgccctgaaaaccaaacctggcttaactagacagcaggggtgagcttacgtcccttgatacacacttgcagagcgcacactggcccaccctctgtccccacctctgtcctccctggatgaggctgtgtcccatggtgagcctttcactccctgtccctagaacctgtgttctttggggagctgcaggattggaccccgcgccccacctgactggggctcatccacctatacccctagctccatccaggtgcgagcacaagcaggctatctctgtgaattgtctgtgccagagcccccagaacctgctgggaggagtctcagtcatgcgaggacctccgtaagatttgcgttcccagatctgaaatttgtaaaaagccaaatgcacctgagcagtccttgagctgaaggatgagctaagagtccccttaagatgtcgcctggagaaagctgtctggggttttaaaagcgcattcaaattgtctgcagccccactaacactcataaaaacactttatagctgacggggccatttgctgaggctatttttacctttctcattatgaacttctctaagagcgcctcgccgaaagtcacaggcagaacttacaatactcaggctccgcctctgccgtcctcctcgggatctctggtggggagcatgtgagctgtgtccccgccagggcatgggccaagcctgacctcactctgcctctgtgtccctcccagtgctgcattgacaactttgaagagattgtcaagctgctgctgtcccacggtgcgaacgtgaatgccaaggacaatgagctgtggacgcccttgcacgcggcagccacctgcggccacatcaacctggtgaagatcctcgttcagtagtacgtgcccacccctccctggggcagcctgtgtgccacctccacaatggcattttctgtgctcattagtcctccatgccttccttcccgatcttccaatctccctccatctcctccctggccatcaattttctttgctctatcttccatctccaaactccccttttctctctctctctctctctctctctctctctctctctctctctctctctctctctctgnnnnnnnnnnnnnnnnnnnnnnnnnnnnnnnnnnnnnnnnnnnnnnnnnnnnnnnnnnnnnnnnnnnnnnnnnnnnnnnnnnnnnnnnnnnnnnnnnnnnnnnnnnnnnnnnnnnnnnnnnnnnnnnnnnnnnnnnnnnnnnnnnnnnnnnnnnnnnnnnnnnnnnnnnnnnnnnnnnnnnnnnnnnnnnnnnnnnnnnnnnnnnnnnnnnnnnnnnnnnnnnnnnnnnnnnnnnnnnnnnnnnnnnnnnnnnnnnnnnnnnnnnnnnncttgttgagaactgtcaccaccatctctgaaactcacttcaccttgcagagcccacaactatcaaccaagacgatttgtcccatccccatctatgcccaccctgccctcactcccaggactaccgttctcccccaccccacctctgtctgcaccagcagctcatttaagcgcaagcaatgcctgtcttttcacgactggattatttcacttatcacaatgtcctcaaggttcatccatgttgtagagggctcagagacagactgtgtatccattggcccattgatggttggctcagagacagactgtgtatccgttggcccattgatggttggctcagagacagactgtgtatctgttggtccattggtggatgctggttgttgcgaccctttggttgcagtgcatggtggtgctgtggaccagactttgcttcccgttcatttggaaacatacccagatgtggaattgctgggctctgtgataaccatttttaatttttaaagggatttttctaatgtcttcctagttccctgtcttacatcctgagggcctgtgccaggccctgggcacacaggctaggagagcaaggccagtgggtgaggtcttagagactgacggtgtctgagttcagggatgagggacggagagcagatgaccactccaacaggtcttggcagagcatcagagacccatcagaggtctcccaggaggtccctgaggtcaggggaaatggcagcttcgtgtactttcctgctggtctgtattggaaccacgtgaggcacaagtgtaaaatttatgttccccagcctcctgggttctttcagggtggtggagaaaatccacagaactgcatatggtgttcatggctactcagggatttctgccatagagagcgccacagtcatgcctgggtaccactctcatctccattgctgggataagtactctggcagaacacaacttaggggagaaaggatccgtgcagtggcccacagttccaggttccagtccttctttgtgggaaatgaaggcaggaactcagagcggctagtcatatcgctcaagggcggagagaaatgactgcccagattgcttagcgctcttagagtcctccgctcgtacatagaccagcactctgagttagcattctctacacaggccagggccccaaacacaggatcgatgccactcactttcgggccgagtcttccagtgtcagttaaggcagtcaagacaatcccccgtagacacgcccacagcccaacctcatctagagcatgcttcactgaggctcttcccaggcagattctaggtcatgtcagatcacccatcacaggtaccattggcctgaaggggctgctcttccggggtgcccctgggctctgttctgctcatgtcttgatcagctctttgggccggcatagaacatggaataacacatgacatggaacgtaggacatgtctgacccatgagagaccctatgatattcaagctgtgtggcctgagacatgtaactgaacctttctgagtcattgtcttctcttgagtgaggtgagccacacactagcaccccacaggagactccttataatagtgtgtgcaagggtcttacatctagcctggtttcaagaggtactgggtgagaggtcctgttcctgtttataccatttcccttattgttatgaaagagggctttgccatctgtctggaagtgcctacctgctgatggagctcatctgaggccttggtcctttcctgctgggaccctgggattcgaaaacactgcgttctcagatatgtgaggggaagggcagggcatcccttagcaaggatacatcccatggggtcatggctactggggagtgcagcggggctgtgattgagaagccaggcaatgggaacagccagaccaatccagacagcccttcttagctctcactctgaccctttctctgcagtggggctgacttgcttgctgtcaactctgatggaaacatgccatatgacctctgcgaggatgaacccaccctggatgtcatcgagacctgcatggcgtaccaaggcaagggggagcagtatgttacaccgtggtcatagcaaggtcctgcagtgagcacggttccaatgggtggaacagtgcattagctggccctgtacctgccagcctcgtgctcagctaccaataactgggacaggtccttgttattattgtcatctgtatggttaaaagacagggacatgaaaagggccttggaacacatgccgcgcagagggagatattgttctccctgtcacccacacacgcgggcggcctcagctggcctcctctcctgtttgtcagctgtgacaatcgattcagtcaacactcaccataaagatgtgtccccatttgggaacatggggagaagtcaagaacatttgggggtgctactcagtgccaggcaccaagctggctgccaggggcccagataaacaagatgtgggctgttcttggctcacagtgagctttagagtgagcttcagagggaagtatatgtagcaatgatacctgccagtcccagttctctacgtgcatcctgcgaagcaccctctcacacaaaaggccttaaatccagacctgtagttgtggcctgatgtcctgcctggtcctcttctcgccattctccccagatctccatggttactattgacttggctcctttactccctggcacctgcattcccccattaatttcctgtagaaagttttaaaatagcttttgtgccaacctggtgaaactggactctgcaatggagttatacagccgttggagtctaaaggaagtctacacgggtcatctttcaacatagctaccaaaatattttaaaatgtgctataataacatagaagccattgattctttcaggggttggatgatgtggtataaaattactccgagtttctgctgctcacgggcactgctaattgttctgatggtaggaaatactagactatgtaaaggttagtcaaataggcatgtaacttttaaaaaccccttcaaatttacagattgccccaaattctacccaagggaacttgatcccatggtttatttttgttgttgttgttgttgttgttgtttttaatgggccattgtgatctctccttaacgcatagccaccagtaacgggcacacttttgttagccagagatttgggctataacacgtctctctggaattggaacggctcatgcctgaaatcctagcatataggaggtcaaggcaggagaattgtcatgagtgtggggctagcctgggctatagagtgagaccttgtctcagaaaacgaaaagcaaaagcctttctgggtccttctaactcttctccaagtctctttttgaaattagtatcttcactgatttagtcactcttacaaaaagaacgtattatctattatgtatggtgctgaaaacactgtgtctatgagagaaaggaaagcaacagaccctcgtcaaaaagggttggccagagggcaccggctggggaggcaacataggtcagcacctaaatgaggcagagcagcaattggggcaactggaggtgagcagataggtgctccaatttagcaggtagagcaatgggcatgaagtgagtgatgttaataagaagcctactaggtgccaggaaggaatgggccttgccctgtgagttagcccacggtgtttgtgttcaacagatctggggacaaagatctcgggcacatttgtgccctgggtgactggcagactctgacgagctggagctgtgccctccctctgggctctttcctctctgcttgggaccctggtgtgacactgttgagtaacctctcacctccgtgcaggcatcacacaggagaaaatcaacgagatgcgagcagcccctgagcagaagatgatttcagacatccactgcatgatagcagcgggccaggatctcgactggatcgatggccagggtgccacactggtgaggagaccggccaggcagtgtgggttgggagcaagtaccagaaccaagatctgctagggccgagttgggtctggttcctggtaaggtgaaatcctatacacttgagaccttgggcctcctccagaccccctgctgctcctggaatatagaagataaaggctcagggtccagccattctcacctggggcagggcatcaggagctctgatgtccacctgtgttgtctccatggcaatgctttccctctcctcaaggagaatctgtccactcaccgacacagtcttgctttgtatcatccatcccctgcctcctgcgccctcggaaaccacagcccttctcattcacctttccctgaggtcactgtaacagattctacccatcatcacatcactccatccatctgtccatttatccgtctgtctgcccatttatccatccatcagtcagtccatccagtcaccacctgttagaagaacctcctctgtgccacaggctttgactaatccttggagagagaaaacaaccgagccagctagttagctcctctgatccttacaaatcagctcttactgccagcagcttgaggaaaccctgtccttgcctcctggccctcaacagtggaagctcggtattggggagggtctgcctctgcagtctctaagaggaaaattgaaacagggccatggagatccccacttcaaggtctggtcactgtcctaggcttaggcaggccacgggcatctgggagcccaggggctccatttcagcagacaggacttggctaacctcactgcacccagagctgacttggagcctcttatttgttgatggggcttctctcacttctccctgagctctaacctctgcttcctgtctactgctgttagaaaagtccctgctcagacctcctactgagctcagcactgaagaatggggtcagacagtgatagtaaatgctgctgactttacagtgaccccagccactgacccagacatgaactaaagcttttgagtaaactggagtgtaaaagtatcttttattcgcttgaagtaattgttctctccaaggcttactgcctcggtttgctaacctaggcatagtcctggaagcttctagcctccgtacaatcttatctaggcctagaatgttttcagcctctgagacttgctgttgagtaagctcgccccttcctagttgagactggactctggctggctggttcaattcagctgttctagttcaaacttctctccaagctgactgattcaatctggcttctctcgcagcctctgactttttgctctgcttggcctcaaaccaaccctggcgatctgttctaatcttcgggctccttctctggcttgttctgtcttcacctgtgtctagcttgttccctctgcacagcctgcctctgtacaaccttcctctctgcacgactctcttaagtagcttccctttcctctctgttctcctgagagttgggcagatcctattctgtaaaatctttctctgacttatcactttgtctgccactcaattagacatcaccttcaaacctgggtgctcccttctaccttcaatgtttgagattgaatgtgtgtattaagtgctgagacacacgacaactggaaacagggtttttgcagaaaataacacaatttcagagttcactgtgtgatcaaatatcctgcaacattggtggtaatagtgtcttcctcatgggacagctgggaggactgaatgacattcagcaggttttgagcacaatttgaagactcagtatatactgataacaatttccttcccatctctgtctctgtctctcttcgtgttcattaagcaaatgctatacttctgacattgagcccgtgatccttttgcctctgtcttccaagtgatgggactccaggcaagagtcaacatgctccagcaaccttcctcctcctcattagcaatatccctagatgaatcatactttttagttcctggctaagtacctgctgtgaccctgtgctttgaggtatctggctggccagcagattctattcttcacaactggcaagcatcagacatataaattagacgtcataccatagatttactctgaaaattaaaaagggaaatcctgaccttatcaggaccctggagcagcctctccatggaggaaacacgtgaccatcagggccacatcctaacctgagctatgacttaggtttcccagtgacttccatcactgacccttcccatcctctggatcattcccagtcttcagttgtcctttctagactgtcacttctgtccctctctgtggctgaacagtggcttctcttcgtcccaacttctccttccttccctcatcctcaggacagaccctgctgccatgctcaccacccagtgctaagcactttcctttctgagggatcaaacaagtgggacaactgaggtctgctggtggcagccatgacaggcaacctccaatggtgctgaatagaagagttaaggcctcagcctcagtggtggcttatgcctgtaatcccagtacttgtaaaagctgaagcagaagaactgttgcaagatgaggctatgttgggctacaaaataagactttttctaattaactaaatgaatgaataaatgaatgaatgaatgagcaaacaaactagctgggacctcagcataggcagtgtgagtcttcccattacagttatcaattgcctattgctatatgacaaccaaccctacagggtagattctttatagtagagatgtagcaataaatatttaaagttcactctaagctcccagtgggtgcatgtgcagaactgcacatgcccaagaattctggatttgcaaataaaaagcatggactcacaacctttatatttaatatgccttgattagctcaatggttgggcacctccccaggctagcacacacacccctcagatactcctgagttaacattttctaaatctctgttttatctttgctgccctgtttctttctgggcagccctcccatggggccactttccctttgcacctacattttggccatttcagtctctcactccttcgcaggtgtcatggtctatcctacatccctctcatggcagactcttctcccactactgtttcttgcccaggtatcttaaaagtcccacctctgtcccctgcccagccattggccactggctctttattgaccagaaaaccaaatattggcagggacccacaaaggatgtatggattcccatgtaagcacaaatctaatttccaatataaacacaacgtttctgtgggagattaagaatggcttaactgggtaaccgacctggcatttcccatggggttgaccagggttgaagtcacatttgaggttggtctccttcatggtggttcccacgaacaaatgacattagtgttggcagctggcagaagtcctcagtttcttgccgccttacaacttctcctcagtgctacccgaggtggctgcctcctcccagatgaatctaagaggtagaagcagctacacttttcatgctccagcctcagaaatcatatactgtcaccactttgtaatatcctcttggttagaaatgactcactcaatccgtgtatgttcaaaggcagagcaaccagattctacatttaaaagaaagataagtcaaaaaataggtaggtacattttcaaatgaccattttggacctttgggatgccttcttcagggctaggtgaagagcctgtctcacttcaccgttctacttctttatttcacacgtagcaatcccctgcaaccttcctggctggtgtttctacctcattctgtcccgttctttgatcccaaggatgctctgaggcttcgggtgagaaaggatactctgcctctaattgtggagccagctctcttaggaatgccgacttctttcctctcttccagctacacatagctggagccaatggatatctgcgagcagccgagctcctcctggaccatggagtgcgtgtggatgtgaaggactgggatggctgggagcctctgcatgcagcagccttctggggacaggtacttcccacccactgtaccttgtcaggcacaaggtaaaactgctgatactgagtcctttgggctggcatttggtgcaggagagctaggacccacttagccactgggtacaatgaatgtgggagatgagaagactggggtgggttgcagacacaatggccaattgcatcctaacaggatgagaatcaaatctgtccagtagaaaacccccttggtgtctgctttgcatggtttctctagagtgtttcccagatgtgatttcagcctgtgcagccatccatacatacccaacagctgtggaattacaaccgactcctcctgttgcttctcctcatagtaacccagggatgatgggaggaggtgccaagcccatcacttctgacagggctctctcttggctccatggcccagggccttccctggggatcacctttcctccaccattctttgggtcacattctaagaggtcttgggcttgctctccaactcttaggtttcctgagtcctgggtatgggggacatgaacttcttcttgtgttgcagatgccaatggcagagctgctggtgtcccatggagctagtctcagtgccaggacatccatggatgagatgccaataggtaaggcagcttcatacttagtacatacatacttaccagttcttttgatggtgagtggacattggttgaacatgtggctgcatagataggtaggtaggtagacaaatacatacatgcatgcatacatgcatacatacatacatacatagatggatgcatagtttagacaggaaatgtgatgtgggatatattgatggatgtgtaggcggatggatacataagtagacaggcagactggggatgagtcaatggatggatgaccaggttagccagtagatggatagaggggttcagtggattgactggtgaacccctctactcagtggggatttctcagcattacttcatttcctgcctgtggaatctgcttgtttctctcaatgctcagatcagggagacttgctaactctcccagagactatcaagggtatgtgtcctcgttagcttttgtgtggctgtgataaaacactgaccaaaagcaacttgggaaggaaagggttcatttggcttacgagtccttatcacagttcatcactgaggaaactcaaggcaggactgatggccatgggaggagtctgcttactgacttgctcctatggcttgccccccccccagaccccctgcaccactttgttatacaacccaggcccaattctccaagggtggcatggctcacagcagacggcccctcccagatcaatccttaatcaagaaaatgcccccatagacttgctcaaagggcactctactagagacagttcctcaattgagattccctctttccagatatgctcaggtttgtgttgacaaaacctaccatctgagcctctcagtcttagccgggaacttcaggagttaggagctcaagtctcccattttcacatccctcaaaggcaataagcaggggttgctttccttgctccgtctgtgcccccagaaggttctcagagcttctggtgggtttgcatgggtggcccctgtggtccagagtccctatcctgccttctgcaactgattcttgtattccctcagacctgtgtgaggaggaggaattcaaggtcctgctgttggagctgaaacacaagcatgatgtgatcatgaagtcgcagctgaggcacaagtcgtccctgagccggaggacatccagcgcgggcagccgtgggtgagtggtacaggcagctggggcccctgtacatgcctgcccatggctcctgatcacagctacctagcacctcctttgtcctcctcaggaaggtggtgcgtcgagccagcctgtcagacagaaccaacctataccggaaagaatatgagggcgaggccatcttgtggcagcagcggagtgcagctgaggaccagcggacttcaacctacaatggagacatcagggagaccaggacagaccaggagaacaaggacccggtgagggacctcctgccctgcctcagtgttggccactgacttgggaagagaacagggcccagcttggtcctacctcctcacctggggagctcagaaaagaaatagctgggcgatgcccttaagcagctggctcctgtctggtggctaatgttaatgttaagaatgtgacccgtgggtacattagttagaactgacaccttttcacatgcgatggcttcataagtggcagagacagagagagactgccctcagcctgcctgtccccaagtagatctggttttgagttctccagaagagagtcttggcagattagttcccctaggagctaagggccgaggtcttcttttctgggatgtaacgtttgagaatggtgtttctcaagatgccatctggctgaaggaggtattctaaaaaatgtaatgggactctgggacagtctccgagaagctgcttcggcagcagccagagaccctgggctctgggagcttccgggagatggcgtgaccttcttcagctgtgaagaaggtcaagctgggggcttaacatggtggacactcatggatctgaagtctagaagtctaaaggtgcaagcagggctggttcctttcagtgcttctccatgggaagtttgtgctaacaccctcttccagcttctggtggcttgggtgtcccttcacctctagcgcggctttagtttctgtctctgtctttataagccttcatctgtgtgtccacgagcatgcacgaacatgcaaattgctttcttttcatttaaggagtatttgtatgtgtgtggtgcctttacaggtgtgtagtatattacaggtgtgtgctcgtccctgtggtggccacaggtcaacgtctggtataaccttcagtcactctccaccatttcttttgagactgggtctctcactgaactcgatgcccactgataagctaaactgactgccagggagccccagaggcccacctgtctctgcccactctgtgttagacttgtaggtgcaaatggccacatgcagttttttagtagatgctggaagtccacgaatggccgcacccagcttttttggtagaagctgggagtccaaactcaggtcttaactcttatgtgtcaggcctttaccaaccaagccatctttctggcctctgttttcttataaggaccccactcatcagatcaggctccatcccaatctaatataatctcataaatatttttttgagccagatcattgttcactgcttgcatatgaagcactcgccagtgacatccttgcatggattctatttcttagtctctaaccacagcataactgaatagctacagccagccactctacagggcttcctgtttgggtcagttttgcacaagcttgcctatccccctagtttcttcttgtcatcagccttaattaggttgatccagtgctcagtaccagtacctccatgtgctttcaagtgtaagctcatcccggtccacagggatggactgggagcttgcccaaggccttggcagcttcttggatcccacgggttgggctattgtggtccagaggggtcttcaacacccctgttacgccccccagccaggaacttcttccgtggctgtggtgatggattagggagaggctgaatcttgaactcgcaaagcatctgcttcttcaacagcatcaggggatcctaacttagtgacaattgcaaaggaaacgactgcactcagacatcaagtatgtacgtcttctctctctcaataatagaccttgagatttgaagcagttttatgtttataagtatgaaaataagtggagtgctttggtagatgtaaagtgtttgccgtgcaaacacgaggacatgaatgtagatcccaatgcacacattggggaaaaaagccaaccagctgtgatgatgcatgccttggatcccagcactaagtagttataggcagggtgatctctgtgagttcaaggccagcctggtctatatagtgagtcataggatagccagagcttcgtggtgagactctgtctcaaaaaaaaaaaaaaaaaggaaaaaaagaagtcagactcaatgatatacacatctataatcctggtgcctgggaagtggagacaggagaagccctggggctttctggtcagtcaggatagctgaaatggtgagcttcaggttcagggagagacctctggtttcaatacacacacacacacacacacacacacacacacacacacacacatgcacacgcacacacatgtatgcatgtacacctacacacaccaagaacacacacacataattagataggtgggaaattgccctcaggttctctttcctaaccacttgcatttgtaggctgcatgtgttgttgctggtgagccggactgatgggcacatcacaatagaccaccctgtgttggagcatctgtggactccactgttacagtatcatgcaagggtctttcactgtcccagaccatccccactgtccacctgagcccattgctgacagcacaatgcagcacacgaatggaaaatggcaacaaaatagaatctgagggcaactttccacgtgtgtgtgtgtgtgtgtgtgtgtgtgtgtgttgttgtcgttaataatcttgtgcttccagagttttcgtttttcagaaggtcatggagttgaaattgtctaatctgtagccttttaaaatggcattacctacagttgttcagtattcatgggggcctggtttcaggacctagctttcctcagatatcgaagccttcagatgctcaagttcctgtgtaaaatggagtagtgcctatgtctaatctacacatcctcctattgcttttaacagatgactcctaatacctactgccatataaaggccaaaaaggaagaaaagtctactcgcagaaatagttttgtctgtctgtctgtctgtctgcctgcctcccttttcctctcctttccctgccccttctctctctctctctctctctctctctctctctctctctctctctatgtgtggtgtgtgtgtgtgtgtgtgtgtgtgtgtgtgtgtgtgtgtgtgtgtgtatgtgtgtgtgtgtatgtatgttaagacacggctttgctctgtaacacaagccttgatcccataatcctcctgccttaaccttctaagtcctggattacaggtctgtgcctctatgcctgagctatctctacaacccttgaaactgattcttttatatctaggaaattattctctttcttgttatatttgttgtcaacgattttccagatttttaagagatttgtgtctcatgactttgtttatggtgactttgcaatgggctccatcgttgctgatatcagctgtttctacatttttgtttatactttctggacattagctctctttcaagctcttattatccagaaactgctgaagtgtataggatccctagatgtgagactctattatgtgaagtggagatgttctggaaatagaggggaggagctacaattgactggaggctgggctaactaaaactgacttatatacacacacgcacaaaaggggaatttattggctcacctaactgcaaaggtctgggcccaacaggaactagatgttcagaatacaccatgaggtcagactccctgtgtccagccttccttgatgtcagcttctcttacaagcagagaaagcacctttgaccctgtgcttcctcagggcacagcttacgacatcttgaccatttgcagttctttcagaaacgtcttcccagttgttctagctgaagtttcaaagttgagttccactgatcccatttctatgaactggtcccaagacgttggcaataaaatatgctcattagccgagcctggagtcacacttcaaccctgggagtgggataggcattggtctgccctaccatacagagcctggtgccccagagctacataggagtagagaaacaggtagagattgggtgtccctcagcagaggtgcaggtagctggtgggtacagaccctctagctgaacgatgatactgatgctatcctcttgtcccccagaaccccaggctggagaagcccgtgctgctctcagaattctctaccaagatctcacggggagaactggatgggcctgtggagaatggcctccgggctcctgtcagcacttaccagtatgcgctggccaatggggacatatggaagatgcacgagatgcctgactacagcatggcctacggcaaccctggcgtggctgatgtccccccaccctggagtggcttcaaggagcagagcccccaaacgctcctggagctgaagaggcagagggccgcagccaagctgctcagtcacccattcttaagcacccacctgggcagcagcgtggccaggtcgggggagagcagcagcgaaggcaaggcccccttgattggaggcagaacttccccctacagcagcaacgggacctcggtgtattatacagtcaccagcggagatcccccgctcttgaagttcaaggcccccatggaggagatggaggagaaagttcacggctgctgccggatctcctagtgtccgtgaactggaggagagagctgcctcggagaggggcccctggaatccaaagccggtccaacagctctggctggcgaggtgtcggggcagccggggagaggtgggatctgctttctagaggaatgctgaccttacctcatgcccagccgcccatagcatctccactcccttctgtgctgcttccttgcctcactcaatgcctgcacctgaagtatagcaggccgactcactctgcagtctgattcaggaagggtgggcctgggatctcacttctgcacttggtaaaggcttcttaggaccaggaatatcaactccctacacacacacacacacacacacacacacacacacacacacacacacacatactcaatttagtgtataaggatgttacacctgagctcttgggaaacaaatgaggctaagaacttgtgggttatccccagaaaatgaatgagttcaagacagtcttggcaccactgccaactggcttccactggggagaggcctgctcagcggagacccacagctctgaagtcataccaggctgggtcactagcacacctagcaagagacaggaagtcctatgggttcagggaatccgggaatccatacggatcaggttagtgggcccaggcctgctccccacagccttgctgagagctgttctcatacatatgtcaataagaaagtggagagtgttcaaaggtcaaacaggaaagccaggccatccatgcttctgtgggagcacaggagtcgggttgggtgcagcacattggtattttccaaactgtgtttggtaaaagcgttctttcaggctgtaagatcccaggtgggaggttcctgaatttgccttctcccaagatagtgtcacacttgggttttattgtctggtatttgagaaatgaatttcatcaggagcttccgtggggctagggctcccagggagaaggtgaacgcattgctgagaacaccatggttaacattgacataacagcatcctagccggtctttgtggttttcctgctgttttgggccagcccatctcagcctggccttctcagcctgagccatcccatctttcggttgaggcttgcaccctgccctcccacctaacaggattgagtctgcagagtgaatgctcaggcccacgccccttcaagctttgccttttctgtaatgttgtgtaagacatgtttgccaagtgtcacttgtcggctcttgccaggaggtctcaaagctcccagcctgctgcttctggagtggtcatgcccaaagctgcaaactgaggtgcccgcggccaccatcctgtgcggcattcaggagagcatggcatggctggagttggctatcatcccagctgtacagctttgctgcccctgtcttcttgatgctgggaaaggaagcccacaccacatcaccaccatgctatcccacaaacccgttgaaattgtgccccgtaccttgagtgtgacacactggctctgccaaaaccttctggtgtaactggcaagctacgagttggttccttgctctgtgctctttttatttgtcctcaaactacctccttagagccccgagagggtccccacgtcattcggatgtatgggacagatacttctttacagccccctatgtcatacccttagtaggtaggcttgccacttggtctctgtctccactgtggcctcagggcctcagtagactagagatgaatcaggacctgactagatctgcaagatgctttattagaaccaggagtgtgggccagagagcaccctgaaggctgctggatgcagaaggaggtgcacaacactaggtcatctccaccccaactccaggacagatggaatccggcatggtgcaataacataagagactaaagacagtttctgggatccctgggggctcagctaggctctgtagcccatagctgaaagaggagatggtcaaaacacacacctgtggctttaaacatttagctctgacagacactgaaatgcctctggagatgattttagccacaaggtgggcagttgcccaggcagccagctacatactcttaggagtcagctgcccagggtttctgagctctgtgctcaggggccagagaatgaaggcatttattgccatctctgagccattcaggccatctcttcacacccagcacttcttcctgcctcctggaccgttcttctctacctgaggggtgggaaacactgctgcctcctgcatgggagctagtcccagacggtgtggactcatgggcttttgttcatgttttccactagggataaacaaatgttccttgttcaggctccaagtccccagggcactttgtgactctttggaatattgagagtcacaatgaggaacagtctccagcgcatgagccagggccacccacccattcactcatgtgatcgatctattgaggtgctgagacacacccgatgcgctgttagtttcagcagataatggactaacctggcagtgaagactttgatctcttgaggaccgtgggcatccccggactcatctattattctaatcagagtgcctccatgccagaccagtgtcccccgtgctttgccgcacctgcagttcttaagagtgtgaatctctttatttgggagacagctttctgaccactcctagataacatttgccactaagtgcagaggctagatctcaggtaccaggcagacactatacaggtccatctagatagagccttcagaggtagccttcaggccagcatccatggagaacaatacaacagcagtctaaggtcagtgcctggaagaaccagaagtctgcaatttgctgtcaaatacatccctagcatttacagtcctctcctgcttgttttttgctcatgaatcatacagtcttctcccctacaccaccaatgggtgttgggagggagaacaactacttctcttcaaattaaacatttccatgtgtgtcagcctctctccctggaagatgtggatccaagggctaggagaagcctggcaaggttgaccagatggctcactcctactgaagacatctatttccaaaccaggtgccctgcagttccctgtgagctgtggttccttgcacccacctatgctccccaaactattagaaattggtagctatcaccagattgtgaatttctggctagtagctcagggaattggaatgaatcctaaacccaggtctactgaagactttggggacataattctttatcaaatatacagcattaatgaagcttctctgtactatttgattaacttgtagacttttgagaagcttgccagagtgtgtccctcagccaggtgtagtggcacacatctttaatcccagcacataggcggcagaggcaagtggttgtatttctgagttccaagccagcctggtctacagagtgagttctaggctagccagggctactcagagaaaccttgtctccaaaaaaccaaataaaaaataaaatcaaatatggcctctgggttgggttaacacagtctagctttgtaacaatgtgagactcttggttcttagtgttctataccctctggttctgggcgttgtctcccacctgttcttctaaagcaggatattgggatattttccagaggggccatccttacatgatgttgggactgtctgaactgtcgctatttgtagcctggtgatatccccttcttccccagggcacagaaaagccaagggtcatatggccagggccaacagctccactaaagtgacccaccacttttctagaaagcccgagacctctcccttgttgaccagagggcctgcttctcatgggcacttcaaatgccactgtgcggggcctggctctgcatacctaggaaaagtctgcagacacccagccctccgcaataattcaccagaccagaagccactgatgtacagagaacacttaagaaaaaaaaatgtattttatgtgaaaaaaaagttaaaactctgtatactgtatcagcagctttgtgtaaaaaatggcaatcaaaagagtctaatatatttaaaactttttttaaaaaaaatattctcatggatctttgatatcgttctgaagcagctccatgcctccaagatggggtctgaccatgtcaccaaggggcctgtgcctctggagttacttccagctgccaaggcctgtgacggaattcattgctatggatttttaattaagattattaaattccttttaataacacctgttggtctgactgtggttactgctgtgccctcgtctgcatgggactggtttgagttccacaagagatcgtgccagggaggctcccagacatggctgcacccagaaggctccccgaggaggtccccaagtcggggagctttggggattcataggtggaactaaagaggtttctagattgggagatagtggtgaaaacttatgaatttaaggaaagataggtggtcagtgttgggctttatcctgtcaaatattttcttcgaagtcacgtgatatcctacagcagcagttttattacagtttgattggtttatgttatttatgttaccagggtgctcccttcctctgttccactgacttgtcctgggccttcccatgttcctctctgggctttttcctttagcttatagtggagagcaatgctctacgtcattcaatgggatcatagattatgatctctgattatccttgcttttaacccaggaaacagaggcaaagacactgtgtgactgtacagcctcaggcctggcccctgtccttattacatgcaagagctggttcgatttgatagaggaaggtagtcttctgcatcctggatgccagagtggggacacaggaagctcttgcctttgggcttgaataacttccctgagaaggctggaaccagggaaggatgaagagagggaggagatcctcacagcagtactggtttgttttaagtttacagaggtagaggcagggggttagaaagccaaggtcatccttcgctacaagatatgagaaagggagagagagagagagtgagagagacctttaagcgaagaagtagataccacagtggattagtatatagatgtatatgtatgagcatatatgtatgtgtatatgtatatagatatatatgtgtatgtttgcaaggtcttctgtgacctctcttaggattgacacagaataagatggcttcgaactccagattctcctaccctaacctcccatgtgctgggagtgtgccaccacccccagctctgcaccactgagaaaaaaagacatttatttatttttatttaatgtgtatgtttgtgtgctacgtatgcatacagtgtccgtggataccagaaagggcatcatcagattccctggaagcattataggtggttagaggttgccaggggagacagtgctaaacccagatcctctggaagtgctcttaactgatgaaccaccactccaggctctatctctgtctctttgtctctcttcctccccttcttttcccttccttctccctccccctccctccgtccctctgtccttctctccttctcacttgctctctgtctgtattgataatgattagatgcagggtggagtggcaatgaggctgatcacaccaaaataagcatgtccaggagcaagtcctacccctagtccgagtccttgaagcaccatgttatagggcatccggcagggggcgtgctcggacagtgcggggctatgtcccgggttggcagggttctggagccgctagggcggggtaaagtcagatttaaattccgctcagccatcaggcagtgagagcagagggtgggcgggttctgtctcaggagcaaccaatagcaatgagggggcagagcctttggtgcgcatgggagacatccagccaatgggattgctggggcggggcggcgagccaatagagcgggctggtttgattcaaagatgcctataaaaactcagactaccaccgtagacaagtggatcggttctgggcactgccatggctgctcgcttcgagctgttggacgaccttcccgcggcctgcctgtctccgtgcggaccgcccaaccccacggagctgttcagcgaggcgcggcgtctggctctcgagcagctgctggccggtggtcccgacgcctgggccgccttcttacggcgtgagcggctgggccgcttcctcaacgccgacgaggtgcgcgaggttctgggcgctgccgagcggccgggcgaggatggggcggcggtagcggaggactcgttcggctcctctcacgaatgctcgtcgggcacctactttccggagcagtcggacctggaaccgccggcgttggagctcggctggccttccttctaccagggtgcctaccgcggtgccacgcgtgtcgaggctcatttccagccccgcggcgcgggcgccggaggcccgtatggctgcaaggatgcgctgcgccagcagttgcgctccgcccgagaggtgagcggccccctggcagcgggtaggggaggagcatcggccttctgaaaattgagtcatgtcgtagttccaacttctgttattggtacccctggaacagagcgactgttagttcaaaccaaagtggattgcagaattccagggacgtcagctgacattaggtctcactttcaggagctaagtaaaagcttagttttacccaaaagatgatacccggagaccatggggagatctgtaattaccacttttccacgcttcttaatgttgtagacagataaattcgagcagtcggtttatctctttcacttctgtgagtgagtctggtgggagatatttttaacccacagtgcctgggactgttccaagtagcattgatccaaaatgcaaatatttgtgctttagataagccactggttacaatgggtttttatcttagctagtgtcagactgcccgattggcctggggtggagtatagagtctggcctgccatagatcagggagaaagggctccacttgggagggtgtggctacaagtttgcatgctggtgaacactgctccattcccagactttttgactgtgcctggaacatgaccggcaaagcctcagaccatgtcaagacttagtaggcctggcaccgctatatgttagggtgcggatcaggttgatatcaccaagtctaggagcaagtttgcgttctgtttttgtcttttgttttttgttttcctctctgcaagacaaggtcactgtaacccaggcttacctggaacttacaggcttcaatttcaggcaatcctcctgcctctgccttcctagtgccaaagccaaagttctgatgctggttctgtacctgccaggcaggactttgaggataagagtgtaggtgaccaagctgttcagggaatagtatggctatggctggattcatgttaatcccgtgagctttgggtgggctgagggtccgtttgatgctggaaatgtttcacttgtgagttcagtacaaaattataaagtgtttggaagaggcaaaattgtgggctaagggtgcatgcccaaagcttccctctgggaggagaatttgagcactccttggggacaccttgagaaggaaagacctggtctccgggaaaggcagaggtgtgggctgctctaaccttttgctcagttgggtgaaggcactagagctagaggtcagaaggaaaacttgccttaaaagggatcacagctacagcagacttccctatctttcttgcaatctgaaaaacatcagtggatggggcctcctgcttccctctgtacctacttcctttacacctcccctacatccctgtctctggaagctgggcgttcccacggagaaaggtgggaaacccaatgagcatttttttgtatatatgcccaagtgcatacttacccagagtctcccagctgtcacactgccagggctggggtcacagaggagggggtgtggttctcgtccttagttcatggaggactggggatgaggaaggggctagaagaaaatctggagtggcgatgtctgagttggactgagaaggaaggatggaactagcctgtctatggagaagatagggaccaaaagtcgaaaagatgatcggggtggtgttcctagcagtaagcctggcgtgaaggagtttagatttaggagggctgaggtggcaaggaggccagagacatccttgtaagaggaaagagtctggattaaggcagggtgggcaggaagccagttttaggcagagttccctgaatttgagacatgacgaactggagtggaaaggcaggggaggaaagtatgtagacagcgaggaagcttgaaggctgggggggcggggtagctctgtggcaggacggaccttaacatgctggaggtcttgggtttgagcacacactaaggggacaagggggagaaggaaacacgtggaaggttgatggctctgccgcctcagttcccgtagagaacagccgggctctgccttcgaatgctgggcttccaggcgtgtgccgccaagctggctgaggctgagacttgctggccctagtcggcagtgacgggactacactggaatacattaaggaaaacaaggactgagctggccaaggagtggggtgtataggaattaggttaatttgaggcatgaggctttaagaggaaaaaaaatgagtcaataaaaattgttttctcaccgcctttaatcccagcaggcagacacaggcacatctctatgagtttgaggctagcttggtctaaattgcaagttccaggcctacaaaagctatatggggtgtggggtggggtgtgtctcaaaacaaacaaacaaacaatgctttctctttgccagacagtattttcagtaaccttgaaattgttgattattctgtccactttagagaggataaactgcagcacggagaagctaggttgcttctagagatggtggagacaggactttacccaaggcagactctgagactccccattaactacagtgttgtgcgtgagccctgtgggagaagttcctgtccccgggtggaggaggactagctactgagagggatcagaggactaatttgctggctgtcaaaggctgccacctgtgaggacgtgcatgggtgtctgggagtggctgtgtcaccctggccatgtcctttgaagtgcattgctcgtgacagggaaggctgtgacagttcatatgtcaggtgtttccagatgtctgatctgtgtggtggaggcaaatatttggggctctaattgagttctttacccagattacctcctagtcctcccaaggccagaggaagctgcacttaaaggacatagcagacacatttaggtcaggtagcttgttgagcacggtgaggcagagctgggtgcagtgtgtgcctagctccagggccagtactgtgcttgcttggttgtttttttcattgaacccactatcctcctccctcagcttctcgagggctggaatgtgcctccttgccagacagaggacagcctccctgcttcccaggggctgaaggctttaaacagttccccaaaggttgggacgtcgaattcccgtgttgcatatcttataaacagaaaagtagtgatgatagcaagagctgcctgggctgtgagcagtagagctgtgtgcgtgctacacatcaatcaatcaatcaatcaatcaatgcttgcttggctttttttttaattgtaaaaagaatagagtggcctgttttaagaagaagaatcaaaggagcagaggcctttaagtggggaaggtagtttatgacctcaagacaatgtaggtccctggtgcttagattttataaatcaccatgcattttccctggcttcggcaagacagaccagctatttctagtatctgaaacaaataaagaaatcgagtgagtggctgaaggaaatgtgaatttcccggggtgggttgggggggttgtcccatgtagtgagcccagaggtggggaccaggcggcactggagtggggtcagatctagctgcttgcccccctttagctttacctgccctcggtgaggagatctgtgcaccggcctagattctctgtggtgaacctggaaggagcctagatacccaggttctatcatcagcacacagtgtaggataccaggggtgtttgccaagggtcaggagtatctttctgaatggatggctctgggatgggtttctctagcagctctggctccatggaacctccctgggcatctgacacatagctggtcctcagtatttttcatggaggcctgttaagccctttccattcagccttatgatttttgggggaa

SEQ ID NO: 1353 - DNA, 2255 bp, Mus musculus
aggagtcaagaggcggcacggtggctcgctacccagccgagctggctctgtcgccgcaccaccagctgcggctctgggacctgcggatcgagccggggccggagccgcccggggtagggctcgagagagcgggccccaccatgaggctccagccccttgggagcccctgtgctcccctggccccgggctcaccgcgctagccccaggcagagcaagggcaggcgcggggccatggccagccacgtggacctgctcacagagctgcagctgctggagaaggtgcctacgctggagcgcctgcgcgcagcccagaagcgccgggctcagcagctgaagaagtgggcacagtacgagcaggacctgcttcatcgcaagcgcaagcatgagcggaagcgcagcacgggtggacgtcgcaagaaggtgtccttcgaggccagtgtagcgttgctggaagcctcactgaggaatgacgccgaagaagttcgctacttcctgaagaacaaggttagccctgatttgtgcaacgaggatggacttacagccttgcaccagtgctgcattgacaactttgaagagattgtcaagctgctgctgtcccacggtgcgaacgtgaatgccaaggacaatgagctgtggacgcccttgcacgcggcagccacctgcggccacatcaacctggtgaagatcctcgttcagtatggggctgacttgcttgctgtcaactctgatggaaacatgccatatgacctctgcgaggatgaacccaccctggatgtcatcgagacctgcatggcgtaccaaggcatcacacaggagaaaatcaacgagatgcgagcagcccctgagcagaagatgatttcagacatccactgcatgatagcagcgggccaggatctcgactggatcgatggccagggtgccacactgctacacatagctggagccaatggatatctgcgagcagccgagctcctcctggaccatggagtgcgtgtggatgtgaaggactgggatggctgggagcctctgcatgcagcagccttctggggacagatgccaatggcagagctgctggtgtcccatggagctagtctcagtgccaggacatccatggatgagatgccaatagacctgtgtgaggaggaggaattcaaggtcctgctgttggagctgaaacacaagcatgatgtgatcatgaagtcgcagctgaggcacaagtcgtccctgagccggaggacatccagcgcgggcagccgtgggaaggtggtgcgtcgagccagcctgtcagacagaaccaacctataccggaaagaatatgagggcgaggccatcttgtggcagcagcggagtgcagctgaggaccagcggacttcaacctacaatggagacatcagggagaccaggacagaccaggagaacaaggacccgaaccccaggctggagaagcccgtgctgctctcagaattctctaccaagatctcacggggagaactggatgggcctgtggagaatggcctccgggctcctgtcagcacttaccagtatgcgctggccaatggggacatatggaagatgcacgagatgcctgactacagcatggcctacggcaaccctggcgtggctgatgtccccccaccctggagtggcttcaaggagcagagcccccaaacgctcctggagctgaagaggcagagggccgcagccaagctgctcagtcacccattcttaagcacccacctgggcagcagcgtggccaggtcgggggagagcagcagcgaaggcaaggcccccttgattggaggcagaacttccccctacagcagcaacgggacctcggtgtattatacagtcaccagcggagatcccccgctcttgaagttcaaggcccccatggaggagatggaggagaaagttcacggctgctgccggatctcctagtgtccgtgaactggaggagagagctgcctcggagaggggcccctggaatccaaagccggtccaacagctctggctggcgaggtgtcggggcagccggggagaggtgggatctgctttctagaggaatgctgaccttacctcatgcccagccgcccatagcatctccactcccttctgtgctgcttccttgcctcactcaatgcctgcacctgaagtatagcaggccgactcactctgcagtctgattcaggaagggtgggcctgggatctcacttctgcacttggtaaaggcttcttaggaccaggaatatcaactc

SEQ ID NO: 1354 - protein, 564 aa, Mus musculus
MASHVDLLTELQLLEKVPTLERLRAAQKRRAQQLKKWAQYEQDLLHRKRKHERKRSTGGRRKKVSFEASVLEASLRNDAEEVRYFLKNKVSPDLCNEDGLTALHQCCIDNFEEIVKLLLSHGANVNAKDNELWTPLHAAATCGHINLVKILVQYGADLLAVNSDGNMPYDLCEDEPTLDVIETCMAYQGITQEKINEMRAAPEQKMISDIHCMIAAGQDLDWIDGQGATLLHIAGANGYLRAAELLLDHGVRVDVKDWDGWEPLHAAAFWGQMPMAELLVSHGASLSARTSMDEMPIDLCEEEEFKVLLLELKHKHDVIMKSQLRHKSSLSRRTSSAGSRGKVVRRASLSDRTNLYRKEYEGEAILWQQRSAAEDQRTSTYNGDIRETRTDQENKDPNPRLEKPVLLSEFSTKISRGELDGPVENGLRAPVSTYQYANGDIWKMHEMPDYSMAYGNPGVADVPPPWSGFKEQSPQTLLELKRQRAAAKLLSHPFLSTHLGSSVARSGESSSEGKAPLIGGRTSPYSSNGTSVYYTVTSGDPPLLKFKAPMEEMEEKVHGCCRIS

SEQ ID NO: 1355 - DNA, 137300 bp, Homo sapiens
aagtgatggttgagctgagacctgaaagaggttgggggctaagcagagggagggaacagcaggccaggtgtagggacaagatatgctgcagggctgggaataccccagtaggcacatgaagaccaaaggcattaagcggcacaggttgctgaggggggacttctgggcactatgttggagatggtggcaacttaccccaggtaaaaatcaccagagcactcttttaaaaatacagatcccaggcctcatccaggtctgctgaatcagaatggccaaggggaagggcccgagaatctgcattccctcacaatttttcttattttgaaaaatatcaaatctagagaaatggaaagaaaagtacaaggaacacctgaacccccttcacctagactcaccagttgttaacattttggctcatttttgctttctctctctccctccctcactctctcctcaccaagcatctcctaaaaataggggcctaggccaggtgtggtggctcacacctatcatcccagcactttgggaggccgatgcaggaggattgcttgagcccaggagttcaagaccagcctgggcaacatagggagatcctgtctgtataaaattatttttaaattagccagctgtgggccaggcatagtggctcatacttgtaatcccagcactttgggaggccgaggcggacggatcacaaggtcaggagatcaagaccattctggctatcatggtgaaaccctgtctctgctaaaaatacaaaaaatgagccgggcatggtggcacgtgcctgtagtcccagctacttcagaggctgaggcaggagaatcgcttgaacctgggaggcagaggttgcagtgagccgagatcgccccactgcactccagcctgggcaacagggcaagactctgtctcaaaaaaaaaaaaaaaaaaaaaaaattagctcccaggtacgtgggaggctgaggtgggaggattgcttcagtccgggaggttgaggctgcagggagttgtgatagcaccactgccttccagtctgggtgacagagtgagaccctgtctcaaaaaacaaacaacaaaaaaggaccttttcctccataaccacgaccagaacaccgttgtcatatttaagaagagtaatgtcaatccagtaatgtcatctaatgtacagataatatttaaattccctgtggtttacaacatttctttcatagctatttacttgttcagtccaagagccaatcaaggtgcacgcattatgcactttttattgtgtccttttaatctctttcaatctggaataagtccctgccactataaaaaatgatattaacttttaaaaagagagtctaggcttttagaatgccccacattctagatttgtcttaattttcctcatgattaaaatcaggttaagtatttttggcaagaatatgacatagaagatgttgagtatatcttattgcatcacagtgggggcgaacaatgtcaggttgtcccactatggtgatgctgtgtgatctcgcgtttaagcagagaccactggagttctctgatgtaaaggtacattttccccttttacctagtaaatgatctgtggcatgatgttttgaagagtgtgactattctgttacccaataccttttttctcaatggctgtagcagctgttcatggttgttgttccctcaatcaattattatattggtgggtgcaaaaaggaatctgcatctttctttccttccttccttccttccttccttcttttctttctttctttctccttccttccttccttctttctttctttctttctttctttctctctctctctctttctttctttctttcattttgagatagagtcttgccctgttgcccaggctggagtgcaatggtgcgatcttggctctctgtaacttccacctcccagattcaagcaattctcctgcctcagcctcccgagtaactggggttacaggcgtgtgccactatgcctggctactttttgtatttttagtagagatggagttttgtcatgttggccaggctggtctcaaactcctgacctaaggtgatccacccgtcttgacctcccaaagtgctgggattacaggtgtgagccactgcacccggctggaatctgcatttttaataagtgcctcaggtgacttttctttgcctggaattttggaaaccccatttaagtcaatataaggaatacaggagaatgaggcattgctaccaaggcagctgaaggcattagctaaagcctattattcattagaatctgctaaaatgcatattctgaggcccgtacaccaaagaatgagaaacgggtgcaaaggacaggcccaggaaggaggattttaatactatctctcccctaccatcctgccaaccgtggatatggtttgtttgttgccaccaaaattcatgttaaaatttgaccttcagaatgaaggtttggggatgtggcacctagtgggagatgtttgagtaatagtggcagatctctcaggaataacttggtgctgttctcccagtagtgagtgagttctggctctggggagactggaatggttgttgcaggaacggattatttcccacaagagtgggttgtcataaagccagcacagtcctcaggtttcccctttttgcacatgtctgtttcccttttgaccttctcccttctctaccatgttgcgatagaggaaaacccttgccagaagcctgggccatgcccttgaacttctcagcctgcagaaccgtgagctaaataaacctcttttctttataaactacccagtctcaggtactctcttatagccacagaaaatggactaaactccctctcccatttcctacccactttgtggtcaccaaaacttgtgaaacactgacttaggtggtgattcttaatcctggctaagttaagtgaagttgcattttcaacatgccttgggagttcttttgatctgtatgtatgtttaaaaataaacctccagagattttgattcaaagggtctggggtagaacccagccatcagaaaaatttaaaacctcttagtgattccaaagtaccaccaagactgagagccactgcacaagattctccataaattgaatataaaaatgaaagccagctgggcacggtggctcacacctgtactcccagcactttggaaggccgaggcaggtgcatcatgaggtcaggagatcaagaccatcctggctaacactgtgaaactccatctctactaaaaatacaaaaaattagctgggcgtggtggcaggcacctgtagtcccagctactcgggaggctgaggcaggagaattgcttgaacccaggaggcggaggttgcagtaagcaaagattgtgccactgcactccagcctgggcgacagagcgagcgtctttctcaaaaaaaaaaaaaaaaaaaaaaaaattgaaaaccagtctatcccactcttcgttacccctatcctcacagcatcacaggttgagctcaccactagccttaaatgcctggggctccttccacctacttatggggctcctactgtgtgcaaacagctcttggggagcttacaaaagaggtaaaagtcacttcccacaaaagcatgaggacgtgggaaaaaaccacacatacaaacacttataagtattgtacaatcagaattgtacagaccaggaaaccgacattcagaagaggaaatgaccgcccagcgagttcatgccagagccagaactcttacctgggatgcctttctccttcttggctcatttttacttgaacccaagttgaaccctctgcacttcctgctcttctgttggttgggcctggcctggagctatcatcttcatcatcaggagtagcagcatggggacaagggcagcctatcaaggcttattctgggtctagcattagactaagtatctgttgaatgaatgaatgaatgtagccagcctagcacctgcccacaggctgacattaagaaccacaagttcaggccaggtgcagtggctcatgcctgtaattccagcaagactgtttgagctcaggagtttaataccagcctgggcaacatagcaagagctcatctgcactaaaagtaaaaataattgagtgaaactcggtctcaaaaaaaaaaaattagctgggcctagtggcatgcgactgtagtcccagctactcagaggctgagatgggaggatcacttgagtgccagaggctgcagtgagctatgctcatgccattgcactccagcctgggtgacagagtgagactctgtctcagaaaacaaaaacaaaaacaaaaacctttgttcaggctgggtgtggttgctcacgcctataatcccagcactttgggcggaccacttgaggccaggagcttgagaccagcctggccaacactgggaaaccctgtctctattaaaaatacaaaaattagccgggcatgatggtgggtgcctgtaatacaagctactcaggaggctgaggcaggagaatcacttgaacccaggaggcagaggttgcagtgagccaagatcgtaccactgcactccagcctgggtgagagactgagactctgtctcaaaaaacaaacaaacaaaagaccttggttcagataacctctagaatgaatccctttaaacactgaaattagttcatttttcacagactcaggaatctctagaccttgcctcatagcaactatataattcacccaaattctaccttctgtataatttttttttttttgagacggagtctcgctctgtcgcccaggctggagtgcagtggcgcaatctctgctcactgcaagctccgcctcccgggttcacgccattctcctgcctcagcctcacgactagctgggactacaggcgcccgccatcatgcccggctaattttttgtatttttagtagagacggggtttcaccgtgttagacaggatggtctcgatctcctgacctcgtgatctgcctgcctcagcctcctaaagtgctggtattacaggtgtgagccaccgcgtgcggcctaccttctgtataatttctatggaactatgaatttacttagttgctgttgaccggttgacctaaagttatgttgacatttaactctatatttttaaacatcagtgtttagattttgtatgttggagcccatttatttatttggcggccctcaaacattttcccatagcctcgtagaatattcagtggccttggactgtcccttaatgtcttactacagatggtaccacagatgacctccaaaataaaggaagagactttcctgcctgtggacaggagagagaggtgtggaggatgagagcatagtttaacttttttttttgaaaaactttattgagatataatccacatgccatacaattcactggcttataagtatataattcagtggtttttaatatatccatagttgcgtgatcatcaccacaatcaattttaaaaatttttatcacctccaaaagaaaaactggtactctttttgagtcaccccccatttgcctccaataaccccctcccagctctagacaatcaccaatctgacttctgtctctatagatcagcctattctggacatttcctataaatacaatcatataatatgtgtatggccttggaactggcttctttcactcagcacaaggttttcaaggttcattcacgttgtggcatgtgcttcattcattttgattgccaagtaatagtggattgtaccgtgttttatttatccattatcatttgatggatatttggattgtttccactttttttttttttttttttttgagacggagtctcgctctgtcgcccaggctggagtgcagtggcgggatctcggctcactgcaagctccgcctcccgtgttcacgccattctcctgcctcagcctcccaagtagctgggactacaggcgcccgccactacgcccggctaattttttgtatttttagtagagacggggtttcaccgttttagccgggatggtctcgatctcctgacctcgtgatccgcccgcctcggcctcccaaagtgctgggattacaggcgtgagccaccgcgcccggccttgtttccactttttagctgttgtgaataatgctactatgaacatttgtgtacaaatttttgtgtatgtatgcttttatttctcctgagtatatacctaggagtagaattgctgggtcatctggcaactctatgttttaaattttgaggaaatgccatactggttttcaaagcagcggcaccattttacatttccaccagcaatgtatgaaggatccaatttctccatatccttaccaatgctggttattgcctatcttttttattataaccatcttagtgggtatgaagtggtatctcattgtggctttgcatttccttcattgctaatgatgttgagcatcttggccatgtgtatatctatcttctttgaagaaatgtctatccagatcccttggcctttttttttttttttttttttttttttttttttgagactgggtctcgctctgtcgcccaggctggagtgcagtggtgtgatcttggttcaccgcaacctctgcctcccaggttcaaacaatcctcccacctcagcctccccagtagctgggactacaggcccatgccatcatgcccagttaactttttgtatttttagtagagtcagggttttgccatgttgcccaggctccttgcccattttttattatttgtctctttattatagagttgtaagagttccttatatattctagatataagtcccttaccaggaatatgatttgcaaatatttcctcccgttctgtgggatattgtattattttgccaaggctgccataacataatactatagactgggtggcttaaacaacagaaattggctgggtgcggtggctcacacctgtaatcccagcactttgggaggccgaggtgggtggatcacttgaggtcaggagtttgagaccagcctggccaacatggtgaaacccttactctactaaaaatacaaaaattagccgagcgtgggggcatgcacctgtaatcccagcttctcaggaggctgaggcaggagaatcgcttgaacctgggaggtggaggttgcagtaagccaagatcgtgccactgcactccaccctgggcagcagagtgaaactctatgtcaaaaaaacaaacaaacaaacccccagaaatttattcctcacaattctgaaggctacaattctgagatcaaggtgttggcaggtctggtcccccagccctgagtcctctctccttggtttgtaattaaccttcttctccctgtgccttcctctggtctttcctctgtgtggcgcatctctagtgtctcttcttatgaggacaccagtcattggatgagggccccatccaagggcctcagtttaagatgatcacctctttaaagaccttatctccatccacagttacattctgaggttctgagactgtaaccagtacagttcagcatatgaatgggggtgagggggcacacaattcagcttataacagttattttttcactctctttttgttctttttatgtttaatttttttttttttttttttttttttttttagagacagggtcttgctctgtcacccaggcgggagtacagtagcaccatcatagctcactgcagccttgaactcctaggcaaaagcaatcctcttaaatagctaggactacaatcatgaaccactacgtctgcctaattttaaaagaatttgtagagacagagtttcactatgttgccctggctggtcttgagctcctggcctcaagtaatcctcctatctccacctcccaaaatgctgggattataggtgtgagccaccaggcccagccataacttttcactttcttgatgatacccctgaaagcacaaaagtttttaatttatctatttttttttcttttgttgcttgtgctaatatctaagcaactactgtttaatccaaagtcatgaagatttaggcttatgttttcttcagagagttttatagttttagctcttacatttagatctatatgttgcatatagtatgaagcagggatccaaattcattcttttgcatgtggatatccagttgtcccagcaccattttttgaaaacactattctttccccattaaattgtcttggcactcttgttgaaaatcaattggcagtaagtgtaagggcttctgtctggactctcagttttattccattggtctgtatgcccatccttatacccgtaccaccctgccttgatgactgaagtttcctagtaagttttgaaatcaggacttgtgagtcccccaacttattctgaatttactttaacttttgataccgaacacagtgtgagaggtgaatgaacagcatgacattggagttgggagccccctccctccaaaggccttattttaggaacacaggccccaagtgccacacaagccttggagagatgggttcccatcctctcagcccatggctcttcattatcaatcaatggaaacattcttcggagaacaatgattcccttgggttattttaaacatggctttaagtcttccccacatgctctactgtctaattgcttttcctgaaacagtgtcattcacaactggattattaatgaactgagagggagccagggagccaatgaagggggcttacagagttcctggagagggcctgggggcctggaacaagttcaacccacagattttctctcccccaagaaaggtgactgagcaaacagaaaatcactaaactcaggtgatgctggtggcctcaaaagaatattgccagtgaaaaaaaaaggattcgggcgagttcctcaaacatgacagctgagaatcaaattaactgggtaccatccccaaactccccaaacttaaactctgaatttccccagctggctggccctggggtgcctagggctctcatctgtaggccgggaaagctcaggaaacaaggcctttgtggagaagagaaacctattgttctaaggccagggttcagcaaatgtggattccagagaatgtttggggaggttttctctgctttgtttatgaactttcttttctcttcctggggtggtgatggtggggggtgactctcagcaacttaaatagttaaacccattgtgttgtaaagaaaggctggtgcacagagtgcagaggccttcagccccagaaagaggcttgaatgaggtgacagaagccaccgggtatgttttgctttttatttttagcgttaaatctcagggaagcagcccctatcttcatcctgcacatctcaaagggcgtcagacgtcagcagaggtacgaccacttccttcctccagcgcttcacctcccttctttccagaaagaggaaatgatgcgagtccacaccgcaggccacagcccccatgtctcggccccagcagctgggggacctggccccacagatctgtccccagcgcaaggccagggccggcccctggacctcctgggaagccttcagactcaggccgcgcaggccttcaagctaggaaccctgagttcctggccctggcattcattctgtgtgaccttgagcaggttaccactcctctctgggcttcaggattcccgtctgtcaaatgggagcagggataccgtccttggcttccctctttccatggtcggggtgggggttaggaaaactattttggaggagggggcagcgttaggaaaactattccgaagcctggccacgtcccaaccggtttcaacttcctgcagctcagaagaggggtccccacccgagagcgccgggaccctgtcccgcgctgcctcccaagccggatggggttgagcgcgcccaccccagtcccaggagctcaggccccgccttgggggaggagccgagaggcggcgcggaggctcgcggccgagcagagccagctctgtcgccgctggagcagctgcggctcggggacccacagacacagccggggtcgggagccgcccggggcagggctcgggagagcgggtgagttccccggcggcgccaccaccctccttgcgctctgcggcttcgcagggcgggggatgaggatggggcggggaggtggtcccagcctgctatcacctagctgggggccggggcgctttggccaagggacgatagcttgagataaatgggagtgtggggactctggaaagacgggtaccgagagcgctaggtccgggagtcgggctggaatgggggcgttctccccggcctcgcaattccttgacgaggccaggggagggggcgcattggcaggttgttggctgcggccgtcgtagaccgatcttggggcggggaggtggggtcctcggtctgttctggactcatggggccgccgtctgccgggggtgcaatgccgggcggcgggagccacagcggacaccaaacaacccccccccgcgcactctcccggccgggcatggtggtgccgccccctcgcgtggcggggcttggtcctggcgggcagcggcagggcgcagagagcgctcctgcccgggcgggaaagatccccaaggcaggcgcctccacctgcagacccgccccgcctcaggatccggctgacagcaccagccagcccggggagaccccgcgagtggtagttccccgggaggggcgcgcccggcctctcccagggccccgtgcgccggcggctgggtcccccgcgccaggagcgctcccctctgggcgactccggctcatcgattccggcccagaggagcgcccccgggcgccgaggatgggcggagacgtgcagccgcccctgagaggtcgcccagaggggtctccccaaggtcacccggagtgcccaggctgagctgcccagaccgccccgggtggagagccgggaggcaggcgctcgctgccctcctccttcccccatgtagactcccttcctccgctcccccaccccggcccggcctccagcttcactggagatgctgatgatgcagctcccagcccttggaggataattgagcctgggagagctttgaatctggccctcctgagaccccagggctgcgccgctgccgcgcgccaggcctgggtcccggtgctcccgggcacctcaggagcggagggagagggatgtggcttcatcagcgcttctaggaaccgaaaaccgagctgcctgcgcgcccatgtgattgcatttcacataaagggcccctgttttcactgtcagaagagccccccagctctccgcggctctggacaccaggtgccgcctctgaatcaccctctgtggaggacccggggcccggaggtacaggcgccctttcccgcagggctctccctggaaagggcctgccgatggcggcctcagtccgcaggggtacttccctgtgtaccctgccatttcctgcggctggtgaagcaccggagaaaaaccgtccatctaggaggcctcctccaaggctggtaataaagcttcttagcccagccagcgactagctgtctactcgtgggcaaggtacttggcttctggagtctcaactgcctctaagatacggggctaacagccgccaggctgtggggagatgagggagaggctgggtgcagcagagcgggaggatgaacactccttggccaatactggccgccctcgggattggctttgagtggggcgtgtctctcttagacaggtgcagaagtggagccctggtgggtggttctgcaggggctgggggagtttccacatcttcctcccccagctctgtcataaaaagccagcttgcaggaggccggtgggggccagcaaatccttccagccggctgcctgctcacacggcccttcccacacaaatctcccatgcccttctctcccacctgtcacccaaatcccatcttcctggctgagtccccaggatgctgggggcaagatgtcaaccaggccaccctggactgtcaactctgtgcctacttgtctactggggtctacctaacagtgttcccctgtcctggaaccttcctggctccagctcttcccagcctctgtaatgtcttctttcccctcttttggtctcctaccaccgtgacactcattagtggctctgtggttcatgtgtcaagggccccgtgccatctgtgctctccagatcatccatggcctagaaagacacggtaggcaaggccctgtgcccactcagactttgctctccctggtaattgacggagtggaggttaaattctaatctagctgttaagtcatttcaggagcttgagccacagggctaagaggatactgatgtaggcaggtggtttttccttaaagccagaacctttctcctttctgcagagcccatttgagccctttggaaactaggcctatgtgtgatggcctcacagaatcctcacaaccccgtgaagtaggcattactgattcccattttgcagatgggaaaactggggctcagctcctctcaaaaccagctccatgccccaagtgtagcaacagaggctgcagccaacctggtttaggagaaggcagaaggcacatacctgaattcaggtgctgtgcttggactcttgggaccccatccccccaacctttccctcccctctcccaacctagccaccacccctcctgcacccaggactcttgtcacatttgttgaccaggaggtcccaactggcactcttccagcagagaccaggaaaaccttcactgtcctgagtgcatcttagcaattgggcttcaagaagggctcggacaagcctgcctcttacagaaagctacgagtatgaagagtgagggagccagagaggtctaattttaattagggatctatacctaaaagctctgtgaccctgtatacatgacttaatctctctgagtctggttttctcatttgtaaaataggtatcacagtaatgcctactttgtgggattgtaaggattccatgagaccattaacacatagaaagtgctcagtactagggtggagcatagtggctcacacctgtaatcccagcagtttgggaggccaaggcgggaggatcactagacgtcaggagttcgagaccagctggccaacatggtgaaaccccatctctactaaaaatacaaaaattagtgcagcatggtggcgcatgcctgtagtcctagctacttgggaggctgaggcacgagaattgcttgaacccgggagcaggaggttgcaatgagccgagatcacatgactgcactccagcctgggtgacagagcgagactccatctcaaaaagaaaaagaaaaaaaaaagtgctcagtacagcatctggtgtgggtaggaatgcaggaaatgatcattgtcaccatcactactatttcctcctttgtgttggactctcaaaggtcccacctcctccagtgctagggtggggagtgagtgcgaccctgtctcttctgcctgtagccatcaggacggggaaagcctctcagcctgtctcctggggcgggggtgggggctcactcctgggaacttgagtctagcaccagcttttccccggggagtctgtgagcagccacttagcctttctcagctgactgccattttccaggattcattgattcattcaaaagacgtttattccatcccagcccttgtgcttagcaagggatttcaagatgaatgaggcagctctcagagttctccctctatggggagaggcaggcctggagacagataatgaggacactgtgggataaaggctgcaacagcaagaagagagagtgacgagcagatccacatggctcaggctgacccaggtctgaatcttgaagctgccaccttgtagctgggtgaggatggacagaggccttacctctcaagcagataagccacctccctaagatgatgatgtgaggagagaagtgagacactgtggataaaaaacctagcttggaccaggtgcggtggctcatgcctgtaatcccagcaatttgggaggcagaggtgggcagactgattgactccaggagttcgagactagcctgggcaatatggcaaaaccccgtctctacaaaaaatacaaaaaattagccaggcatggtggtgtgcacctgtagtcccagctacttggaaggctgaggtgggagaatcacctgaacgggggaagtggaggctcctgtgagccatgattgcgtgcacctctgcactctagcctgggcaacagagtaagaccttgtttcgaaaaaaaaaaaaaaaaaaaaacaaaaccaaaaaacttaaaaacccagcttgggctttctagatattaataagtgctcacagatgttcgttgctattattagtctattattgccaataacaggtgggcaaaagttgctgtgggagcatgttgagcccttcagtgacagttttccaggtggtagggcagccctagccgggagaacagcatgtgcagaggcaccgaggcttaaaagtgctggatgtttttggagagcagtgggaggagttgctgatggagcagagtcatgagaaagtttgatggaggcagaagcaaggccagggaggtagcagaggctatcctgccgggagccccgaaggattaaacactcactgacccgaggcagtccctctgcaccttccttggagggtggttctctagtgagggttgtccaggaaacttcaggattaacttttgcatgggaggaagggctggtctctgctcaactatccatacattcaccatccttccctcttcattccacccaggaagcacgaagaagaagaggtccactccctcttcctgagatgcttttcccacctctgcacttgtttctctcttcctgggactcagtttctcacctgagagaagagggtagaagtggaggaagcgtcatgacctgactcactgattgatcatgatatagcaccaagtgcatttctggatgctggtcactgtcaaaggtctttacttgcatcgccattgaattctcataccaatccgttgaaatgaatgcacttatcccccactgcacagagggagaaaccgaggcacagagggtgaggcaatttgctaaagggcatgcagcttgtaagtgacaggaactcacgtcttggggggcatctcaaagttgccatgtgctatccttcaccaccttcttcacacactttgtaaatctaaggctgactgcagaatatctggcctcttttgctttgtgtacctttgggcgctgggcagtaggcattttggagatgggtcacagtggggtgtgctctgggtatgtaacctgactttggggaaattcctgggtgcagacgctttgtggggaggtgttcttggatgtctcagaatctagaatggcattccttcgcccacagatgtgccttgatgcaggcaatgtgcagcttgattgatgtggcagatggtggctgagccccacggtggccccaggaaggaatgaatgaatcttttaggatggctgatcagagcatcacatgaccacagaccctccctgtttcagaggacatccaaacacaggcttacatttccttttacatgggggcaaagtttggggccagggttcaaatgctggctctgcctccactggctttggggcctagggaaattttttcacttccttgaaccttaatttcttcatctggaaataaagatgaagaaataagttgctaattttagcatcttcaataagttgctaaatagtaactcacaaacacaattctgaattgtcataaggatttgtaatcatatggaaaatgcttggcttccaagctgtagataatattgatgtaatatccagcagatttttctctgcagtacttataattgtgattatatggttatatgtgagcattactcttttagtcttctgtttcatccactagacctgtggttctcaacttggggcagtttgaccctccccaggggatatttggcaatgtctaaagacgtttttggttgttacaacttttcgggggatagtgggggagaggagctactgacatccagtgagtagacaccaggggtgctgctaaatatcctgtggtgcacaggagagcacccccacaacagaaaatgatctgatcccaaatatcaatagtgctgaggttaagaaagactacactggacgatgagccccataaggtccgtgactgtgtccaattcattcagctgtgtgtctccagttggccagcgtgatcagcatgatgtccagcacacaggagacaatcaatatgcattaaaggaatgaatgaggacttggaaggccttatgtcccctggagtcccaggggtttagcttgtggaacattttgaataggcagaagagatttagatgaacttgaatgatgaacagccaattagtaactcaggccaaagacattcagaccgagctctctgttttccttcccaagcaggtgcttgggggcccagattatctgaattgttcctgccatcaccactgcattttacccatgtagatacaggacccgtctttatctggaaagtaggctgggtcagaggagcataggtgctgtcagctgggcccttgggatttgccaagctggggcacagctgcttgtcagcttcctgttttgtccctttctagtggaatgaaggaaacccactgaatggctattttccactgacatttacagcaatgtgataggccttggattaatgaggtcaaactgcagtgtgaaatctgcctgataacttgaagcttggccaacgggaagacatcgcttgttttctttggaccgtttgatgtccctggatggctttaggcaggaaagcaggggtctcaattctgtacgaaagaggagggtgttttacttcctggaattatagaggccagaggtgtctctttttcaatttattgggaaggtttattttaatatggacttagaaataaataacttattaaagtgaaggttcacctggagccttaggctggctgctaagtgtgagtctgggctgttgaagggactgtgctgttcttctgggtctctgtaggagtttgaaggagaagactggccccaaagggtgtttgaacaggttagatgtgcccattggttagaacttacttggatagggagaagggatctagggcgtatccacaaacttgcatatggatcccctttggtttcctgctaaaatgcagaaactgactcagtagggctgggtatggagttttctgcatttctaccaagctcccagggggtgtcaagctgctagtctgtgaactgcactttgagaagcaagggtatgggagaccccaagtctacaggtgagggttccctggtgcaaaccgcttaagcatgaaagcaaatgcagcctgttgtgcctgttcacacagccatctgctgtgctggctggcttgcggagtcacagatgttcactgtgccccttctctgtgtgcccaggcctgggaccagacttgacaaagaggatgcttggtctcaaggagcaactcagacagccagaatgtcagctagaatgatgagctttgagtactttcaaaaacatgtatccaggtacatggtgttcctgggtcatctggtcacctgggacttgtgagaagtacagatgcctgggccttagcccagtccacctgtgttagaatcagccaatatagggccctgaaagtctgtattttctcaaagtgtgccaggtgattctgattcacagccagactgatggaagggaaggtgggaggaagaactgccagtacatgcaggttaattgctcagcaggacctatgtaaggttgtagagttgtgtattgctgatgggcacagtggcactcggctaaaggagaggctgaaatctagcctgtggatccacttgccaagctctgcaccctgcagggttgcatctgcttagagggacgggcacctttttcttaatattcatcataatcacttggtacttattatgagccaggtgctgtctacttaactcctttagtcctcctaacaactctaaggggtgacatcatcatcatcatcattattattattattattattattattattattattattattttgagacacagtctcactctgtcgtccaggctggagggcagtggtgccatctcggctcacggcaacttctgcttcccgggttcaagtgattctcctgcctcagcctcctgagtagctgagattacaggcacccgccaccactcctggctacattttgtatttttagtagagaaggggtttcaccatgttggccaggctggtctcaaactcctgacctcaagtgatccacccggctcggcctcccagggtgttgggattacaggcatgagccactgtgtctggccaggtgtgactttagtgctactctgattttactgttcaggaaagtgaagcagagaggttcaatgtcttactcaaggtcacacagccagtaaatggaaaagtcaggattccatttcaggacatccggcttcaaagtccttgtactgaatcattacactctctggccctttctttgcataaaaatgctgtcttctctttatggggctatccctactctgagggagtaccttttttcttgtccttccttcagaggggggaaggctagcaatgaccttggctggctttagagtcaggtacgggtttgattcctacctccagcacctactgcaaccttgagtaagttacatgtgtgtatttgctgagccacaatttccccatatgtaaaacaggaataataatagtataatataaattgatatgattaggcatttagcctctgcttggcaggtaggaggtacctgatacatgccaactattcttatggcattattatcattagagttagtccctaggagtattcaggagctagggaaataggtgagcaaagcactgtgtcattatgtccccaggagctgggtcattcattttgttcactaggttacttatggccattacttacctgggcatccctagtctcctccgcttcttggccccagagtctgtgccagcctggagagttctcagaatgtcttagttcagactcttagtcagaactgcctttgtttcctcacatccaagaacaagtaaaacatacaaattttgacacttattctctttaggtctcttgactctttttggtgactttctctgtctcctgttttctttctggaactattgctgtcgttggctatcccatggactggatagagaggaaatgttgccttataaacattgccaattaccttataaaaatatagggaagattttcaccaaaatgtcattcattttttttcttttatatataaacttaagcttttgttttcctatggctgtatgtcatgctttttaattacacaaagtatataagtgtatcataagtaaactttccccatcttctcagccactcatcccttttccccggaataaatctataaatgttttatgtatttttccataaatttcatatgcatatataaacccatattcatttacatgtttatccatttttctttttaacacaactatacaaaactctcctgagatcttctttttcagctaatttatctgagcacatgccaacacacagatatacctggatctttaaggctatctgatagtccagtgataaaaatgtaccatcatttgttttctagtttcttgatgatggctaagatagtttccagtttttttcctcctacaaatgtataatgttgcaacatccttgtttgaacagtgtatatatctttgtatactctacatactgatgattttattcataaggaaaattcctggcagtttcaactgtgatagacattgctaacctgttctccaaagaggctgaaccaatttctgtttcctcaacagtgtatgactgtttcccccatctattctccagcactgaggattaagtaactttcatttttgtcagtctgacagatataaagcagaacatttctgcataaggttctacagtaatttttagattttatgaccctttggattatgcctacataatgatgatcaaatattcagaaactacattgtacctggccttaggcttggaattggatacaaaattaaatgaaaccagcttttgccctcaggttgatcccatctcctggagttggcagacaaatgaacaaataaaatgagagcaaaactgtatggttcacattgtgctagagaaatgcataagcttagctaacttttgtttgataaactctatattcattaatatcacaaatgaattcataaaataccgtatgcattatgtcccagggtgtgaggaggcttgaaattctcaaaagaaaacaacttgattagaagcaaaaagaaaaaaaaaaataatggagcttatccttagtgggggcagcagaagaagtgggaagttaggaaggggtgagtaattttagaatagtctctttggtagtttccatgttcacaaatagggtttgtttgagggagcctgtggggaaacccagctgagtttgcagctggcactgattaccgatcactcaaacccgggcagatctgtacgttggtccagatagagtgggagcaaggaaacaggaggctggctttaaaaatcagcaaccttgaagctcatagaggttggatgtaggtggcataaataggctgtttaccacagggattacaagcaggtgtgctctgaacaggcctgtggtagagtggatccatagaatggttttcaatcaatgaatgaacatcaaacatctgtctatgtattgtaaagggacctccttctcaaaaagaataggtccatgtagaaaggggtatgatcatctggtcgacccacctggggggaaccaagccttagctatatacattttctttgggcccacctgtcctagatagctcttcattcacttgagacatcttaaaagcaacacaacacaaggagcagttgagaaaatcaactgaatcagcgctgtggaatgaacctaaccattgttttacaacaaatcccctcagcagcgatatatagagccaattgcaaagcatgcagagtggaaaagggactgtgaagaccagcacaatcttagtccaccctcttacaggaggcaaagggcaggggccaggcgaggtatgtcctggttctggtcccagggcccaccctcctcctcccccattagccaagtctgttttgcccagtttgatgttacagctcttgttctaagtcaaaggaccactctctcatggcagaacagaaattcttcatgaattttcagtctcttggccagcctcctgtccaccctctcccacgtattgaatacctaccatgtgctgggtggcgctatcatgggatgtaaaggtgaacaatacatatcctttgtcttctgagagcatccagtccaatggaagaggcagatctgaaaccagcaattaccagagtgctgagtgccacagaagagatgtggtcaaatgccttgggactagagagtggaacgaagactgtttggcacaggagagataaagaacaattcagaggcaatattaagacattgaggctgggtgtggtggctcacagctataatcccagcactttgggaggccaagctgggcggatcaccttaggtcaggagttcaagaccggcctagccaacatggtgaaaccctgtctctactaaaaatacaaaaaaattagccaggcatggttgtgtgtgcctgtaatcccagttactcaggaggctgaggcaagagaatcacttgaacctgggagccggaagctgtagtgagcagagatcgcaccactgcactccagcctgggcaacaagattgaaactccatctcaaaaaaaaaaaaaaaaaaagacattgagacaatattgtctaaatgagacaaggcaagtgctgagcacggtgcctggaaagcccttaagagatgatagctattgtcattttagcacttgagctacctctcaaagaacaagaggagtttgccaggtggagagaaagaagggtactgccactcataaaacagcatgtgtgggtcgggcgtagtggttcatgcttgtaatcccagcactttgggaggccgaggcgggcggatcacgaggtcaggagatcgagaccatcctggctaacacggtgaaaccccgtctccactaaaaatacaaaaaattagccgggcgtggtggcgggcacctgtagtcccagctgctcgggaggctgaggcaggagaaaggcgtgaacccgggaggcggagcctgcagtgagctgagattgtgccactgcactccagcctgggcgacagagcgagactccgtctcaaaaacaaaacaaaacaaaaacagcgtgtgtgaaagtgaggaggttagtgtggtgtagtgaaaattgcatgggctttgtagcagatacatcttggttcaaatcttagccctgccacttcctagttgtgactttgggcgtgtcaagaggagcctccttttactaatatatccagtgggggtaatgatgcctgtttctaagactcattgcggggattaaagtcaatttatgcatagtacctggcacacagtagagtctcagcaaatggtgagtaccactggggaggagtgaatcatcagtcctgttcggtgcagctggaaaattgggtatttagtgagttgggggaggggagggaagtcaggctggccagagagaaagctaaaatgtcaaggcccagatattggacggtttaggctgagagcttgaaactggacagcataggcagtgggagccatcagatgcttccctccaagggaaatacaggatcaaacttggtttaagagtgaaaactccaccagcgttgtggatggctggttggaaggtaagcggtggaggcaaggaaaccactttgggaactgctgcattcaatattcttgtcttgacaacagctcagattagcatagcaaaggctcagttaactcctgcagtcaagtgctgtctgggcaggcagttatgggcagtggtcgagtgtgtaggcttcactgattgtcctcttttttttttttttttttccccttgagacaagatctcactctgttgcccaggctagagtgcagtgatctgtgatcgtgcagtggtgcaatgacagttcactgcagcctcaacctcctgggcttaggcgatcctcccacctcagcctcctgagttgctgggactgcaggtgggagacaccacacccagctaattttttaatgttttgagatgaagtctcactgtgttgtccaggctactctcaaactcctgggctcaagccatccttccatcttggcctcccaaagtgctgggattcaggcatgaaccactgtacctgaccccttgtaattcttgcaagaaaaaggaaaaaaaataaaaaagagcatgggcttcagtgtcaaagccaatctggatttgaatcccacccctattgcttactggacattgggcaattacttaaccctatggagcttagtttgcccttctataaaatagggattaatagtacttttctcataggcttgctgtgaagattacatgagatagtatgagtagctaaaacacatagcttagctctaggaatgcagtgagtgttcagtaaaagttgataattgtgataaaatatattactagctgggcatggtggtagctataatcctggctgcttagggaggctgaggcgggaggattgtttgaacccaggagtttgagaccagcctagggagcatactgagaccctatctcaaaaaagataaactaaaaaataaatatattatgtatatgactatagaagacttttttcatgtaactcctattaacatcctctggcgctactagtgttctaccaaaaacatcctgctttcagacttcctggagaagcagcagcactttctgctccaagaaatagtaaggagagttgccaggttctgacacagtggttcttgggtgcacatgagacccacctggggagcttttaaaaacgtcaatttctggctgcgttccagaccaattaaactagaatctgtcgaggtgggacccagagagcagtatttaaaaaaaaaaattgtgatgatttcttaaggaaaaacaaatacacaaaagtacacaaatcttaagtggatcaatttttcacaaactgaacctatctatttaacccatatcctgcttggagtgctaccagcactccagaagccccctctccaaccccgtatgtccctttccagtcactccctacaccctgaaaccacatagattagttttgcctgttgttgaattttacataaatgcaatcatatagtatgcatttttgtgtgtttgggttattttggttaacactgtttgcgagagtcatccatattgttgagtgtaattgtatattgttcattctcattgctgtacaatgtttcattgtgtgaacaaaccatattttttctccaaactacttctgggggcattttgggttgtttatactttgcgtctattagaaatagtgcaattaacattcttgtgaatgccttttagcgaatgtatacagaaattgctggccgggcgcagtggctcatgcctgtaatcccagcactttgggaggccgaggcgagcggatcacctcaggtcaggagttcgagaccagcctgaccaacatggagaaaccccttctctactaaaaatacaaaattagccgggtgtggtggcacatgcctgtaatcccagctactcaggaggctgaggcaggagaattgcttgaacccggcaggtggaggttgcagtgagccgagactgtgccattgcactccagcctgggcaacaagaacgaaacttcgtctcaaaaaaaaaaaacaaatttctgttgggtgtattcctaggaattcaattgcaggattataggacatgcccgtgtttaattttataagacattgctgaacagttttaaaaagtggttgtaccaatttatattcccactcagtgtgtaagaatttttgccaacagttggcattttctgtcttaaaaaaaaatttgagccaggtgcggtggctcacgcctgtaatcccagcattttgggaggccgaggtgggcggatcatgaggtcaggagatcgagaccatcctggctaacacagtgaaaccctgtctctactaaaaatatatatatatataaaaattagctaggcatggtggcaggcgcctgtagtcccagctactcaggaggctgaggcaggagaatggcatgaacccaggaggcggagcttgcagtgagctgagatcgcaccactgtactccagcctgggtgacagagcaagactccgtctcaaaaaaaaaaaaaaaaaaaatttggccattctgatagatttgtagtggtctttctctgtgatcgtcctgtatattcccagcatctccaagtgattccaatgccaagtttgagaacgtctttcctaacagattttgcaaaagcagagtagaactggggaaagagatgttgtaatggtgagtgcctccccatggactccctgtgatgtcccagagtttttggtagaactgacctggctatcagccagtggagggagaatgttcacatgtgtcaaacctgacagcctgcctctcattcctatgtgctttatttggagcaaatggctccaccagaagtgatctggaagctaagggggaagcactatgaagctctggaaagatgccacagcaggactttcatctctttttataatttaagacctgaatgagaagggaagatatgagaagtgactagtgggctatatacacattgtcagagaagaagagctggtctttgtgacatatttttttgccccaaaggctgcctagaccctggcacttggaaggtgctaaaaaatggtcattgaaataaacatattagaactatccctagtgagagacaccacccaaagaggtgcagaggaaggtactggtgagaatttagtggaattgatgctttgggttcttttctttgtaatttctatgttgctgctgagatttcctatctgttcttttattacaagcataatttcctttacattcttgagcaaagttataactgctttaacaatctttattatttccaacacctgggtcaccttgagattggtctccattgattgccttttctcttgagtttgagtcacattttcctgtttgtttgtttttaatttgcctagtaattttggattacatcctaaatgttgtgaatgagacctgaagagactctgaattctattcctcagaaatatatatatatattaatatatataatatatattatatttacattatatataatttataatataaatataatatatatatttttttaatcaggcaattaacttgaccaaactcaaactccaaactcagtctttcttgggtggacaacatctgaaatctttgctgaattcatttagctttagttgaactacttgaagtctgccttgtatgtacatcattcagtgagatttgggcactgtttatactcagaatttggggctactgttctgtgattcttttctgggatatttctccttattttccagctgtggttacctgaactctgtctttaaactcctcaaatagtaagagagtagttttctatccaagttttagctagtaagtacagcactgactgggcgcttcccgcaaataaaaagccattaaaaacacgaaagttatctagtgccatttctttccttcaggtgttgcctcctctccagtttctacttgcttgtagttgaacacatttagtgccttccaatcttttttttttttttttttttttctgtctagagttcgtaatagttttgtgtgggaagtttggtccagaaagagctactttgcccttactagaagcaggacctctctgatcaatagctttgttcatttagggatccttagacccaccctactttattgcctacctcatatagatggcaataaatatttgtttattggctaaataaataggatttaaattaaaaatggaagtgaattttcagagaaaattgccagaagaaaaccctgaaactagtagttacttattgttggcatcaagtatgaaacagagtgttcaggaatttgctgagtagaaggatgggtgtggtagtagagctccagacatttgagtgtagaccaaagcagttaacaaagtgaacctgagattttcacatgaggagataaattcaattgtgttagcaataccactttcgtggggtgaaactatggcttatagagaagttatcatgttcaaaggaaatacaaccggtgagagggaagcggaggtatgcttggagttctgtatacccaagaggagggaatcaaagtggaggaactttggctggagatcaaagaggggaggaacagaagtaatgctctaaaggcagaatactacagcctgcttctctgcatggtgacctggaaggtcatagatccagtactgagacttcaaaacctgcctatgggatggaaacttcacttaccaaaatgtagggcatctggaaactttctgatttattgtactaacagtttcatctctcagacaggagaggagagaggccagttgctgttgtgaatctggtttgggagttaccggatgaagtgaaagtgctcactgaggccaggcacggtggctcacacctgtaatcccagcactttgggaggccaaggctggcggatcacttgaggtcaggagttcgagaccagcctggccaacatggtgaaaccttgtctctgctaaaaatacaaaaattagctgggcagagtggcacttgcctgtagtcccagccactcaggtggctgaggcaggagaattgcttgaacctgggaggttgaggttgcagtgagccgagatagtgccactgcactccagcctgggcaacagagactttgtctcaaaaaaaaaaaagaacaaaacaaatccaaaaaacacacaaaaatgctcactgaaaaaaggagcacccatagggggttgagcctataggggtttggaaagcagattttatgaaatttaggatgagatatatttcctgcccaaggctccaaaagtgatgacagctccaacagtaagggaagttatgactttaatcagatatccttactctgcatagatttcatttattttccttcaaggactcctcttaccgtcatgcctccgtggctcatctttcctgtctgacatttttttttttatttttaaggagaggggatattaaaaatacttaactaatggcatagagactgaccaatcaaaacagatgccagactaatcagaagagatgctaaccacacacaactggaacatcagccctagttacgagttccctaacctctccgagtcccagttttctcctctctgaaatgggaacaatatctacattgcagagttggtgcagtgattcccagaaaggttacatgcaaagaacttggcaggtggaaggtatgctggacacagaagctgccatgattacctggcattctttgtttctaggttcatttcatgtatctagtttataggttctgcaatgttagcctttagtttcattaagcatgttttactctatactgacttcagcaagtatttgttctattaccagttggtctctctggttttttggccaaaatgtccccatctccctggtcacgaatactgtggattttctgaaatcttcttgaaattcatgagaaagatctgttaaagatggttatggttcctttagagattttcccagttccttcttctccttctgctttttatgggtgtagcctttggagttaggcagacctgggttcaaatgtcagttccatcccgcactggctatgcacttaattggaatctgctctctgcgttgccctctgtcttcctcttctcattcttttgtcccccagggtaggactttttccttcaagttcaattctatgcttttaatcgtccttgtttccttggaattattctctgagcttcagtgaacaaactatatgaaaagtttttaaaaattcccatcccaggctgggcatggcggccacgcctgtaatcccagcactttgtgaggcaaagatggatggaatcactggaaatcaggagttcaagaccagcctggccaacatggtgaaaccctgtctctgctacaaatacaaaaattagctgggaggctgaagcaggagaatcacttgaacccaggaggcagaggttgcagtgagccaagatcatactaacacactccagcctgggcaacagagtgggactctgtatccaaaaaaaattctataccaactacttcctaactggctaagaatatccctggctaaaggggaggagatagcttgttagggatatttgaggtttctgaaatggagagagtggtcttataaggcagcaaattgtgttccccttcctcttatgctggtaatggtgtggagcccaagatgcttcaaatggacaagacagtgatccccagacctggatgaggaagggtgtcagtggcgacagtgccttggtccttttccattcctgaatggaccctatccaattaccaacagcatgctgtctccccacattccagggccagccttgggagggggaagtaggaactagaaaaaaactgtaaaagagccgcaagtgctttagaagatcttcctggtaaaatgcaagaagatatcagaaaatccattgtattagtgatcagggagataaggggacattttggttaacaaaccagatagaccaatttgtaatagaacaagtacttgctaacgtccatatggagtaaaatagggactgccctcctctgcttgagttcctagagtctggatctagtcaccttatcagggtggagtacagttcttcctttgctccctaggatgggttattggaaacattcctatgtgaacctgagatttccttgatgcttatctaccatggatgccacagtgagttgttgctgttgtttggatgatattctgggatttgaagggcctttccactcatacctgataacttcctagatccttggcctcccaaagtgctgggattacaggcataaagtaccatgcccagccaaggattttaatcagtggatacaaaggcaactactggatgatgtagaacagaattgcgtactcagtgtgcatgcagccacttcccacctcttcagccatggcaggctttgctaattgatcacaacacacgttctccctgttatcacacatggcttcgtaatccctctcctcacagtgcaccaagtagccaccaccaacctaagtggtggcacaagagaggaaagtttggtcatgagtgttgtgctgggagagaaaggcagggattagaggccacccccagcctacccgatgtgaagggccatccccaatttaataactgtgtaacccaggagtgtgttcggtagccacaggtggcctcctttggaaaatgatccctccagctgcaaagggagtttttatctccctgtgaagggagggggtggaccacactccctcaagcctggagaaactgtttgtaatttgactcccgtttccccaagcttagctattacataagcttctttagaagacaggctgtttggtttagcaccgtgactgtgactgactaatgcgtttgtagacatcatgttagctttgtgtgtgcccctgtccttggcacccttgttcctgtcccctacggccttctccacactgctgtacttacccaaaagtgtgtgggcttccctgggttcaagttcttgcaggggaagctcagcatggaagaccagtgtgttcatgggtattcctttacctgtttgagctgtggcctcctttgaagttttcttggagctgagcctgagagagcggcttcaccctgacaggcagaaccaatccaaatcatcaatcagtacctgcttaaaatgggccttgcaagttgtgtagcctggtggttaccaaatgctgggtgcagatatgcatgatagagtgcttagtcccaatacgatgccagcccctgcaggccaggattggggctcatgggccttcatggggccattcccgtctaccacccaccatagacctctaaaggccatggagttcctggtagtggggactccagcatcatgccatggctggactttgttgaattatcactgttagacagtttatcctcatgccaggctgatcctagttgttctttttaaaaaattattcatgtatttattttttaaatgatttatttttattttttagagacagggtcttgtcctgtcactcaggctggaatggagtggtgtcatcatagctcactgcagcctcaaacccctgggctcaagtgatcctcccacctcagcctcccaagtagctgggactagaggcacacgccaccacacctggctaattttaatttatttttgtagagacggggtcttgctatgttgcccaggctgtggatcccactcttcatattaccatgcctaagcctcactctgccctccagaggcctggaacaaagccgatccttttttgttgccttttgttaacacctggtctgctcccaatatggcccagccagttcagacagaggtcagtaggtctgttattgttccactgctggacatgatgacatgattcttttcctgggaaagctcaagatgcatgagttgtttcatcactctttgttcttgttaaatgtgtggtttttgaatcctgcctcctctaccttcagcctccccaacacacacaaagtcctgctaaatggggttatagtcaatgggcttcaggggacagtgacaagtcagagatctgaatgaaggagcacagctgggagaattggagttacggagctgacctgtggggatctgagtttcacgactgatttaaaaccaggagatctgtctatgatggcaatgcccaaagtctagaaggttcatcctagcaggagtaggacagtcagtccacaaaaatcccatgggaatgagattaggggagacaacattgatttctaattcaggtatttggagcaccaagggccccagaagtctctttgctcatgagttaaagcatctttatgctggaaaaaaaaatgacgctattattcaaagaagtgtgttgtgggagggcgggggtgtacatcctttaggagagaaagtaggtcccgagtgagatcccaggagtaggaaagccagcactgtttgttttgttttcttctttccctcatgctcaatggtacaggaaacacaaggagaaaaggacccatcgccttcctccaggctgctgccaatattgtgtagagaagaatagctgaagaacatgaaaacaaatcttcacatttccttttaacagtgtgaactttgaaacactttctgactcatattttaaaatctcttaaatttgaattcaccttccttcatgttgtttttctcgaggcactaggcttgagtccaaaaatgtgtcaaccgactgctcccccagaattaagcagtcacaaagcctgggcccgcttctcccagctgagtgggcagggaaacctggctttgaccttcctacccttcctcaaagctgggcctcacctcaggcctgaagagccaagaaataaccattgtaaggggaagaggaggtatttggtaatatgcctcagcaagaggccattcattttgctacaagcagcagttgcctctggggtccctatttctgcacccctaaaaacatcattgctgtctcttaaggtgcttttggccacaggtggcaacatccaattcaactggctcaaataataaaggggcttttgttggcttggataactgaagtcctgagaccccttacttaaaggaccctgtttccctctggtgaccgccaagcattggtttcatccaaaagccagcttcctgcagggatggtggcaacaaggcttccaggagcaactgtgtgttgtgcttccagttcacagattgtgagaagagagagcttctgattgggccaactcaggacacgtgcctagcctcaaccactcactgtgctgggctcaggccgctgctgacaggctctggcccatcaggacccagcactgagtaataatgtgggaatacacagatcaccaccaaaccagtgcctctgtagttttcccagaggtatatttattcccccaaataacactcttgtaatagtcttctttcttttttgaaggtggagagtgtgaggagttctgtagtacatcctgcctactcccctgccatattttgggcgatgctattattcaaagaagtgtgttgtgggaaggcgggggtgtaccctgccatactttcttgcctttcccttaaagggtcagccctctggagctgagtctctgcttccccagatatgcactgactctgtctctccctttggggtcaacaagaggaatggagttcggactttgtcagacaagaggggctgagttaaggctctaggggaagaggtgaacacacctcagtggcctgttcctgcttccccaagggtcaagtgccttggcctcagacttcctgctggccacagtcaaactattttggttcatccacccagatgttagaaaaattaagtaccctaccctatttccccttgcttctgatttctcttctcatatcacagatacttcctggatgacctcaccctacctggcctccacagatccctgccacagatatcttgccagttctggacactctgttgacttgtgggcccatgtatcccattctctgcaggatgttccgtctggattttccgatgctgggcttgctatgtctccatggagctggttttcctccaaatgaggtcttccttggggatcccctttaagtcttgatgataaccattgctctcccaggtcctggcagtttgtgctgtgttcccatcaccctctggggctttctctggaagtgtggataggtgagcccaggtcttacaaggaggacagtctgcagcctattggagccatggctgccgtgggctgccccagcacccaggccagtgccctgtcttggggccaccccgctgctgtgtttgcagcaccatggcagttctttaattagaccaagcagggatttctcagacgggggtgggaggaggtgtgcgggtctattgggggaaactaggtcacctgaaaaccagtaatcaagagggagctgtcctcgagccccagctccaaggaacccagaggggcaaggtgggaggggctcgcggggagggccaagtcagagaaaatatgcctctggccccttttactggcccttgggagacattgttctcacctttctccagggagctgggcaactgcccttaattcctttgctgggagtagggaggacactgcagtggtgccttctgtctgcctggggcctgccaccctggggcccatggagggagcactgtgctgtgagtcaggccccaggtttagttactgctcagcctctgtatccttggagcaggtcacccactcccatgtgtctgtgccatccatccactgcacagggactgtgtctgcctttaccctgctgcctctctagccctgagcacaggcctggcatgtggtagatgccacctaaatatttgtcaaacaaaataatgagtttatatgagtgcttctcttgtaagattattgccacgaagatcaatggcaagatgggtttcccaaatatcagtcacttataagttttgccaacactaaacgccattgtcattaaatttttctttactatcaacttcctatttccaactgaaatagatttgtttaaaaaggaaattttatatcacaaccataaacaaacagtaactgtgaaaacaaatccacaggaaacaaaacaatgttattacattctatcctagatacagtggcttgcccaggccaggagctgaggcctgctttctctttgttttgaaggaggattggcatagttataaagatgttaagggtctgttagcattggactgacacttttctctggagaaagtctgaaagattaaaagagaagtgaaaagcctatataccctgctctctgtgtgggtccatgttacgtcaaggcttgttcctgtacttttgaaaatttccttggaatggattctccttccacacttagggaagcacttggctgagatgatggctggggaagttctttgaaagggataaagtgctgtaacagcgcaagtgattggtaccattactctttacttttagcatgtttttggtaccttccactcagaggtgatcagtcataataatgaagaaatgagtaactgtgttcaggatcttagggctgaaagacatctcacagaatacttaggccaatctgacacgggtggacattttatcctccagtgagtgacgaggaacttgccacctcctgagacagccattgaccacgagcacctttgtcgaattgcttgttggacagctctagaggccggtgtctgttcttggggtgcacacagctgcttccttgtacttccttgttcctccaaatgaggtcttccttgggggtcccctttaagggttgatgataaccattgctctcccagatcctggcattgggctgtgttcccatcaccctctgggtctcacgaggaggccagtctgcagcccattggaacctggctgccgtgggctgccccagcacccaggccagtgccctgtcttggggccgcctagctgctgtgttcaccctgctgtgtgttggggagactcacaggctctctttcctttcttgttcagagtggagctctggttatttggaaactgctgtctcattctgcctaagacagagcttgcaaactcaaatgacattggagctggcaaatgatgtcagttagtgagggcagtcaggcgggagtaatggggagcattggggactatggtaatggagagcgtatgtgccctatctaaaggggacagcccgactctacaccagttgatggtgatgccgtgtgagcccactgtggccccataccaagatgttctaagaaaagcagaccccccgatgttggatataaaatctccaagttgtaaatgtcagcaatgaattaaaatattttaaaacatggtgtggacttcgaccaaactaaccaacaaacacgatgtggatcacaggaggctttctggtcaggcctggcccacagccacaagtggctcatcactgccaacaagacttctctgctccttttgggctgggcagccacgtcctcttcgggccatgcttgtgcatgttggtttccagagttccctccattgtggtcagccactctgtacacctttgagcgctgcctaactccctctcagctcgtgtctgctcctttcaactggtgaaatcctacttctgcactgagattcaaatctgttgtcctgtattctggaaagccttccttgagaaccccgggcagactggctcttccactatctagcggtggtatgttgggtaaatgacttaatcactctgtgccttagtttcctcatctggaaaatgggcatgatagtacctagtactactattttattaggttactgggataattaaatggatttatgagataaattgacagacagaaggcagaggtggtccgcatccgtctctgaatcagggctcgtcacagagcaggacttcattaaatgtttactcactcgaggaagtggagtgaaataaacttgtgatctgctagctcccagagaggtctgactataataatgatattgtgtggttgtgaattgaactcttttgaactccttacttctaaaaaagcaaccaaaacatctatatctaagtggctaaaatagaaagcagtgacaatcccaaatgctgaaggggaactggatcactcacacattgctggagggtatgaaaccagcacagccattctggagaacagttgggcagttttcttttaaaagtaaacatgtgccaggcgcgggggctcacgcctgtaatctgagcactttgggaggccgaggtgggcagattacctgaggtcagcagtttgagaccagcctggccaacatggtgaaaccccgtctctacaaaaatacaaaaattagccgggcatgatggtgggtgcctgtaatctcagctacttgggaggctgaggtgggagaatcgcttgaacccaggaggcggaggttgcagtgagccgagatcacgccattgcactccagcctgggcgacagagcgagatctcaaaaaaaaaaaaaaaaaagtaaatgtgcaattaccatatgccttatcacttgtactcttgggtatttgctcctgagaaacaaaaacttatgtttacacaatctgtagatgaatggaacagccttaaactggaaacgatgcagatgttcctcaataggtaaatggttaaacaaattggggccatccataaaatggaatactacccagcaacaagaagaaacgcactattgatgcatgcagcaatgtggatgaatctcaaaggaatgatgctgggtgaaaaaagccaatcctcaaaggttacctgctatctgattctatttatataacatcttttgaaatgacaaaattctagagatggggaacagattagtaattgccaaggcagggacaggagtgggttggagggggagcctagagaaggagataggtgtggttatgaactgaggtggtagatacattgatacaattgcataaaacaaaacacatccaaataagtacatgtgaaactagggaaatcggcataagattggtgggttgtatcacgtcaggtttctggctgtgatactgtatagtagttttcaagatgctaccactgggataaactgggtgaagtgtacacagaatctctctgtactatttgttacgctccctgtgaatctacaatgatctaaaataaaaagtttaattagttgaaagtgcattgcaagtgtattcaaaacagaaatcaaaacaaaacaaacaaaaggcaaccaaaaccagctagcttgtctcccattgagccttgccattggcttatttatgctggaggtcacacccactcagaccctggaacttttgccctttgggcattgccaagccaaccccttccccattctgcctgcttactctccagtctccgagctgggagagacatgaagaacgatctggatctgacccaatctgagcacctgaggatttagcctgagccctgctcttcagcttctgtagaaagggcttttggaggggcgggtgacgcaggcgacccaggagattaacaacgcttcctgaaaccaaccaggggctaacccaatactctttgagacagtggaccacatcacacagatgtagactcctgccattctttcctgttacccaacaaccataaaccagccttgcctgctggttcacaaacatgctgcatttacatctccctaccattcctcctccaagcttgtgtctcattgtttagtgtcttaatgtttagggccagctcttttttaaaaaattattttatttttttgtagagataagggtctcgctatgttccccaggctggtctggaactcctggcctcaagctgtcgtcccaccctggactcccaaaatgttgagattgcaggcattgagccagtgcatccagccccagctctttttattccttgcacctgtaacttctgggaggtggataggacactttgcaggtggaggaacaggcttagagaggatcaagtgattgtcctaagaccctttccctctgtgtctgaaagttcatagagtccgtgctgaagaccagctggctttagactttgaaattttgttgacctcatgttatttgaaactcatgagagcaaggatgtaatttttttttaaaggtcatccaaagagagaaactttaactaagattttctatgtcccagtagttcagcagtttttaaacttttttgtcttaggatttctttagttccttaaattgagcatcccaaagagcttttgtttatgtggattatatctgtcaatatttatcataatataaatgaatattgaggaatttttaagaatagcattaattcctttaagataaaaccataaacccatgatatattataacaatataataatctataacatatttttattagactgttataaaagcataacatataatatataacattttgatgaaaaatagctatttttcaaaacaaaaaaaatttagtgagaaaagtgatgtttaaaaattttgcaaaattctttatgttgagcttagcagctggattcttgtatctacttctgcatttagtttgttgcaatgtcacttttcatatagctttgggaaccactgtatactcataagataatgagtagaaaaggttagtaatatcttagtatagttatgaaaatagttttgacctatggacttcttgaaatggtttcaggaattccctatggggttcccagaccacactttgagaagcactgcaatagtgtattgtttcttctggtctctttcttgtcctgtctgtcccatctccagtacaacttgcatcccatagtgatcagaacaaaagaggcttgagcagaagtgtcagatgttcataattctgaggccttggatgtttgtatagtctccagatttttgggggcctgcagcccccatcatgtcctgaccctccctgcaccccttctgattccagcactcagatacccaaatccttaaagtagggtgactctatacaagaaaactaaaatggcatggttcttgttaaatagctgtggctagagaggcagacaaccaagctatccaatagagctttctgcagtgatggatatattctttatctgcattgtccagtatgaagcatgtggcgattgtgcacttgaaatgtggatagtgcaaccaaggaattaaattattttactttattctaattgatttaaatttaaatagccacaggtggctactggctgctgcattaggcagcatagccagaccttgctgatacttacagggccactgtaaggatttgcacttctcttgaggagcaatggaaggaaaacctcaaaagcgtttcgaacacggggcgttgggggacgatcagatctgagttgtggagtctgacacatgtgttcatctgtgtctccctccctgccacaggccacaccatgaggccccagccccaccagaggccccgcgctgccctggcccccggtgcaccgtgctagcccccagccagggcgttggggagggcggtggccatggccagtcacgtggacctgctgacggagctgcagctgctggagaaggtgcccacgctggagcggctgcgggctgcccagaagcgccgggcccagcagctgaagaaatgggcacagtacgagcaggacttgcagcaccgcaagcgaaagcatgagcggaagcgcagcacgggcggccgccgcaagaaagtgtccttcgaggccagcgtggccctgctggaggcctcgctgaggaacgacgccgaggaaggtaggcccctctgtgccttggcggccacgcagctgccttggcctctgatcagggtttggaatccaggttctgtgcagtagacgtgtgggcaaggcaggtctgcagacccacttccaagttccagcagccccattcctcttaggaagtggacgttcctaggaacttcgaatttatcttagacttcttttttttctaagacagggtctcgctctgtctcccaggctggagtatagtggcgcgatctcagctcgctgcaacctctgccacccaggctcaagtgatccttccacctcagcttccctagtagctgggatcacaggtgtactgccaccatacccagctaattaaaacaaaaaaaatttgtagagatgggggtctcattctgttgccctggctggtctcgaattcctgagctcaagtgatctgcccgccattggtctcccaaaatgctgggattacaggcaagagccgcagcgccaggcctagactttttgtttaaacatcttcgttcatttgtttttatttatttatttatttagacatagggtcttactgtgttgcccaggctggtctcaaactcccagcttaaagggatcctcgtgcctcagcctcccaagtagctagtattataggcaggccaccttgcccagctgtatttttttgggaacaaggattccagcctttggctgaggaataccataataactttctttccctcccacaaatatttacagacaaccacaaatacttacagacaccttcttttgcattactttcctagatatagtggtgaacaagttggatctggtttctccccaccaaaagctcaatactcacaggatcttgcaattcataaagctctcctctgtgccagaccccatgcctggcaccctctgaatgctgttccgtgtattccgtgtatgtagcctttgctgcagtcataaatggtgtagagggatggactctgaagtgagactacctgaatctaaaactggctttctcagttccctacgtgagcttgacaagtagacaagtctcttccactctctatacttcgtttacacctctgtaaaatggggctaataagaaaatccactttaagggcttgctgtgaacattaagttagaaaatccctgtgaagttcctaaatatggtcccttatgctgaggaagtgattattactgttttattttattatattagtatattttatttacattatcaaaggatgtccataaagtctgaaaacagatatagacaatgctatctaggatattttcactctgtaaagtgaatgagtaaataaatataaacaaacatgtatacacattcatacaatctatgtttccagatttttttcttttttttttttctttttttttttgagacagagtctcactctgttgcccaggctgggcagagtgcagcggtgtaatctcggctcactgcaacctctgcctcccaggttccagcaattcttctgccttagcctcccgagtagctgggattacaggcgttcacctccatgccctggctatttttttaaatttttagtagggatgggatttcgccatgttggccaacctggtcttgaactcttgacctcaggtgatccacctgccttggcctcccaaaatgctgggattacaggcatgagtcactgtgcctggcctatgtttccagattttatggataccttgtacttgccatgtttaatttaattatattatttttgtgtctcatgagctagatatcatgatctgtactatgtatagtgctttaagagccatgtatgataacacccattttacagatgggggaattgaaactcagagaggttcagaaccttgaccaaggtggcagagcgggatcagaaccactggcatccgactcttgtcactgccctcatggccttataggtttgcttcctgttgtaggaatgaatggagaatccatgatgtaaccacagcccccttccctgggcttgttcagaggcggtctcgcctgctcattgtgagccaaggtctgtgcacctccctgttccccttggcgcccatggcccatccctgtataataagccttcctggctgtccctggagaggcctagccatgcttcctgggtccctgcacacaccttccagtcaatgaaagagcagagaggtgtggcacttctggcccaagagggtgctgggttttagtcaccttgctcttcaggttctagaaccctctgagaagtgtaattccacttccacctggctgcacagggctctaggaaacgagccaagaggcatccctggaaccactctgctgggagctgctccgctgaaagcctggggtgagcagcctgggtgaaaagagaggtggaatcttgggcttggggacatggccccgaggctccttcccacgtgcagtttgccaagtgatgcggcagccccatccccacgcagtgggtggcttgtcatgatgtctaatttttgttgggggcggaagttcatcagctcttctctcacccctcgttattgactgccttcttccctgacaaagccccattgcccctccctgaggggctctgtgcatgggctgcgggcttcagaccatcctcccagccccctgcccagcccctaccccttgctgatgtcttgtttcctggttagaaggagcactgggctgggagtggagggatcagtgccccgcagccctgcctgtgactttgagcagcttgtttcacctctatgggtccagtttttttgttttgctttgttttgtttttgagacgaagtctcgctctgtcgcccaggctggagtgcagtggcacaatcttggctcacggcaaactctgcctcccgggttcaagcgattctcctgcctcagcctctcaagtagctgagactacaggcatgcaccaccatacccagctaatttttgtatttttagtagagttggggtttcaccatgttggccaggctggtctcaaactcctgacctcaaagtgatccgcccaccttggcctccaaaagtgctgggattacaggtgtgagccaccgcgttcagttttttaatctgtaaaatcaggttttgaaagcttgccctcaagagggtatggcaagacttagacaaggtcctggatgtgacagttctttgaaaggttaccctgagacctgtaccagcacggtgataacgcactttattttgttttgttttttacagactttaatgtttttcagaacctaaatatgcacagatacattcttcttgtaaaaatcaatcaacgtagaagtgtacaaagtaaaaagtcctttctgtccctcccttcctccctctctccttcctcccctcctttgcttctttttgtccatccatcactactgttgttagtttgatgtttcttttccaggtatttttttcatttgcatatgcacttgtggacttaagagaaatatagagccaggtttcttttttaaaaagtttttacataagtgatggtatcctggatacattattctgcaattttcttttttttttcccatccaacggtatatcttggagacgttttcatgccagaacatgtacagtacagatctgtgccattatttttatctgctgtgtagtattccatagtatggatcaccagaattttctaactagctccttattgatgcagatttttccagtagcttcgcttttgccacagtgaatgttttatttccatgtgcaaatgtttatcgaggacagatgtgatgaaatgaaagagatggatctgaaggtattaaatttgaatgagaaaagtgctagaccccatgggctggtccccctgtctctatggggcagccaagtgaggggaaggggccagaatactgtgctctgtggcaggctcgtgggttggttttagggtccacagttgcctgggtttggatgaggggtgtgaggctgccatcagtcagcccttgacctcactgggctatgctcagcttcctggcagcactacagagcctgctgctttcagcaggctgggaacggctgcttcttgctggtggagctggtgtttgggaggctgccggggtgttagctcacagtggcgtgggagcgtggggtggcagctcccccactcccctgagctcacagcagcctctgagtcaacctcccccacctgcctggggaatgtgagttgtttccagagaaaggcaggctaggaactcactgagtttcatcctctggtcccatattgcctttagactagtgtccttgcccttggacctgcctgagccccatgctcactgctctcactgccatcaccctctgccccaggcgacgccagctccaccaagatcctcccatattccctgcgttatcttacctccacacctttgtatatgcaattccctctgtctgggacactcttcctgtgactaactcctgtaaccctcagctttgagtccggcgtgatctctggggagccatctgtgagccttttcccggccctggttaaagtagcaactcaatacgtagctgatgtttactgagagacagtgtagtgtcatggctaggagcacagaccctgcagtttgtcctccaggattcaaatcctagctctaccgtttactagctgtgcatccttgggaaagttactttacttctcagtgcctccatctccccatcggtaaaaatgaggatgatgatgtacccgcttcataacgttgttggggggttaaattaagttgataaatgttgaagtggtatggtcagagctacgtaagtggtataaattgttgttattctacactattctacatttacgtaatctattattacagcatattctgattgtcatcattgttattatttatcaggtgctttgtaccaggcagcttgccttacatatgttatctcggttaatcttcacagcaactctctgaggttagagagtcaaaccccatttttaaaaaatagcttggggttcagtttacatattataaaatttgcccactttaagtgtactattcaatgattttcagtaaatttacagaattgtgcatccatcagccacaatccagttgtaaaacattgccatcgctgagtggtgtggctaacacttgttatcccagcactttgggaggccaaggtagaggatcgcttaagcccaggagttctagaccagcctggagagcctgtctgtactgaaaaaaaaaaaaaaaaaaaaaaaaaaaagccagccgtggtggcacttgcctgtggtcccagctacttggaaggcttaggcaggaggatcgcttgaatccgggaggttaaatctgcagtgagccatgattgaaccactgcactctagcctgggtgacagagcaagaccccatctcaaaaacaaacagaaagccttttcatcatcccaaaaagaagcctcatgcccatttgcagtgactcctggttcccagacccaggcaactataatctactttctgtctgtatagatttgccttttctggacatattatttacatggaatcatacagtatatgatctttgtgattggcttctttcattcagaatactgctttcaaggttcatccttggtgtgacatcatatatcagggcttcattccttttcattgccctgtagtattccattgtatagatattccgcattttgtttatccattcaccagtaggtgaacgtttggattatttctattttggggtaggatgaagaatgctggaaggcaaatttgggtacaagtctttgtgtggatatatgttttcatttctcttgggtcattacctaggaatagaattgttgggtcatatggtaaattatgtttaactttttaagaaactgctgtactgtcttggaaaatggcttcactgtgtgaattctcatcccccattttacagatgagaaatttgaagctcagagagactaagtcacctgccaaggtctcacaggttttaagtgtcagactcaatcccaggattcaaacccagatcagtttctccgaagcccatgtatttaaccaccaggcagtcctgtacttcctgcttttgttttcactagaaaactagagaaccctcagttgctgtactgatctgtgtttgttttggccttaggcatcctggtgtttctgctggcatcttgggccctttgatttggggcccccaagataaactctttagccccagatataacttctttctagggccacaatagcccagcctcccttgaaaccattgaatgtatgttaagttgttagagacttctgtttttctctcagaatgtgtagggttttctttatggaaattctcattcaaaaaatgtttgagtgattcttctgtactctaaatttaactcttattaaatttaatgatttttctcactgtaaaagttttcaaactcttttttaagcagtggaaacttttctttaaatgagatattatgcagaaacccaatatgtaaaacaaaggaaggagctgttctgactggggtcaggtgggtggggtgctcagtcatccctgccacctgcaaccccctcccccacccccaggcacagtgctggacacctgggccttgccaccaccatcttaaaccagcagctcatctacaggaactagctcagactttcacttttggtccttttaaaaagggaagtttcttttcttctaattattaaaaaaaaaaaaaccctgttattgttacagaaacttttagaagtacagaaaaaaagaagcattaagaagaagataaaatcacccatattccccctgaacagcaacaaccattgataatattttggtattgttgtgtcaggcagcgtcctgggaggaaacaaatggtgattttatatggggtgatttgtggaaagtttgataaaggggcagtttgtaaagggtttagggaagtggtcctcaaactttttggtctcagaggccctttatattcttaaaacctgagaactcctaaaagctttggtttagctgggttctatctacccatatttactgtattcgaaatttaaacggaggcattaaatatttattcattcattaagtcagaatgataaacacattatctgttggctatctgcttctgcgtagcagatgaactcaaaatttagcagcttaaaacaataaacatatactgcctcacacaatttctgtggctcagggatccagagcagctcagctgggtggttctcgttcaggatatctcataaggttgcagtcacttcaggatttacctggggctggagaatccacttccaagatggctcactggcatggctcttggcaggaggcctcagttccctgccatgtggccctctctataggacagctcgagtgttctctcagcatggcaggtggcttttttcagagtgagtgatccaagagatagaggaatccgcaatgcctttatgaccttgtgttggaaatcatgtaccatcacttctaccatcttctattcatgagaaatgactcactaggtccagcccacactcaaggggtggggaattaagcttcatcttttgaagagagaatttgtggacatgttttaaaaccaccacatgttaacataaatatttttatgaaaaattatatttttcaaaacaaaaaaaaaagcaatgaggagagtagccttgttttatatttttgcaaatctttttaagatctggcttaatggaagacagttggagtatcttatctgcttctgccttcaatctgttgtgatatgttattttggttgaagtaaataaagaaaatcttatgtagttggaaaagggaggaaatattttaattgctttttcagatattgtggatattctttgatactacatctaaactcaacaagtagtagtttcttaaaggttagttgcagtgctgaatctgaagccatatcaatttacatcaaaatccattggtctgtctggcattttgaatggttcttttacccatgtgtacttttttttaatgtaatatattggatctgttagaaaatattggttcactgagttacacagatcttccaaatgttgacacattgctttatacaatataagaaaatgtatagtttcaataacaatcttgccatacaattattcaggtactgggaaactgtaagttcgtggtagctataaaagttttctaaaatttggatttttgcttaaaagttcaaattctatcattggtaacaaatgctgtcagttgtgagaagatccatttgccctttttaggaaaaaaaacactgcctgttaaatactcaagtctgaataaccattgtttgctagacatcctttaagtaaaactagtgctccatgagagaagagactagcttagcacacagcttaaaaaatggctcaagtaatgcagttggagacaatgattattctttttttgaacttcccattttgtcacatggaatattaaaaggacatgtactcaaggattaaggtttcataaaattaatacattttattgctttatcaaggacatttttaagggaaactggtattgatttttttcttttgattgcacatacaaaacaatgaagatggtgattgctagtacagcttggtgccactaagttaattctgttaaaacaacagtagttttacccaccattgcttttacaccatcagtgcaaatgtcaacacagtggaaaatgcaagtaatttcttagtgttactgtgaaaattattttgatgttttaataccctgaaagagtctagagaccactttgagaaccactggtttatgggggtcaacaaggaatgggacaataccctgggatagcaaaagttgggagatcttacccaccccaccccaccccctgggcctgaaggagacaaggaaatgaacctactggaacctaaggaaggcaccgtatggagagggctacctaaaggagcagtggctgccactccatgcccctgccattctggtgctttcggtgacaaacctaaccagaaagcagaatgcaaggaagcctttgatgtagtgcaagtcaactggcttcctcaggcacggagaggggaagatctagagggacagatggggcagagagtgagcccagctgtcttcagcccttcggatctacacacaaacaaggagtgagtttgtgtacatttaaaaaacaacttttagggccaaatgtggtggctcatgcctgtaatcctagagcattgggaggctgaggtgggaggatggcttgagctcaggagttcaagactgcaatgagctgtgatggtgccactatactccagcctaagtgacagaggaagactctgtccctaaaaaataaataaacaaataaataaaaatgtaaaagtaaaaacaactttaaccctaacattcacttgtgaattcagcaaaattagtcatctgctagagctgtggtatcagggagagcctgtctgaggaggtgatttgggctcagacctgaatgtggaggagtctggaggaaatgtacaaaggatgtgtgatgggaacagggttggcgtgtttgaagacaggagaaagatgggaggtggaagagtagggggaggaggtggttgagggagagcatactgaccgtagaagactagagtaggaactgtacatttgatttcgatgaaaagccactggtggttttgaaaggggaatcatgtgatgagatacagattttgaattcgggatggattttcctggttgctgagtgcagaattgactgtagcaatctattttcgcagggctgtgaggggagcagggaggctcatgagaagccctcacagtagcgtaggtgagagcctatggtggtcactgggcgatgcagaaatcaggaggtggagcccacagggcttctgtgtcaagtgacagaggagggactcagtgatggcttttgggtttttggcttgaacatctaggtggatgacagtgccacattttgagactgggaagatcggagtaggagggaggaggggatttggagagaattgagttctataggactgtccaagttgacatgtccttttaacatccacatggagatcttgaagaggcagatgaatatgtgagtctggagctcaggggagatatcagggatggttataatacttgggaagtcatcagcatgatacaagtgcagtattttcaaaaatgcaggactgtaggaggtcatctaggaagcaagggtagttggagcagagaagggatcgcagagaagggatcactagagaaagctctgggacacctcaatagctgcatgttgacccaagaagaagagaacaaaggagaccagaatcatctactcagaaggtagaaagaaaaccaggaatagtgtggcatctcagaagcctggaagaaaggactgtcagctcagtcaaatgctgttgaggggttgaatattttgtcttatctttatatactctttggaaaaagagatttctaatgatgacctcatatatcctatcatggatgttccataatttatgcagctactcccttattattgcattttgaggccattcccaatttttgctactataaattatgccgtggtgaatatcaatgtataaaagtatttggttggccgggcgctgtggctcatgcctgtaaatcctagcactttgagaggccaaggcgggaagatcacttgagcccaggagtccaagaccagcctaggcaacatagtgagaccccatatctacacgaaatttaaaaaattatccaggtgtggtgatgtgtacctgtggtcttagcaacttgcggggtggaggtgggaggaacttttgagcccaggaggtcaaggttgtaagctgtgattgtgccactgcactccagcccaggtaacagagtgagaccctgtctccaaaaaactaaataaataaaataaaaataaaaagtatttggccatagctttgattatttactaggtagattcctagatgttcattggctttgaggtctcgatataaaccactcatttgactaccagagaggttgtatcagctgtgtgtatccatccctgctatctccccacctcatcactacctgccacatcaatgctggatgatgacattgaaaacacacctttgctgatatatttgatatatggaaaatagtcctgttgtcttaatttgcataaaatcgagacagttaaggttgaatacctattcataagcttactggtcatctctctccttctttgagttgtctagtttgtttttttgttgttgttgttttgagacggagtctcactctgtccccaggctggagtgcagtggcacaatcttggctcactgcaacctccgcctcctggattcaagcaattctcctgtctcagcctcccgagtagctaagattacaggtacccaccaccacacccgggtaatttttgtatttttagtagagatggggtttcaccatgttggccaggctggtctcaaactcctgacctcaggtgatctgcctgcctcagcctcccaaagtgctgggattacatgcatgagccactgcacccggactatttgttcattttttttactagtgtgcttcttattggtttcaatgattgtgtacgtttatgtttgtgtgtgtgagaggagacagggagaaggtgagaaagggggagaatgacattggagggagagatgccaactctttgttgtcatgtatggttcatatattttctgcagtgcgtgtatgtgtttgctttaatgttttgtttatagtaattttttatgctttggagttcttattttttatattgtcaaacctaatgatacttgatttctttttttaaaatcattttattttttttatccctttaaagcagggaccagaaaactgtggcctgaagtccaaatcttcccactgtctgtttttgtaaataaagttttattggaacacagccatgcccattcatttacatattatctatggctgctttcacattacaatggcagagttgagttgtaacagcgaccatgtagcctgcaaaggttaaaatatttactttctggccctttatagaaatactttatgggctcttgcactaaaatgtttcctcatctagtgatgtatattaaacctatgttttcttctagggttttttggccttatttaaataaataggtagtatttctggacttcattttagtatagagtactaaatgaaaatctgtctatattttgtttccaaagcatcagcaattgtcccaacatcccttccttccctacaagtttgtgaggccacccttgtactctagagcctcatctgtaatgaagggtaactctccaacctgtctattctgttccagcaacctattttggtgccagttacatactgctttcatccttgtaggtttatattgtggcttaatatgtgataaaacaagtttttcctcagattactcttttttttcaaaatgttcctggttattttcagctgttcacataatatttaggactgtttggtcaagttttccctccaaacctcaaaaatagatttctccaaagctttgcagggacatggatggagctggaggccattgtccttagcaaactaacacaaggacagaaaaccaaatacagcatgttctcacttacaagtgggagctaaatgctgaaaacacatggacacatagaggggaacaacacacactgggtccctattggagggtggattgtgggaggagggaggagatcaggaaaaataactaatgggtactaggcttaatacctgggggatgaaataatctgtacagcaaactcccatgacacaagttgacctatgtaacacacctgcacttgtacccctgaacttaaaagtttttaaaaaattaaaataattaattaatttggaccaaagtgatatgtttatcatactgagtttttctaagcgggcaaatagcacatgtctctgttaagcatgtattctttcttgtcttttaggaaagctgtagggttttttgtttgtttgtttgtttttgttgttgttactgttttcgtataagtcctgtttaatgtcttaaaaggagggctttgggttttgtacattaatgttataccaagcgaatttactgaattcaccttagtcttggtttttcagtgagttatcttgggggtttctatttagaaaagaacattatttgcagatgataaggttgtctgatcattccagtgtttcagtaagcctggagatctgagtcctatccagattctatcctctctccccttctctccaggctaactacttccgttccttttcatattcttttatgacatgtggctttgagatttgtgaccatgctctactctgtctacgttcttcccaaagtctgatctggctcactctggagtgaatggaactgtcactttcctcgttctggttgcttttgcctgttagtatgacttaagtttccattagctttttgggtagctgctgttgactcatattgaatttataagaaaacaaaacccccaagtcagcttcccattaatgaagctacattttccccatcctgatttaaaaacaacaacaacaacaacaaaaaaaaaaaaacaaaaaactgtttgttgaagcataatcatcagacagaaaagggtaaaactagttgtattttcatgtgctgagcatacccatgtaactaatcagcactcagatcatgaaacagaacattaccagcaccccaaaagtcttcctggacacacggttgatttttaacattgaggtcaagcgctgcatttatcttgttgagttttgagcccaattatctacctgttcagctagttttggattcttgaatgatacgttaggacttttgtgtcaccagtgacaaaaactcaagctaacaaggttaacaaaacagtgttcacgtagtggagagttcaaagatagcacagcttcaggcacttgtggatgcatgagactaccaagaaatgtctctgagaagacgactatcagcagcttgaaatatatatcctaaatccttttggcaacctcagtaagaataatttattttcccagaagtgtcccaggctcaacaagtcccagaatggaacctcattggctatgaggtcgattcctgagtcaattgtaatggctagataagggaagcaatgctatgattggtctggttggagccatatgcccactcctggagtctgcttctcccaaacacatggactgacacttggtattatgttgtacctacccactcccccaaaaatattgggatgatatttccagaaggagggagaatggatgcttgtcaggccataattaaatatattcacctcaaatgaaatattcaccggcagtttctactccatatcattcataattgcaataaggatttgccttctagaccagaattgtgcaatagaatttttttctgatgatggaaatgtgctgtccaatacaatagctgctaaattttttattgtatttagttagaaataatgtagtcaactgtggctaagctagaggctgctgacttagaaacacagtcataggccattatccaaatccctgataaaaatgttgaatagggcccagcgtggtgctcacgcctgttaatcgcagcactttgggaggccgaggtgggcagatcacctgaggtcaggagttcgagaccagcctggccaacatggtgaaaccctgtctctactaaaaaatacaaaaaataaccaggtgtggtggtgggcacctgtagtcccaggtactcgggaggctgaggcaaaagaattgcttgaacacgggaggtggaggttgcagtgagccgagatcatgccactgcactccagcctgggcaatagaacaagactccatctcaaaaaaaaaaaaaaaattgttgaataggtcatgggcagagatgctgcctggggccacacccccggagaccttttccagattaatgtatcaaagtcaactactgggaatagttgtgcaactgaaatgaacttaactacattgttatttgcagttggtatgtgggaacagtagcaggagtctcgacaattaaaaaacaattaaaaaaaaaaaaagctggctgggcatagtggctcacgcctgtaatcccagcactttgggaggccaaggtgggtggatcaccagaggtcaggagttcgagaccagcctggccaacatggtgaaacctagtctctactaaaaatacaaaaattagctgggcatggtggtgcatgcctgtaatcccagctactcaggaggctgaggcaggagaattgcttgaatacaggaggtggaggttgcagtgagttgagattgcaccattgcactccagcctgggtgacagagtgagactccatcttaaaaaaaaaaaaaccatctttcctacaaaacttagaagacgatttctctctgagggttaaattacaacaaaatgtgatggatcagagtagcaattcatgcacagacatttatggaacatagtctggacatcatcaggctggcattggttgttcagtggtgaacaaaacaaaatgggccagaccaccttggagctcagagtctagcaaagtcattgtgaagagagcatagtattaacatgcttaacaatggatggtgttattataaagaaggccttgctgggcatggtggctcatacctgtaatcccagcactttgggaggccaagacaggaggatcacttgagaccaagagtttgaaaccagtctgggcaacatattgagactgtatctctaccaaaaacaaaaacaaaaacaaaaacaaaagccaggcatggtggtgtgggcctgtagtcctagctgcttgggaggctgaggccggagaattgcttaagcccatgtgggcaaggctgcagtaagtcacaattgtgccactgcactccagcctgggtgacagagcaaggccctgtatctcgcggggacggcggggggggaaggccttgtcaagaacagatgccagaaaaagggggctaggagatcatttatgaacaattctatttaaatatcgttcaagggagaggacactgtgagcaacaactttggtgattaccatcccattgctaaggacaatctgattatggaaaaaggggacttcaacccatcttggtgatcttggcgtaatcattaaacatgatgattatgtacaaccttctgattataatttggcgtcccagccaggtctgcctacaagcacagaatgagttgaccgtgcttaactgaatttcagacatgcaaggcaattattctcctgtgatcctggcattgtgtttttatgcagcagcctcataaacttggatagtatgagactgctcttgggagaagaaactgctgttggtaggctggtcaaccatggtcgatcaccaaggtgataccatcctagggatcttggggatatttaaccaattggaactcccttggaacctcccccaaatcaaaccacaatgacactcaaccagcatttccccagggtgctaataaggaggtgtatgagaggcttgtcaggtgctcaatggagtctagacattttctatctttgacatttctcagtgtagtgaacccattgagaagatagatgaggcattgctagcatgattgattcttgcttggcttctagggaccactgtttcctttttttttttttttttttttgcggggggtgggggtagcatggggggatagagtcttgctctgttgcccaggctggagtgcagtggcatgatctcggctcactgcaacctccgcctcccaggttcaagtgattttcctgtctccgtctcctgagtagctgggattacaggtgccaaccaccacgcccagctaatttttgtagttttagtagagacggtttcaccatgttggccaggctggtctcaaactcctgacctcaggtgatccattcccctcggtctcccaaagtgctggaattacaggcatgacccattgcgcccggccccactgtttcctttctaatcgagtgagaaaatggtcagtatttctgtcaacaaaattcatgaggctctttgtacgcacagacttcaggcctttctctcaacaatcgccaaagctggagcatcacatggaggaacactggggtttgaaaaacaggaatgttccagaatcttctcagagtattacattttccaacatgtccatcccatatttgtaccaacaaacagagctggtcccactgccctcatcctttgtctaccatgttaggctgaggaagttgcatgcagagcagaggtgaagactaagagaagaagatacaagaaacctgctgagtaggggagagggaaatggtacctctgccagttatgctggaaaagctaaatgaaacccaaatcttgatggaggtgttagggttttcagtctttcaagagaagctcaggacacaggctttttggcttaaggaccccaaatttcctgggcaccacaaaagtagtaacggcagtcctccaggtgaatcagtgtcaagagctagactgtaatcacttgccttttgttgcattacaagccactcttgaaacacttagtggattgaaacaacaacttcttatttctcaatgattctttggcttgactgggcactctttctgctggtcttccctgggcagttcttctgctggttctgcctgggctcactcatgaggctacaggtagctgctgggtcagccagtgtctggggctcagctgggatgacctggcctctctctgcctgtggtcctttatccagcatgatggtctcagggttccaagcaagtaagccccaatgcacaagtatttatccagcctttgcctgcatcgcgcttgctcatgtctcattggctaaaacggatcacgtggccaagctcagggtcagtgtgggaagagtctatacaagcgcttgggtactgaaaggcatgattcattgggggccattgttataatctaccacacattctagactttgctttgctttagatccgaattctagcaactcgatgtgataaccctgggcacatcatgttgctcgaacactgtaattggctattgatgtccctggaatgtctgagatgtatggggtggaccaaacactgcctctctctgggaaccccggactttgggttgagaatgcctagtgtttaggtggcattgactctaaaaccatgtggcattcagaattcagcactgggcaatggcgcatatgctgatttaattttattagcctattagctgcatagacacaacagtgatttatgtgattttataatattatgttgaaccttcaataattgggattaaagtctggattgatgttgtaacagaaacaggagtagaaaaataatcatcagccagatggaagaaattattagttcacaaatgcagtgtgctcagtaataaaatctttcaaaatgtggatgacataggtgcaatagaatataaagaggccttcagtggaaagcttgggaagctctgcagagatgcagtggaccttgaaggttaagaatatggagtcagacaaaactaaattttaatctctattttgtgaccttgggcaagtaacttaacctcttttggactcagattcctcatctgtaaagtggagagaatgatgcagggaagggaggggagtgggtcaccgtgcagattcatggaaataaaggatagacagtggacacggtcagtttggctgttactatcatctgccagtagcctcagttacaataagccagaggcaagattaacatctcttcctttttctttctaattcttctgctccccacattgccataactactcccattttctctatctctgtttactcaatggcggccttctatcagtcagtcacataaaagtattcttattgcagtcatttacactttagtatgaatgagtcagcacttttttgcagcaattttcattggaagccagtgggaagtgaaaggctttggccacccctcataatatatgacttaaagcctgcttgcaatagagagcccttgcagagtctctaaaagaaaaggacctgccccctgaagaacttctgagaccatagacctcatggtgcccagcttttcctggttgccatgtgtcatctctaaagacagccatgaatatctgttttggttgacttgagccatttgaatgtctaaaacccatcttaataacaaaagctctttggagggaccctaattaacttctttaaattgctttctctaaacttttggaattaatacaatctgttcccttgttattaaaaaaaaaaaacaaaaccctaggatacttcgcaaaacttcccccaagttacttggcagctaacattttgtcaaggaggcatggtggccaaccttcccctgaatgggattggtttctatatagtcattccttccggctcatgactttcttctccatttgctgcccacggacgccgaaaataacttgttttctggcaagcttgggatgagattccttatgatttaatcagatccataatgaagctctcccagctttcaggagaaaacatcctgaactgcagggctggttaagggcagggccctggtgaagaggaggagccccctgcctgagcagcacatttggagccaggagagctgcaacagggccatgccacccacccagtggggtgcccccattgtggctgagactcctggcagtgctccaaggtgtgtaccatgtaagctgtgccttcccactccctgcagcccagactaaaggcctcaaagataataggcaggacatcgcatctgtaaataccagctgcttggtccaggaagagacagtttcctacatatatatatatatatatatatatatatatatatatagagagagagagagagagagagagagagagagagagagaaggaggaggagagagaccaggacagacttgccctggctgaaaccaggattcccttgatggttccaaactgatgttaaattagaggataactccagatatgataacaagctgggggtggcaaagtaggtgggtaatcagggagcatctgagtaggtgacagagaattggataatgaagaagcaggtaaggtgatgggaagtagctggggcaagagggagtagccaggcaataaggcaaagtagctggagaatgggagagtaacttgatgatgaaggccaggcacaaagtgggagttactgcagtggggcaacagaagacagccccagacctggggtagaggctaccctgacctgttccagttgccttcattttgccacttccttaggtcttgctgctgagaagtaaactcagcctaagtctgtaccagttagctggaatctgggctgttgtaaactgttgtggtgaagctccctgggagtgaggctgaggttgtagcagtagcaggtaggtgtggtgagtttatttccttgagggaggggctctctcttctctcagcccctcaaaggatgggtgaggttgcctgccagaggtcctggcacaactcacatctgagcccccaatttccccatcatcaccttcatccttctctcaaccagatttttattggataacttaagcaccaggcattgtgctaaaaatctttctatgcatcaactcattgcatcctctcaacaactctataaaataggaaccgttagtaaccccatcttacaggtggataaactgaggcttaaaaagtctaacaacttgcccacataagaggcgtagccaggactgtctgacttcagaatctgtcctctaagccttatgccacagtcatggttacttctacatggagcatttctccttcaaaagctcacccctacccattcactatttaacagcacttaacaaggtctggtttgggagtgaaagctcaggtagggtgtcctggttgggtaaggagcctcagaaacaattcaaatgctcatggtccccacctacggtgggcacagccacctggctgcccttttccaaacccattgcccgtgaggtctgttggataaagtcacagtttagaatcagtcttccccagggtgcacccaccactggcaatcagacctcatttgcactgagacatttatagtccacagtgaatttccattatctatatagaatgagacaaagaaacagaaggctcctggctttaggaagtttcttcttctctcttctgtctgacagccatcctttccagcatgtcttgggacagatgccatgtcaaggatcatctagatacttggaaaatattgtataattccaggctttataattttttaattaaaaaaattatgtttggatcctgaagagcctaactgtattccttatttaatgaaagcaatgcaatcgcattgtcactggtgacatggtccctcatttaataagctgctggctccaagataagccatccattccaggaggttcttgattggtaaaattgttttgcactaaaaggagcttaaggttaagcactaattaatggaagggggttggattttatatagatagatcggtaggtaggtttggggacatgtcaaatacaccatctttgtctctgcagctgaaaatatatatttaaagcccacacaactccgtagatttcttaaagctccatttttggcaagtatattccagtcttggtgtgctctggttaataagcagcttctgactcagggcactcagtgactgatggttgcattgacccaagtatctctcaggacgcaactgatgtggtcaaaatcccccaggtggtttgagcccaccagtctttctcggtggacatggcttgagaacttcagttgggcactaggacactatcttatctgaggcggccagaaaaaaaattatagactgggtggcgtaaacgatagaaacgtatttccttacagttctggaagccagaaatccaagatcaaggtgccagaatggctggtttctcgtgagggctctcttcctggctttccacctcctcactgtttcctcacctggtggtggtttgggggaaaggagactctctggtgtctcttttaaggacactaatcccatcatgggggccccatcatcatgacctcatctaaaactatctcccaaaagtcccatctccaaattccatcgcactggggatagggcttcgatgtatgaatttgcggggaacacagtgtagtctatagcaggcactttctgtggctgggcaagacagctgtcttctctgatgtccctggggttctctgtggtgctggagaaactgatgggggaattctctggaatttgtgtcctgggtggacacaaaggcctcaaaagctcgaagcccattcccgtggcctggctgcattgaaggaaactttactgctgattggaagagctatggggtcttcagaccctgccagaacacagggcatatcattttgtaggggagagccctagtcttggaaaacttcctggtggaaagcaaaggaaaggaggcagaggaaaggaccaaacctgatttattgggtaaatattaataaatgaatgtacctagtggctgccatgctcttctggcaatgagattggaggaaggggatatgattcagacccataaaactctggagagggcagtgggcttgtttaccaaatccctgatgctacccagagaggtgcccaggaacttgaagcaagtagggatgtagaaggaacctgtattattagggaggtgtcctggttctctattgtcacatagaaaagctattctaaaatttagctgcttaaattatctcacatgggtcaggggttcagatggagcccagaggggaaaatttgtctctgctccacaacgtccagagcctgagctaggatgactgaaacagtcatcctgtagtcccagggcctccccatgtagcctctctacgatggtggccttggcagagtcagacttcttggatgatgtctcagagctccaagagcaaatgtcccaggatccaggaagccgccagtttcttgagaccttggaacagctaccaagccgaccccgacttcagtggaagggaccaagaccccaccttctgatggcaggagtttgatggtctccactggggctgtctttaaactgccatgggaggctacctgctgcggcattttgaagtttatctcttgctcatgtgacagcccagcacgggtattcatgcttacttcagcctgtgggtggggaacggggagtgactgctagtgcgggttccttttttttttggcggggtgggggagggtgtgtgaaatgttctgaaatcgattgtggtggtggttgcaactctgtgcaaccatcaaagagggcagctctcttcaacacaatgaccccatgcctaggcttcttccatcctatggctctgcccgctagatcagagctgtccaatagaaaaagaattcaagccacatatgtaactgtatttatttatttagagccaggttcttgctctgttgcccagactggggtgcagtggcaaaatcatggctcattgcagcctcagactcctggcctcaagctgtcttcccacctcaacctcccaagtagctaggactacaggcacatgccaccacacctggctgatttttaaattttttgtagagacagggtcttgatatgttgcccaggctggtttgaactcctggcctcaagcagtcctaccacctcagcctcccaaggtgttggggttataggcatgagccactgtgcctggctagtaattcttaaatgcactagtagctacatttttaaaaggtaaaaaaataaacagttgaaattaattttaataatatattttatttaatccaatatatccaaaatgtcatttcagcatgcaatcaatataaaacttattaatgagagattttacattctgtttttttcatatcttttacatttatttatttatttatttggagatggagtttcacccttgtcacccaggctggagtgcaatgatgcaatctaggctcactgcaacctccaccttccgagttcaagtgactctcctgcctcagtctcccaagtagctgtgattacagtgccaccatgcccagctaattttgtatttttagtagacatggggtttcaccgtgttggtcaggctggtctcaaacttctgacctcaggtgatcctcccgccttggcctcccatagtgctgggattaaaggcatgcgccaccatgcccggctaattttgtatttttagtagagacagggtttcaccatgttggtcaggctggtctcaaacttctgacctcaggtgatcctcccgcctcagcctcccaaagtgctgggattacaggtgtgagccactgtgcctggcctttttgtatgtttttgaaatctgaaattgatgcaccatatgttgattcagattagccatatttcaagtgtcatggccacacatggctcgtagtcaccacatggggcggtatagccctggatcctcagagttccctcattcaggttggaggtggagattgcaggggagggatctgcaggccagatctggaagtggcaagttcagcccgcattccactgaccagaacccagactgtggtcgcacctttgcaagggagactggaacagcatctagctttgtgcccaggaggataaggaagcaaggtctagcgaacactcagcagagtctctcccagcagccagcaattttctgtgcatctactatgagctagtcagcctggttggcaggctgtatctaggttttgagtaaggtggaagaaattttgctttatatactggtttcccttagctcatagttcatactccttaaagtggcttccagggtcttccatgctaacttgcttcccagtgctcccaggggccccctgcaggtcccaatttgcacactgttactcatgctcttcctcccactgggagtatccgtgttctcctccagtagtgcccatcttccctgattctccccattccctgggtcctcttcagtctcttatgctccccttttatgcccttcaccatatacagacatacaggcagcatgagtggagaaacatgcagttcagaagcagctgggcctggattccagccccagttctatgacacacctgctgtgtgaccctgaggaaagtcactcaacctctctgagtctcatctgtcccctctgtaaaacggaaataaccagagctacctggtgggatgttggcccccacctgtcccagtgctgcacagctgcaggccaaagcccaacttggtatttgagctggttctgacctgggcaggccctagaagaggatgagaccccttcccactgagggaggtagatttgatcttgtgatgagatgtccttgtctatgagttgcctgggagagccaagactcctgtgtccctccaaagtgatggctccacctggggggctaggctctgcctcagggtcaccatccaacttttaaaacctttgtctagaagaatctcagcatggttaccataggaccctgacctgtccgttttcaccctgggatgggacatcttcttcccccccacccttcagccagcctgcatcaatctgctgttgccacttgaggatctggatggtgggccctggcctgctgcagttcttctttttttttttttttttttttgagacgaagtcttgctctgtcgcccagactagagtgcagtggtgcaatcttggctcactgcaacctctgcctcccgggttcaagcgattctcttgcctcggcctcccgagtagctgggattacaggagcctgccaccgtgcccggctaatttttgtatttttagtagagacagggtttcaccatctcggccaggctcgtctcgaactcctcagcttatgatccacccacctcggcctcccaaagtgctgggattacaggcgtgagccaccgtgcctggcctacagttcttcttttgcttctggtctcttactggactcttgtgaggctgacaccagccctgaccaagcccagtctccttggaggagaggcccaagtccagcccacaactgtgtagggccccccagccttgttgcctcccatgcctggcttcttgccctctctctaggggcagggcatgctgggctgtcttcctgaagcacccagaaaagttatgaggaggggacagttaatgccaggtgaccagtgaccctgagccagtcctcattgctatgttcagaagagacaaaggcaatgttagcatagtgaatgttgaactgggctgggtgccgtgaaaatgatataaggcagaaactataaggcggaggatactattatacacccattttatggaagaggaagctgaggtgcagagaggttcagagacttgctcaggtctcacagctccgagtgctcaagttgaattttgactcaatatcacatgaatgcccccgacacaaccctaccacctaaaaactaaaaggaagatatgaaagcaaatgtagagagaatatagctagtagccagaggtaaagtgaagagtcccaaagactcagaaataaaatcactgtctgaccctttgtccagaaaattcctgacgtaatggatgggcctcatcatcccgagaaacccagagtcagagtcaggaataagcaggtccttgaggaaatgaggaatgggatgaagaagaatgttcaggagggagagcatggccacaaggttgactgtggcctgccctagggtggggagtgcaaaagcaagatcttggagctcttgggttccttccctgctctcctgcccactccagattccatcagttatggcctttggaggctgtctgatctctgccctgcttcctggctcacccagccactgcttgtcaccaattcagcttcctgggtgttctgatgttcgaaagagggtgtgtgaatggtggacgagaacatcctggtctatatgaaggagtgggcttcagggtcagtagatacaatggtccccctacttagttccctggtgcttggagaccatcgtggtgctgggtcatgaagcagagagaacatttgtgggctctcccagcccagaactgaagcttctgaaccatggtgactctaggaagcccaccacccaggagtcagcctgcctccctggatgcaagttgcctctggtgcttacaaaccacagcacaaaacacaaaaaatgtggaaatggggacgttcccagaaggcaacttcctggggctcagataaccctggtctgaccgcagagacctgatgcacctcgtacttcccctcctgtctgtgaagcatgaacttggctggtgtcatgcctctgtgactcaaagatccctgctgacaggtttaactccctgcatggctgagcccctgcagagcccaggaccactccactaggccaaagtgaggggtaatggaaatgaaaactttccacgtttccgtgtctgtctccccgtagcctgagcccacaccatctgcctccttttactctggcatggatgatgggaaggaccaggccctttccaggttcctgttctggctcctctgtacagcagctgtgtgatcctgggccagtcgctttgcctatctgcaccccaggtttttcatctgaacagtgacggtcacagtaacacccacctcaagggaattgcgagaattaaatgaacctgtggatgtcatcctagaacagtgactggtatatagtaggtgctcaatagaggttaattcccatcttttctgctggggggcccagatgagatgaaggttttctgtttaatgaaaacgtgcacaaaagcccagcagcgctattcctagatatattcccccaagagaaatgacataagtctacataaacacttgtctacaaatgttcatagccacatttctcacaatcaccccaaagtggaaacaacccaaatgtccatcaactgatgaggggatacatggaatgcagtctagccatacaatggaatatcattctgccataaaaagaaatgaaggactgacacgtgctataccatggatgaactttgaaaacactatgttaagtgaaagaagccagacacaaaaggccacgtgttctagaactccactggtatgaaatgtccagaatagacaaatctatagagacagaaagtagattaggagttacctatggctcggggtgtggtggggaatgaggagtgactgctaatgggtatggggtttctttttggggtgttcagatgttctaaaactgattgtggtgatgattgtacaactttgaatacaattttaaaaaactgaaatgtacatttttaataggagaattgtatggcatgtgaattatgtctcaataaagccgtttaaaaatgaaaagtcagggagaggaagagaaacttactagcacttgctagtgccactggcttaaattgcttcctaaatattcacccatttcattctcacaacaaccttttgggaggtccttttatcaccccatttttgcagttgtggaaacagaagcacagaaaaggtgaagtaacatggccagtcacacagctagttagcagacctggaatttgaactcaagcagtggtggtttagaactgaaccgccaccgtaagctgccccccactgcaaccagaggtcggacttcatgtataacagagggagtcacaggacctcattcacccagaaagaccaccggagtcccccacctctcacagagggatctgccaggacttgggtgcacagggtgtagggcctaggtaccagcagagagccaggctctgagaggcagacaagaagtgggtgtttctgggtgacactgtgggactaacatgtctctgacccagtttgagagtgcctggcccctcctggagctggagctgcagaaatcgatttgcagactgccggtttccacttaattagcatggcctccttctggctgggaaaacaccattaaatgggctgggttggcctggaatcatgccggtggcctcggccctggttctctggggctatctgtctcttgggctctgtccccttagccaggctggaattcagaatggcccgagtttctggtttggagtatgaggcaaattctacccacgtccaggcccaagtgttagatgatcctggggccccggttgagggaactggaaggagaaatagaggcttcactcttcatactctgcctccttgggcccattggtcagtgtcctggcacacagacctctgacttgcacagggcacctaccctgtgccatgtacactgctgcattctttttttttcttttttttttttgagacggagtctcactctgtcgcccaggctggagtgcagtggcgcgatctcggctcactgcgagctccgcctcccaggttcacgccattctcctgcctcagccttccgagtagctgggactacaggtgcccgccaccacggccggctaatttttttgtatttttagtagaaatggggtttcaccgtgttagccaggatggtctcgatctcctgacctttgtgatccgcctgcctcggcctcctaaagcactgggattacaggcgtgagccgccgcgcccggcctgctgcattctttagatgcgtcacctggtacaccttccactcacgtcctgcacaggtgggctccacttcacagatgaggagacagaggtgccgaggggttgtcacttactgaatgttcccatggcagtaggtggcagggccggattcctatctccgggtctcctgcttctggtgtaatcccagcggcccctgcagagcctgcctctgttttgagggcaccactcatcaccttggctttaaaaagttgaaaagtggccaggggcgatgcctcacacctgtaattccagcactttgagaggccgagttgggcggatcatgaggtcaggagttcgagaccagcctggccaacatggtgaaaccctgtctctactaaaaatacaaaaattagccagacatggtggcgtgtgccagtaatcccagctactcaggaggctggggcaggagaattgcttgaaccctggaaggagaggttgcagtaaggtgagatcatgcccctgcactccagcctgggcgacagagtgagactcttgtctcggagaaaaaaaaaattaaaaataaataaataaataataaaaattcgagaggtttgatttctgcttctggtttcagaggaaggaaaatcacttaggcaatgggcccctggggaacagaatagctcctaaatcccgggtgtgctgtcctctgtgggctgagtgtctgtgcagcgggaagaaggggcacctctgggttctaccccagacttgctgcatgaccttcagcaactgacttgatttctctgagtctctttccctcatctgtagaatggggcacagtaacagcctcctttgcaatgtggatgacacagaatgccccggaaggtgcgttgacacatggtcagcgtcccgtagcagctgcctgttatctcgccagcactcttgtggctagcccttcagaaacgaacccaaagaaggcctgcttgctttttctcacaccatggatgtctggggtgtgaggcaaggcacatctttttcccatggaggggatacagcccgccatgcaggagatggcctgggatggagggtgggtctcctgggcctggagctcagcctctgtctggtgatgtcaggaatctgcactgtggagcagaggcaccctgcagtgtgcaaagtactggtgttttcttttaaattgaggtaaaactcacaaaacacaaaattaaccatttaaaagtgtacaatttagtggcatttaagtaccttcacaaagctgtacagtcatcacctctgcttagttccagaacattttcattgtcccaaaaggaaaccctggactcattagcagtcactccccagtttcctcttccccctagcccctggcagccgctaatctactttctgtctctatggatttatctgttctggatatttcatataatatgtgacttttcgtgtctggcttctttcacttggcgtaatgtttttcgggttcatccacgctgtagcatgtgtcagtacattattccttttacatctggatcatgttacattgtgtggatagaccccctgtcccccgccaaccacacacacccaggctggagtcaccctaaggtccacctctgcagtgatggttaaagcgatgtccccaaagggcactgtggtcttggctccttgatctcaccagccattcatgtccaaacatcagcctggtgctgatggggacgaggtggggagtgattctgggggatggggatagttaaagatccaccagggacagatgagcttcctgtgtggtccaactcaggagtcaccagggtccatggttcagatgctgggatctggagcgagaccatctgggctcaaatcctagctctgttgcctattgggtgaacttgggcaaaccattcaatctctctgtgcctcagtttttcttttggttaaatagaataataatacactacctacttaaaagggttgtaccagagctaaatgaagccttgctttagcacagtgcctggcacagaggaatatttccaaaatatgttagttgtccaaaatgtgttagcatttccaaaatgtgttagctgtcagctcttgtgattctttgattcttttttttccccccgagatggagtcttgctctgttgcccaggctggagtgccatggtgtgaacttggctcactgcaacctccgcctcctgggttcaagcaattctcctacctcagcctcccgagtagctgggattacaggcgcccgccaccacgcccagctaatttttgtatttttagtagagacggggtttcatcatgttggccaggctggcctcaaactcccgacctcaggtgatccgcccatcttggcctccctaagtgccaggattacaggtgtgagccaccacacctggccgtgattctttgattctatcagttggtgtttccccctaaaattgcagtcctgtgagtgtgctgaggccgtgcctgggcactatgcaccctcatagcatgggttgccttttcttactgctcctcccctgggctgttttccatctatttcagggctttcttgttactgtgcatcactgtgagctccacagagcaaaggctcactctggtttgctcagcacagtgtacacgccgggcacagtccctctgaacaactgcatgcccacaccactcctgcgtttcacctcaggaccccatggcccacccctgtgagctaagctcatgcctttttactttgagataattatagatttacatgcagttaaaaaaaatacagagagatcccttctgttctacacccagtttacccaaatggtaagttttttttttttttggagacagggtctcactctgtcacccaggctggagtgcagtggcgtgatctcagctcactgcaatctctgtctcctgggttcaagtgattcttctgcctcagcctcctgagtagctgggattacaggcacatgccacctcgcctggctagtttttgtttttagtacagacggggtttcactatgttggtcaggctggtcttgaactcctggcctcaagtgatcctcccgcctcagcctcccaaatggtaacattttgcaaaactaatatatgttatcacaaccagtaaattgacattgatacggttcaccaattggatccagattttgccagttttatatgcattcatttgtgtatggatgtgtgtgtttggctctgtgaaatctttgatggcaggagcagatttgtgtgaccagcactgcagtcaagaggcagaattatgaaatactggttacatgataaaattataatattttggacatatggattaggtaaaatatatcattaaaatatcacctgtttttattttttaaatgttgttaacaaaacatttcaaatcacatatgtggcctatgttatatttctctaggacactgccatcagtccaaaaagttcccctgtgtcccttcccagtcaatcccctacgctcttccaggcagctattgttctgatggtttttttccccactaaaggctatttttttcctttttgtcttttttttgaggtgatatgcacataaaaaattagccattttatttttttttatttatttatttttgagacagtcttgacgtgtcacccaggctgaatgcgggtggcacgatcttggctcactgcaacctccacctcctgggttcaagtgattctcgtgcctcagcctcccgagtagctggaattacaggcgtgcaccaccatgcccagctaatttttgtatttttagtagagatggaatctcaccatgttggtcaaactggtctcgaactcctgacctcaggtgatccacccacctcagcctcccaaagtgttgggattacaggcgtgagccaccgcgcctggcctatttttaactttttggagaactgccaaactgttttccacagtagctacgcaccattttatatcctcaccagcagtgtacaagggttccagtttctccacatgcttatcaacacttgttattgtctgtttttaaagaaattatagtcattttagtgggtgtgaagtatattgttagtttgctttttctggaaagtcatgcaagtggaatcacatagtatggaccctgtgtgagccttcatttgctcaacttatatgcgaagattttttagatgtgtggtttgagggcctggaaagtcatgtcctggcctatggaatatattaaaggggaagataggattccttaaggcaaaagtggcagttcattaaccccctcccctgcaaatccctgccccacccccatcccgctgccacataaagatggacctgtctgcctgccttcactgcagagcaaaaattttatttatttatttttttttttttttaagacacggtctctctctgtcgcccaggctggaacacagtgacgcgatcccagctcactgcaacctccacctcctgggttcaagcaattctccttcctcagcctcctgagtagctgggattacaggtgcccaccaacatgcctgactaatttttgtatttttagtagagatggggtctcaccatgttggccaggctggtcttgaattcctgacctcaagtgattcacctcaagtgatccacccgccttggcctcccaaagtgctgggattacaggtgtgagcaaccacgcccggcctgcagagcaaaaatttattgagcacctgtggtgtgccaggactcatttataagtaaatagaaaaggtccctgtccttgtagggtttataaactatagggggaaactacaagtccacatacacataacctaccatttaaaagtctgactaaatgctgtgaaggagtaagcaaggtgctttgatagggaacagagggacagtgtgtgtataggaaggccagtcaggtgggtccctctgaggaggtgacacttaagagacctgaaggatgagaactgagccagccatgcagaaggatggggaggctgggctagaggagagtgttctaggcagaacaaaatagcacaagcaggggccctggggcagtgaaagcctctggtggttcagtgcaaagttaggaaggtgtgaaacagtgggaagggaagggacagggatgctcctgctggctgatggcccatactgtaggggccacaactttgtcttagctgcaagcaggaccggagacatgaagggccagactctgggccaatttccttgctgcgttctcagctccaagaggcagctcggctgggatattgtggctcattctagtgtcttgcagcctctcaaactggagggctggagggttggggcgtggttagtggcagctgtgacggagacttatcaggaagcaggcatgtaattcctgcagtgattcacacccagtccccagtttactgcagtcctgcagtgattcacacctgggccccagtttaccgcagctgcacctttaaacagggctcggatgcctgcatctccctgacccgtgtgtaccctcatcatcccaggacctcggaggtgtgggtgaggcagcacatagctcagcctggtgccctcctctcactagagagcttgaccctaaagccgcaagctcaagcccacgccctggccaacctcctggagctttgagaacaaggtgtcctgtacacagagtcctggccccagtacctgagcgcacatgaaccccgtatgcaagaagaaaactgaccccagccccatgttacataagaacatctttggaatttggctccttttgaaatgaaatgggaaacctgcactcaaacaagcaggtatggggaattcaataggaggcaaatgccctcagggtcacctctgggccagtatgcattctgaggattggtttattcattcagcaaacattgtggacacctgctttgtgccaagcttcatggagggatacaagaacagatgttcaatcaatgtctgtgggaagaaggagagagaagggggatgaaagggaaggattgagaaggaggagtgtagggaggtagagagtaaggaagagaggaacgaagggagggagggagggagggaaggaaggagggagggaaggaaggaaggagggaggcaaagaaaggggaagggagggagggagggaaggaaggagggagggagggaaagaaaggggaaggaacagagggagggacggagggaagataaatgggcagagataccctcacagagctcatcgtcatgtgactgtgggtgcaggtgtgcccatggtaatgtaactaagtatttacaatctagctcagctctgatcaatggaaaaataatgtaagccacatatgtaattttaaatgttctaatagttccagtaaagcaggcaaggaacaggtgaaattaatttgaataattatttaactcaacattatttcaatatgtatttagtataaaaatattaatgggtatgttacatatctttttcacactaaatcttcaaggtcacccctagcacgtctcaatctggattatgcacatttcaagtgctccccagccctggacaccgtggagggtggcaggcactctgactgaggtgcacagagcctgctgagggcacttaagtcagagtcaaggaagacttcaccgggtggtgccttcagtcatttaatcatttgctcacttactgttcacctaatgtttattgaatgcctcctgcactgggtgtgacggctgggcagagactctgcttggaggaaggagggaagggcattccagactagggaagcagattgcaagctctgagagggcagactggcgtctgtctggttcactgctgtagccctgcacctggtgcagagttggtgcctggcgaacatttgcggagcgggaaaggagggagagaggagttgggcatttctagagcgcaggaggcagagaagactggttagagaggaagctggagacaccattctcaaacttgacagtgcactggaatcactggcagggtttgttaaagcgtagattgttagacacccccctcctgcagggttcctgatccagcagggctggggtagggccaccggatttgcattgccagcaaattcccaggtgctgctgctgctgctggtccagggatcactgagaaccactgggctagaccacgaaccctgtgaaggcagagaggagccaggagaggtttctgagaaggagagaggggagcacttaggtttgtgatttagaaaactgtgggtgtgcggcacggtggcgcatgcccgtagtcccagctactcggtaggctgaagcaggaggatcacttgggtctgggagatctgggctgtagtgcgctatgctgatcgggtgtcggcactaagtttggcattaatatggtgacctcccgggagcggaggaccatcagggtgcctaaggagggatgaagtggcccaggtcggaaacagagcaggtcaaaactcccctgctgatcagaaaactgtgcatggctgctgaggacaggggtttccacctccgtcccacctctcctgccagggcagtggcacccttagctcaggagggtgcgtcaggacccagttccatcctcacacggtggggaagcctgggctgtgctcccagaacaagaaacagacctgggtgatgagtgacaaatgtggacggttctctgcactgtgggtggaaatagaaacccttagtcagctgtggggttcagcaaagaatttccctggttaacggaaacttgactggctgtgggtgagggggaggttgggttctgagacgtctgggaggcctgggctcttcggttctcgtggtgcccagctcagcgtgatgccttcaggtttgagaccacttcctcctgttgagcctcttctctgggggcactcattatgtatgctgcgtaacaaatcaccccaaaaggtgttaagtgaaagtaacaacagatgtctgtgttctcacagtttctgtgagtcaggaacccggggtcgctgggtggtttgggctcagggtctctcaggaggctgtcgtcaatatgtgggccaaggcctgactgggttaggggatctgattctaagatggcgctcacacgctgttggcaggaggcctcactccctcactggtggtcttttcacaggactgctaagtccacactatgacagctggctttcccagaacaggtgatccaaggggcaagacagaagctgaaacatcttttttttgtttttttttttttgagatggagtctcactctgttgcccaggctggcgtgatctcagctcactgcaacctctgcctcctgggttcaaccgattctcctacctcagcctcccaggtagctgggattacaggcatgtgccaccacactcggctaatttttgtatttttagtagagacagggtttcaccatgttggccaggatggtctcaaactcctaacctcaggttatctgcccgcctcggcctcccaaagttctgggattacaggcatgagccaccgtgcctggccagctgaaacatcttttatgacccagactcacaaggcacactccatcctattggtgacacattagccctgttcactgggggagggaactggacaagaaggtgaatcctaggaggctggggtacttgggtggcatcttggagactgaccacaatgcccaaactgccctttggccttatcttgtagtcagtccacagatctccaaagataactgtatctggtgctgctatttgttgtcttggagcttgaagactgggccctacattcctgaggggtgcctgctggagccaggaggtggggtaggggagagccagctagtagctaaacactttactcattccagacactatggtcagcactttataatctaattctcagacaaccttatgagattatagtccccattctacagatggggaaactgaggctcagatagaggagatgacacatctgagatcaaaccactgggaaatggtggggtctgaattctgaaccactacacgtgtgtcttcataccaggtgcaatgcttaggtagactgcatattccccaacagtgtgctttgatggcttctctccagggtggaagtggttggagcaaaggtcagactggccctttcatcccttgggctcagagcctggcactaggcatgctggcagaagaggaaacaggaaggctttgggctgcatgcagatccccaactcttaaaacctggggtcaagtttggctctctcatacattctcatggtggagcaagcatgggtcaagtgtgggggtattggagcctcttaccagctgagtagattggggcaagttaattaaactcactgtgcctcagtatccccaactgtaaaataggagctcattagagcctgcctcacatttgccttgggctgttgtaagcattaaatgagatcatttcctacacatgctagactcagggctgggcaacagcaagtgctcagtaaacatgagctcttcttatcgcaggcttgttagatgctgatatgcatctgctgtctgttcccacatctggctgagctgtgaggatacgagggttgaagaccatggcatttttgtctattgctgggagcatcagcaaatgatccatcctgcaggtccgagagctcaggacattttcagcaaatggctcccaagtcccatacatcactctacctacatcctgtcctggtcctctctgagccaggaacagagggttccagaagccctggaaaacttgcagcttgctcccctccgggcccagccagctactctctagctgttcctgtctgataagagagtggatttttccatttcctgcagcagaaatgctcctgtttcctctctgcccacccagctgccctggtttctgctgctgcacgggcagaagatgggtatctggaagtcacaggagattgtgcagcatgcagggagagtagcaggacagggccccccaggcaggtggggctgcaaggcagtcagcataccttgcaggagccagacttctctgttttgttttgacatgggaaccgagtctgtatcagaaatgacaaaatcaaacacccgcaaacaaaaccccccagcgaagcaaacaggaagcagggtctggataaaaataccatcctttttgcagctgcagcctccaccatgcaggtttcagaaggtcacgctcttgacaggaaatgtggctgctttcagaggggagaggtggctgagttggggccgggggtagagacagtggggacagccagaagcaacagcaggctctcgggggaggttcgtgcacctttcacttcttgacaggtgaaggaactgggcccgatctgtctgttcccttcctggccacgatcccagggttcaccttggacttatatttgtttcttcctctcctaccagggaccaggagacttttattgtgagggtgaaatgagactgtggttttgaactttttttttttttttttttttgagatggagtttcgctcttgttgcccaggctggagtgcaatggtgggatcttaactcactgcaactccgcctcccgggttcgggcgattctcctgcttcagcctcccaagtagctgggattacaggtgcctaccaccatgcccagctaaatttttgtatttttggtagagacaggtttcaccatgttggccaggctggtctcgaactcctgacctcaggtgatctgcccgccttggcctcccaaagtgcttggattacaagcatgagccaccactctcagccattgaacatattttgttagctgaaaagcattaccctgaggatcagcaaagtttttctgcaaagggctagataagaaatattttcggctgtgtggccatatggtctctgtctaactcctcagctgtgctgctggagcctcaaaacagccataggcaatgcataacaagggagcgtgtgttccaattagtttttggacactgatatgccactttcatgtaatgttcatgtattgccaaatattactcttctttgatttttttcaaccattaaaaaaaaaatagaagccattctcagcttgcaagcagtataaaattaagccagatttggtttgtagaccacagtgtgccaacccctgcactctccaaacaaaatggtttgtattattgttgctatttaacttcctactcaatacaggaatcccagctttagcacttccttcatggggtcagccaggttgagactttgtttctgcactagctactttgagcagaaatagagttcttaccacttggctatcattctgcggaaggtttttgttttttagtgaaattgagaagttctgattataaaggtagtacatatggattttaaaatgcttgggaaatactggcaaacacaaaataaaaatccctgataaatcatagctactgtattttttttccaatgaaaagtgtgtggatgtatggaaagcatttttttcctttccagttgagattccattgaatgtaaagttttgactctttgtttttccattctatgttatatatcaagcattttcccatgtcattagaaattcctcaaagataccagctgcagaatattccattatatggatgtttcataatttaccaaatcaacctccaattgtttaggcatttgggttgcttccaggatttctcacttataaacaatatgcatataaacaatgctgctgtgaacatccttgttcgtaaatctttgtctgccctctgatcttttctttagggagaatgtgtgctgaaaattcctaggaaaactgtgcttctgacttatatactaacttttttttttttttgagttggagtctcgctcttgttgcccacgctggagtgcaatggtgcgacctcggcccactgcaacctccacctcccaggttcaagcaattctccacctcagcctcctgagtagctgggattacaggcacccaccaccacgcccggctaattttttttgtatttttagtagagatggggtttcaccatgttggccaggctgatctcgaaatcctgacgtcaggtgatccatccgcctcgggctcccaaagtgctgggattacaggtgtgagtcaccacacccagcctatactaaccatttttgctttactgaatttgactttgctgattatgcagttcataaggtttcctcactgataatgacttcattctcccctcctgcaccgctagccccaggcgaccactgatctgctttctgtttataatttcattttgaagtatctcatttttgatcagcctaaagttgattacctccttatttgctcagaattccattcttcataatagtaatgctgccacctccactttctttgtgtttgtgtttgcctgttttatatttgaacattcctttaattttagtctccgttattttgtttggaatatatctcttgtaagcagcacacagttgtttttttttttttttttttttttttttggcaaccaaatcattgctgctttatgggaaggataaatgattcaatttactcatctggtacatgtttggatgtcggtcatcttgcttcgtgatttgtggcatttatttcttttattatttctttcattttgtgactttaatgaatactgtgttgatttgcatttatcttttccatcgataatatggaagatacaagtagtgacttcaatttcttatgtggttacctttaaaattttcagaaatcttgttttatttccccaggcagacacttgttcatgtcctatgtaatacagggctgaggcagagtagcatctttaggaaagaccaaaattgaaagccaaggcagagacaggggaggtagttttgggacagcagaacaggaccagggaaatcagagggaagcttcagagtggacaggtgtgagctgaaggaacttcccccttcatacacagcttgttgccttttcctaaacattgataggaatggattttattcttggctatatttgagtgagggtcccttgtaattagtcatgcctgaaataccagttatgtatggaatcaaccagactagaatttgagtctcagtgcttactagctaaataatcttgggaaaatcatataagttatctgtcaaatggtctaataatagcacctaagtcatgtggttgttgtggggattgaggcatcccagggatctgggataatacatgtaacatcctggtacagtgccttatacttggaaaatagtcaatgaatgttagatgctattatgatggctgtgaagctattacagtgtttatatgcatgtatctcctacctgcagggctggaaatatttttatctattacttgcctggagatataaagtaaatggactatttttaaaaattcaggattgatagctggaaggagaagtgaggtgagagatgggttttagagagcaagagcgagtcagaaagaggcattcagggcatctggggagaggggaattgggataagagcagataccttggagagctcccggacggccagtgcgtgtttaggcgggccaggctctgcggagcggaagggagatcaggtccctaggtctgcagtgaagctgtaaggagaggtgctgggagaattctggaggtagaatcagtaaagaacaggggcctggtgcagcgggggtctgatgtatttatgaatagaatgaggaagttccaagttcgtgtttctggataagggggacccttgccttcagtctctgagattaagtacagtgaggggtaagagaaggggaaggaagggagaagaagagagagggaagggtccaaggcacacagtctttgcagctttggtggagaaatcttacaggcccatatcatcttcacggtagctgagttaaatgcagttctccctccctttgaggaaatcgaatacacaaatgtcccctcacacattaggaagtgattccccacctcaccccaacctccatgtgtcagaaagactatacatattgaaaaagattaactgcaggcctactttgtacatcagttttctgggtatctttagttttttattcttagaatttaaaaaaatatttttaatttgttcattcagtcaacaaatatttgttgagtgctttctctaggagctgcatgccccacataagaagacagacacgagttgcccgcatagagcttatatcctaaagggtgtgctgtcacttttcctgcatacacccaatgccagatgtaagttacatgtgcagaggcatctgggtagctgatgtgaatctctgtcaaccccttctgtctagcagagacatatgtcctgggcacagaggttctagaagggagcaggtttatagctacgtgtctggggtccccttggccatcttgtcctggtggtgctaagggtgtcagagatgctaggagaggaactggcctctttgttcaagccaaagggtgaagattctctctgacaaggaaaagtctgtggcccagcctgggaatgctcttgtccaaaggaagaagcatagagtagctcaagaacagatgttctggctggttctgaggcttgggtagaggccaggtaagctccattcacttctgcggtcatcagaaattgactgggggcctgaactacatcacaggagcagcacggtagccaaaagatggtcctactcaccctatccctccagaactttagtgtcgtaaagacacagacaaatccatacataactataaaatagtgttaagtctttttggagtttgggaggcacagcagtcatatgagaagggtgcctggcccagcctgggagacctgcaagaggctttgcagaataaatgacattgaagctgggacttggaatctaagtaagaattaaccaggtgaagtgaagacagagaaagacaggcagggctgggtgtggtggctcacgcttgtaatcccagccctttgggaggctgaggcaggaggatcacttgagctgaggagttcgagaccagcctggacaacatggcaaaatgccatctctacaaaaatacaaaaaaaattagctgggcatggtggtgcgcacctgtactcccagctacttaggaggctgaggtgggaggattgcttgagccctggaggttgaggctgcagtgagcttgatcacaccactgtactccagcctgggtgagagagggaccttgtctcaaaaagaaaaaaatactattccattgtatggaattttgtttatctattcattagttgatggaaatttgggtattactttagagatatcgcgactaatgctataaaaacattcatatgcaaagttctgtgtggacatatatgttcattcctcttaaatatatacctaggagtagaattgctgggtcagatggtaatgctgtttaactttttaaggacctgtcagtctgttttccacagtgctgtgccatcttacgttcccaccagcagggcccgagggctctgatttccacgcgtcttcacacggttgtccaacccctcctcttcttgaatgggccaagagtgatactttctatctggggaagagcaaggggctggctcctgggacctgaggcttggtcctggggatgtgactttgagggaagcccgtgtctttctggtccaccagggtgagtcatcacccaggatcccgggggagctgcctggcagaggggcgggctgcaccagccactgcagaaaccaccatgcaacttgactgagtctccaccctcagctccaggcagccgggcttccctgggagcagctatttctggctatttctgctccagggaggagcagtggtgggtggaaaggtttcaattgctcagtggggtgatttttggaagcgcagtgccttgggggcacaggacagctttgacttgggaggagagcagaggggctgctctgagagtgctggccctttggcgttatcagagcagagggctgggcacacagcagtcctgacagcaccttgaagagggggaaataagtcagtgcggactgggctgttcatgcaggaggtgcaacccagtgggcgggatgtggcgacatcaggcaggccaccagggtgcttggaagcaggggcaggctggggtctacctacaatggagatgcagcagggagaccgacagaggtggcgctggacctcaggctcagtgttcacttctgtgcctcagtgacttcatttgcaaatatagtaaccacaaaggctgcagcaatgcctgttggcaactgtcttctctatcacatgatgttctggaacactgacctttattggcaatgttcttgacctttctcttagctttttgccatccctgtgggctctcttcatgataacatctgtgtccatcctgttcttctctccgctgtatatgcttccttccctgggtccttgtttggtaccattttagcaaagtggttaagggttcactcttcggagctggctgggcctgggtgaaaatcccagctctaccattcccagccaggtgtctttgggcaaatcatttcatgtatgcaaatctgagcctcagttttcccatctgtaaactggagcaataatcgcagggagctatttaataacagcaggttacttatcctcgtaactggattatgaggactaattgacttgatggatatgaagggcttaacacaatgcctggcacacagttagtgctgggctgtagaaagagcaagggcacagggcagagagaatgaggagtgggatcctggacagagggacatgttgagtcccctgtatccagcctgcagagggggacagtgttgggtggggctgaaggactgctgtggtcagcctccaggtcaggtggtgttgatgagggaggctcaaggaagggtgtctgctcactcatttttttttaagtttgttgttgttgttgttgttcttgttcttgttttaagagacagcatcctgctctgtcatccaggctggagtgcagtgatacaatcacagctcactgcagcctcgaactcctggccttaagtgatcctacggcctcagcctcccaaagcattgggattacgggtgtgagccactacatctggcctcactcgattttgtacaaaagtcacaatcattgctttttattcctgagtcatactcctgttgtgccccatgtctgtgggactacactgacaaatagtttcatgccctcaggaacaagtagctccatgggtaacaaagtaagtgctgctgtaaaggacaaaagcagaaatgcagggtagtgtggagagaatagatggggaagctcaatggagattagggcaatcagggaaggcctcccagaggaggtgacattttggctaaaacctaaaggatgaagaagagtttgccagcccaagaatgggaagaaagaaggctccgggcataggaaacagtgtgtgcaaaggcctggaggatcagagctcggtttttgttttgttttgttttaggaaatgagaggccagtgtggctgaaccagtgagggattcagggagggatttccaggtaaggcaggtgtggagcaggcagggactagatcatgcaatgccttggaggcagtgggaggatgaggcctcattgctgggcactgggcaggaaaggaaggaagagagataggagggcaggccttgtgagtgaacctgaccctgcaagtcacatggcgaggtggcagcagctcagccccagggcaccccccggggagatgcagcttgcccaaggtccacctccactgggcagacacctctgcctggctgtctccgtttccccagaggaggagcaggagccacgcctatggtcgcatgttgctaaccatctcgaggtcaggaagatgctctgtgagacggagtgggtcagatgccaaagaaaacacaagcttgtcagcggtgatgtctccctgcaaaggcagccgccaccagcttcctgccgagatgggccggctcagcctcacttgctacagctggagatggagaggaccagatggccctgtttggcccagattccagccagattgccagggaggtgtaggcggagcagcggggtcggcgccaggagcagggatacgtgagtgaggagggcgggagccacctctttgccatctcagtagggccctgcctgtgtagggggtggcggggcaccgactgtggccttacagtggtctgtgaaccagcatatgctcagagctccctgcagggagactgcctctgtcttttaccaccagctctaaagctcttgagaggtgcaagatgttgatggttgtattcccagcatccagcacagggtggcacacaagcaagagctcactggttgatttttgtttttatttttaaaataaatgctaacagtagccagggccttgtcttccttaaccccacagcaatgccatgagggagcactgttgtgatccccattttgcagatgaggacatggaagcagagaaggggaataacttgcctagagccgcagctaagcaaatgcatgagaataaatgggtcactctgacaaactgatggcagagcctgggacttggggctttgtgggcaagaagctgccctgagtgtgggcaactgagagaaggcgtggacactcctggccgaagggaataagcgtgcctttctcgtctttgtgctccctgagctccaggcaacaccttagacccaagccagcttcctccattgctccaggtgctccagagagcaagagatgagccgggagaggtagggagacaggacccctggcgtggctgagcaggctgcacactgcgtaattccagggcactgtattcacacagactatgatgagaacagtgcaaggtactgttatgcaagcgtatttgcatattgccttggaattatgcaaggcagtagctctgtaggcggaaccacaccatacaggactttgaagaccaggggtctgcaaaccttttctgcaaagggccagatagtaaatatcgtaggccacgtgagccatacagtctctgttgtacctactcaattctgctgttggagggtgaaagcagtcataggtgatatgtaaatgaatgagtgtggatgtgttccaataaaactttatttgcagaaacaggctgcctgccagatttggctcacaggccatagtttgtcagtcccaatgaaggtcatggaaggattttgaacttcatcccaagggcactgttggggctggacgtggttgtgcgtgcgcctggagtctcaactactcagaaggctgaggtgggaggattgcttgagtgcaagagtttgagtccagcctgggcaacatagtgaggccctgtctcttaaaaaaagaaggcggcggacaggcacagcggctcacacctgtaatcccaggattttggggggctgaggcaggcagatcacgaggtcaggagattaagaccatcctggctaacatggtgaaaccccgtctctactaaaaatacaaaaaattagctgagcatggtggcacatgactgtagtcccaggtacttgggaggctgaggcagaagagccgagatcgcaccactgcactacagcctgggcaacagagctaaactctgtctcaaaaaaaaaaaaaaaaaaaaaaagaagaagaagaagactgggcgtggtgactcatgccttaaatcccagcactttgagaggctgagatgggaggattgcttgaggccaagagtttgagaccagcctggtcaacatagtgagacccccatccctatattaaaaaaataataataataaaagaagaagaagaagaaaagagcagaatggagccacgagaaggttttaagcagggagtcagggagccaggtttacattttaaatggccctgaaagagctaatccctcagcagggcaacaccatttcttctgtcccatttgtgcatccttgaactcttctatcttcaagtagaggcttggcctgggattgcagggcgtctgatacatagagagttccagaagcaaaggtcactgctgtccatttcccattaccctcgtccccaaatcagctgtcagcacaggtctcgacgtggcagaaatccagaaatgctgttcctattcctggccttagggcagagtagaatggtccactggccaccagcctgggctttgaaatcagagaggcccggtgccaaatccctgctccttaatttggccacatgtgactaagctacatcttcctggccctctgtctcttcttctgcataagaggaataattataggtgtgaactcataaaataaagtggttctgaattgaccgaggtgcaaataaaaggcttagtaagaaaacattatttttatttatttatatatattttttgagacagagtcttgctccgtcgcccaggctggagtgcaatggtgcagtctcggctcactgcaacctctgcctcctaaattcaagtgattctcctgcctcagcctcctgagtagctaggattacaggcgtgcgccaccacgcccagctgatttttgtatttttagtagagacagggtttcgccatgttggccaggctggtcttgaactcctgaccccaagtgatccacatgccttggcatcccaaagtgctggaattacaggcatgagccaccgtgcctggccagaaaacattattaatataataataattttcttactgaactctagaggcagggagcccggttgtgcactgggcgccgaggactttgctcctgtgagtaggtgcagagccaggccttgggctcctaggtacattggaagtagcactgctgaggcagccttggctcatgagtactaagggcttcctagagatgggaatcatttgtcccacctcttgggctgaaaataactgcccaacatcagggtaattacatgacttggattcctccaccgcatggagaacaccccaataattactgtgcacaaacactgcttttggcagctgatgcttattttctgcctccaggagtatctcctggacaggaagcttattctgctacccaccccatgggatttgaacccctagctaatgtgagcagaaccatccagaaacccatcctagtcagggatatagtggccactgctcctctcccaaaagccatctgtaatgctcagggcacccccactcacccgtgggcaggttgggccttggtgatcagtggctttgccataatctcctacatggtcctgaggctaacaccaggcactgggtctgtaggagatgcctgcgagcagaggactgcctgctacagacatgagtcttctggagtcagcccttgagggtgatctgctttgctcagtgatggagaggctttgtccttggactgaactagagggctgccaattgggtcaaggtcctagaggagttcttgaggactcactgtgtaccaggctttagggatagagccataagtaccaggtcatggttctgcccttgtggggcttagtgtccaatgggcagatacactcaaagcccataattagttatataattgtagttgtgacaaggctgtaaatgagatgtataggagctatgggtatatataacaggagcctggggagtttaagctgagacctaaaggacgaggagtggggcaaaggtgtgtgtgtgtgtgtgtgttagtgttagaggcagatgcatggatgatggtggttggatggatgaatggatgctggtggatggatggatgaatgattgagtctcccaggcaatgggaacagactatgcaaaatctcagaggccacaagaagtgatgtgactctgtaactgacaaaagactattgtggaaagtgtttggagtttaagaaatgagagtggtgaggttagcaggtaggatgattgtgcacagctgagcaagttgtgtactggacagctccagaagatgccagtcttataaaccatgatgtggatggtgccacctagaattgtgcaagctagagacctgcagacagggctcacatcacgcaagaacttgtatgccataggaagagttgtggactttattcccagagcaatggggagccatggaaggattttaacaatttgtgacagagctaattttcatttataatgccccaaagcagcaccgtccaatagaactttccaagaagatgaaaatggtctatttctacactttccaatatggtagccaccaaccacttgaaactgagcacagcatgcctgagaaactaaattttgaatgttaattcgtttaagcagccgtaatagccagatgtagctagtggcaccatgttggtcaggacagcgccaaaggatctgaccgtactggacaaagtcctgtcatgcttaacccatactggctatgcatactgggcaggtctactggagatgccacctcttactgggtggtgacctcaacctccccttcacgcagggcctcggttcacactgaggcctagggtgcaactgggactgtggtttgggagctgggcctcatgaggatggagctgaggggctgtacccccaccccatccactgctcctgagcccttgaggactcctcccttgcctaccagcttctttttcccctggcaccccctggagttgctgactgggtttttttgtcctgcagaagggatagtcttctcttcaccctgcccagctcacttctaatttgtttccccacagcagaaatcaacgaggaaaccacctcagccctgccctatggcatgaaccgtagcgtggagatagtgtccacggtggggattaggggatgtggactttggcttctgtttcacagggagctagacttggctgggggtgggaggaggctcagagggctcagggccagcctatgtatcctgtctgcagtgcctgggcctgcacgcctggcttcatcagcacgatggcacgagggccacccacacaagccagcttgtgtattcaagttcgtccacttgccccacaaacagccaccctctgttcaccactctggcctagaggtccgcttgcccagtaactgcacagtctacctttgggaagctggatccagggaagatcctattgaggccctgcaagcaggctcggagtcatttggacagggacagtagaggtgtggcctggaaggggagccaggggcttgggtggactcgtcccactggccccctggactcctcatccacggggagaggcaaagctggagggcctgagatcaccctgccaaagccagagctggggtcccagttgccaagcctgggaaggggcctgcagggctggtgggtgagctcctctcttctctccctttgcacgtgggttcaggggagaattggggcttgaatggtggtgggcagaggaggagggaggagggtcacagtgataaggggagggggcttatcctaagcaagagggattccaggctgtcaatgctgttcactctggcctccctgcccacccagaatccctgaacacacacacacacacacacacacacacacacacacacacacacacacacacccctagacaaaattctagggattggggatggttaaaacctctgctaccctccttccccagggctcagtagggccaaagaaggggcatttgacacccataggtgagccatcacctgctgtggggacccacagttttagtaaaaatcatcacatctgccagagcaggagttcaccttcaaaccacatgctggccactgtgctgagcccctggcatggctcacctcgatgaccactcacactgctactgtgaggaggatgaacatcatccccattttgcagatgagaaaactgaggcacagagaaggaagtgtcttgaccaaggttgcacagccaatgagaatggtgcccaaatttgaacctccagagtgtatgctttcaatgactagaatgtgcatcctctggacaacaaatataacttgcttagctcagtgcctggcatccgggaagtgctaaataattgttagttcttgttattgttatccataataagataggcagtggcatctacctcttggaaattctgggcgtcagttgtctcatctgtaaaatggggagttgttactacattcttcataggcctgggggagagcgggtcttacccgggcccctgcatgcctgcacacccagtgtgcaacgggaagctcactcctgtaccctcctattgcagtacgctacttcctgaagaataaggtcagccctgatttgtgcaatgaggacggactcacagccctacaccaggtaaggccgggctcgttggggctccagggctccctgcccctcacctggacaggtaccctgtttctcggcactttcctgctcagaaccctcagggaggagggaatgagggagggaggaggagctgcagctggcccatctgaaaggctcttgtctactttggagatacgcgtgtctgttactgccatcccacagagccctgtgtgcgcccgcagacgcgactgcacatgcaggctctaaggacagggagcctttgttcactgcatccctcctgcccatgaaagcaagtgtgtttggagcttgacagtgtacgaagcacattcacacttatcaggacatcccatccaccctggcgacagaggcagttggcgggacttatgtgacctgcctgaggtcacatggtcttgatttatggtcttgagccatgtgctatcatgacatgtcctttccaaggcagagtgatgggtccagccctccctgctggggatggcttctctggctgtcacctttcacgtggatgctgctacagcctcgtaactggtccccagcattcagtctggctctgccataattctctgtccacgcagcagccatggggatgcttaagccaaaaatctcttcctgttactcaaagttctctggtgtcttcccataatctggggataaagaacaaactctgccacagtgcacaaggctgcacgaggctgggctcatgaccaatcttctaagcctcctggctctctgggctccagccacccaacttctcaggtccttgtacccagtgggctcctccccaccacacttcccacagcacttggtgctttcacccattagctgctgtccacagcaagagcctgggagctgtgctgtgatagacataccctttgtcttctgaaggccctcttccttcgtaattagtcattttagccattgatgtcatcacttgatgttgacttctcccctactcagacgctgagctgcctgagggcacagcacatacctcttgcttatgagtgtgtcctagcatctttccccatgctggcatacagtaggtgctcaatatgtgcatgttgaattaatgcatgaacacaccaaagcctccctgtgcccgagtttctaagcagatggacttgagtgagaggccaggcaaccagaaccctgggctggtgagggcctctccacctcggtacaagggcaggggtgggatgcacagagaatggccacgccctgcccgtaagccccaggggcaggtccctgtgtgtcctcttggcttctctctcacagggcctcaggcatctctcaggcagctgcctcagtacccccactccatctgccattggaaactcccagactcccagctccatgaaccctagagggcctgggactccactagggagcagagagcgggtggctgctatagcttgccctgaaatggagacccaaatgccaattcccaaggctgggctgcacccaccagccatgggcatgaggatcaaatgtgtgggctacctcctactgcgtgccagaaaggtgaggatgtcaggactgacagtcaggcttgtggcccggagctgtcacccactagctatgtgactgtggggaagttacttaagctctctgtgcctcagtttcctcatctctaaaagaggaataacaagtacccatctcattgggtggttgtgaggattaaatgaacacatgtaaaactttaagcagcactcgatactggataaatattattattatttattaaaagttattaaaatgtatcatgtgaccacttccctgcaaattacttcagttatatatttcatttttatccttacaacaaacttcagaaatattatcatccccaggccaggcgtggtggctcacgcctgtaatcccggctctttgggaggccaaggcaggtggatcacctgaagtcaggagttcaagaccagcctggccaacatggcaaaaccctgtctttactaaaaatacaaaaattagctggaatttggtggtgagtgtctctaatcccagctactagggaggctgaggtagggagatttgcttgaacccgggagacagaggttgtagtgagctgagatcatgccactaccctccagcctgggtgacagagtgagactctgtctcaaaaaaaaaaaaaagaaatattatcatccctgttttatggctcaggaaactgaggcagcctattcaatagaactttctacaatgatggaaatgttctgtgtttctgcagtgcacagtacaatagccaccagccacacgcggatccacagcactcgaaatgtggctgatgtgactgaggaaatggattttgaagtttatttaattttactggatttaaagaaacagtggctgtcttattataccgtgcaacttggggaggtgaaatctctttgtccaaggtcaagcagtgattgagtgtttaagtcaggatttgaaacaaggcagtcttaactgctctgtgggcaccacagctgcaattctctgagccccaggtcccctgttgagttgccatccctgcttgcaatgaactctcaagtggcaccctttttttagcttggggttcccgccacctcacatagtgcctcaacttcttccttgttggtcacattgctttctcaggaccagtttctcctgtgggttcctgggcccctggggatgcgtggtcagggaggcgggaactcgccaggctccgagtttagctgcatgaagctcctggctgaccagctgaaacccgcacctcaccccaaccaccacacgtgccttgggccccatgttggggcctttcagggagacatccaccctcattagcctgtgagcttccatttattttttcaacaaatacctattgtgtacccactccatgccagctgtcttctgggaacagggccccagaagtaagttaggcagagtccctgctctcagagttcagagtgtgctgtggccacaggcacataaataataatagaggtaatgcagtgtggtcagcccttgcacggagataggcaggggctcagtggcagcttaaaactgggaaccgatgactcgactcaaaggggaactgagaaagacttctaagaggaagggatatctgagctgggtcttgaaggatgagtaggagcttgctagctagaaaagaataaggcagaacattcaaagccgagggaatagcatgtgcaaagccttgagaaaggggctcagcatttcaagtttggagtctggagggttccatgtggcacagttagagagcagggagcctcagggagaggtgcaggtggtgagactgagagggttgagaacagggcctttggagtcagactgcttggatttcaattcatcttactccatgtgaccttgtaccaccaggcttccttgagccagtttccccatctataaaaggggccatttccccgtctgtaaaaagagcaatcctcataggcttgttttgaagattaaatgaggcaatgcatggccaaagcttagcaagctgcttgactcttgtaagtcctcagaaagcattagacattgttattgacaatgtgatgtgacatgctattactgttgctgccggggctgttgctattgttatcactgctattgtcactgtagctccagtgcaacaaaggagatgggggcacattaagaagagcttcccatgcctggcaaaggagtgtggattttcttctcttggcaacagggagccctcagaggtttgtaaacggagagcaacatgattagattaatgaagaagctctctctggtcgagggtgttaggaaggggaatgacggggaggtagggaaagatgatgaaacttcatccagggcagagggtggggacagcgatttaggagatgtgcaattcatacctggtgatagattgaagctgggaagggaggaagtgggaggaggcgggaggaggcgggaggaggcggctgactgccaggtgccatttcccacctcggccgcagcagaggaggaggcccgcccactccaccagctaccacccactccatgtgcgcccctgcacccagcccccaacgcagcccttattcaggccgggtctcccaggtgtagactggtccagcccctggacatctatctcacaagactctgccatctgggcacacagtcccctcgcccttcaaccagaggcttccactccaccccctatgtttcctgcggtctctaggggttggatttctggccctcttgcccctgaccccaggggctcctcagcggcatctcccagtgaaggcctggagatgctcaccttccaccgcagcctcgcttcgttgcctttggcgccctctgccggccgcgccgtgctgctgcgtggttctcccgcccgtctgaagcagcacccactcgcttacagggtcacacctttccctgcctgtccggagagaatgtcctcagacctagccaccgtcccccccgcacccccgcacccccgccccgcaaagaccggctggcgcagaaagaacctgggtctctggcgccatctgtgcaaacggctgctcctttcccacatgtcctggcgctgagccctggcttccctagggataggggtggggctgtggtgccgccccatcccacgcctacacccacgcccacagccacctggggccgtgggcttccacggccgctcctgccccttctgttggcgtctggactcttctctctatccctgtggtcgtttctggaggccaggccaccatcatctcttaactgggtggcttcaacacagctcctcactgtcccctcccaacgtgcacacatgtacgtgggcgtgcacgcgcacacacaccatctgttctccacgtgtaatcagaggagcagttgtttttaaaagcaattctgatcatgctccccttcgtagtgtaactcaatgtctcccattgcactgatgaccaagccccaagcccttatctgggtgggcagggctgagcctgtgagccctgctgtgtcccctgctggctttcgcagaggtcacctctagggaagagtttcatcccgcagtctgtaaagtggctccctgtctttctcctctctcccggcctttcccatcctggtgcctagcttgacgctcctctgtctccttgggatcttttcctccctgtccctggagcctgggggccacctgtgttggagcctgcgttctctctaggaggctgcaggctgctggcccttcccccttactggggctgccccacgtgccatcactgcagcatgtaggcaggaacacaaacatggctgtctcctcgcagggactatcaggacccctagaatgctcacgttgagctggattatttcagggggagtcttggttacctgaaggcttccccaagatctgagctacctggtcagaggttcctaagtcagaggtttcaagctatgatcttgaaaccgctttggaggccactgccaggaaaggggacaccctcccaacacacacacccctgcctcaacccaaccaatcctgtttgaatttactggtcatctaagtgagagttctccatataattttctttggagaaagccttttgggattaaaaaatacgttttaaaacctcattcaaaattttgtcccatttcactgatacttgcaaagcactttatagctgacagagtgttttttacctgtatatttttatcttacatattattaacttcatttttactcacaaggagactgaggcccagagaggttaagtggcttgctcaaggtcaagggcaatgcttacagtgtgaacatcatggagctggattcaaacaggccttccacagtcttcctcatggcctcttgcggggaacctggtgtgtcctgaccagggcccggggcccagtgccctgcctggagctgactctgcctgtgtgtctctcccagtgctgcatcgacaactttgaggaaattgtgaagctgctcctctcccatggtgccaatgtgaacgccaaggacaacgagctgtggacacctctccatgctgcagccacctgcggccacatcaacctggtgaagatcctcgttcagtagtacgtgcccctccctgccccagagcagcctccctccacctcttgtctttttccaacttccttctttctctcctccctccctccttccttctttctctcctcccttcctccttccttctttctctcctcccttcctccttccttctttcttccctccctccctccttccttctttcttccctccctccctccttccttctttcttccctccctccctccttccttctttcttccctccctccctcctttcttctttcttccctccctccctccttccttctttctctcctcccttccccccttccttctttctttcctctcttccttctttcttttctcccttcctcccttcctttcttccctcccttcctccctttctgcctttcttctgtctcccctcccttccttctttcttcccttcctccctcctttccttctttcttcctccctcccttccttccttctttcttccctcccttccttctttcttccctccctctctccctccctttcttttccctacctgcctccctccctctctccctcccttcctttcttctttcttcccttcctccttccctccttttctgcttttcttccttcctctcttttctctttttttctctctctctgtcactctttctcagtctctcttggtgcttgtcactttctttctccccacatcctctcttcatctctctctctgcttctacctctcaccctctcctcccctcagttcccctttactctccccatctctgtgtgcctgttctgctcttttcttcttctatctctgtctctccttcactcttggtctgtctctgtattttccagtctctttttattttctctcttctcctttcattctccctttccccccaattttttatagtgataaaacacatataacataaaataccatcttacccattttaagtgtgcaggttagtggtattaagtacattcatattgttgtgcagccattaccactctccatcttcagaatgactttcatctcgcaaaactgaaactctgtacccatcaaacagtaattcccattccctgcctacccctggctcctggcgaccaccattctactttctgtctctatgaatttgactactgtaagcactttatagaagtggattcagaaaggccgggcacggtagctcacgcctgtaatctcagcactttgggaggctgaggcaagtggatcacctgaggtcgggagttcgagaccagcctgaccaacatggtgaagtcccatctctactaaaaatacaaaattagccgggcatggtggtgcatgcctgtaatcccagctacttgggaggctgaggcaggagaatcgcttgaacccaggaggcggagtttgcgatgagctgagatcatgccattgcactccagcctgggcaacaagagcaaaactgcacctcaaataaataaataaataaatgaaaagtggattcagctgggtgtggtggctcacgcctgtaatcccagctactcaggtggtggaggcaggagaatcgctcgaacccaggagactgaggttgcagtgagccaagattgtaccactgcaatccaccctgggcgacggagtgagacaccatcttaaaaaaacaagaagtggattcatacagtatttgtctttttttgactggcatatttcacttagcataatgtcctcaaggttcatctatgttgtagtatgtgtcagagtttccttcctttttaaggctgaatgtactccattgtatgtctataccacgtttcacttatgcatccattcattgatggacacttgggttgcctccatgttttagctattgtgaatcatgctgtgacgaacatgagtgtacaaatatctcttgaaatcctgcttccaattcctttggttatacacccagaagtggagttgctggattgtatggtaatgctattttaaattttttaaggacctgctatactgttttccacaacatgttacattcccaccaacagtacacaaggattctagtttctccacatcctcaccaacacttgctattttctgctttttcttttttgttagtagccatactagtagatgtgaggtggtctctcactgtggttttgatttgcatttttctcgtgatgagtgacgttgagcatcttttcatgtgcccgttgtccatctgtatgtcttctttggagaaatgtctattcaagtcctttgtccatgtttgaactgggttgggtttttgtcattgaattttaggatttctctatgtattctggagatgaatcccttatcagatagacgtactattttctcccattctataggatgtctttgaaatcactgccaaatccactatcatggaggttttgttctatgttttctcctaagagttttatagttttaggtctttcatttaggtcatgggtccagtttgaattaaatcttatatatggtattgggtaaggatctaacttcattcttttgcatgcggatatccaattttcctacactatctgttggaaagatggttggtcttttctccattgaatggccttggtaccctgtctaaaatcatttaaccgtgtatgtgagggtttgtttctggactctattctattttattggtctatatgtttgtctttatgccagccccacactgtttgatgctagagttttggagttcgttttgaaatcaggaagtgtgaatccgccagctttgttcttctttttcagggttgtgttggctattcaggttccttgagattccctatgaattttagagtaagctattctagtctgcaaaaaacatcattggagattacaggtggctgacacctgtaatcccagcactttgggaggccaaaatgggtggaccacttgaggtcaggagttcgataccagtctggccaacatagtgagaccctgtctctactaaaaatacaaaaattagctgggcgtggtggtgcacgcctgtaatcccagctactcaggaggctgaggcaggagaactgcttgaacctgggaggcggaggttgcagtgagctgagtttgagccactgcacaccagcctgggtgatggagcaagaccttgtttcaaaacaacaacaacaacaacaacaacaacaacaacaatcattgtgattcttaaaagtaatggcaagaaccacaattacttttgcaccaacctaaataataattggtatcacccagagctgggcactgggcacacagggatgcagaagtcctggggagccaggaagaaagccaggggttttaagtaccagagctgagacagagccagaccagggggctgatcatctgagggcaaggagtcagagagagtggcccagggcaggtaaccttttgcactggtcttggcagagcggcaggagcccatcgttggctcccggggggatggatatgacagtactgctgccccagctcagagagctggataaacttgctctggggtgtacgaaagctcagagaagtcacagtggagggctgttaggccaaaggactggatggtggcctgtgcctatgtctctgatgggaacctgagtatggctaattctgctaggagcatcagatggccacagcctgatcagtgatggtgctaagaggacaaggaaagtggtgccagcctgggtcagtgggtcccaaagctgatcggtattacaatcacctggggcatgggtttaaaacagattcccatgccctaccccaaggactctttcaggagggctggagtgaagcccacccaagatgctgcattttattcccatggtccccaggtaattctgccacatggcatccagggccattcttaggaaccactggcccaaagggtaaattcttccaaggagtcccaggtctccattcttctacctctgtactatcagccttttgagtagggacttggaggaggtggaatataactgaggatgtttctgcatatgggcaaaaaatgaaatagaacatggagaagtaaaaagaactaatatgagagacctggttttgagtctggactctactgtatccaagctgtgtgaccttggacaagtgaccgaacctgtctgagtctttttttttttttaaacttgctctagtcttgctctatcacccaggctggagtgcagtggcgtgatcttggctcactgcaacctctgcctcccagtttcaagcaattctcatgcctcagcctcccgaatagctgggattataggctcccacaccacgccccgctaatttttgtatttttagtagagacagggtttctatgtcggctaggctggtctcgaactcctgacctcaggtgatccgcccgcctcgccctcccaaagtgctgggattacaggcttgagccactgtgcccggtcatgtctgagtctttgtttccccttgcgtgagatggggccaacagtattaacctgagctattataagggttaaataaaaggatgcctgcaaaaggggcttagatcaggtttggctctaagcaagtgcctggtaagtggtgctgctgccattaatgtgatttttgttattgtcaccaggaggacttttatatctgtccctaagtccctgcctgctggttcaacagagtgaaaggcttagggaggtcttctgggatagctgtcctgggactttggtctcttcccacctgggaccctgggatcctgaagctgtcgtgctcttgggctgtgtgtcaggcagatccaagcatcatcttgctggggtacaccttggtggggttttgagtgccgggttgtacagtaggattgcaggcgagaggccagagggcagaggcagctagaccaaccctagccacacctacttggccctcaccctgcctctttctctgcagtggggccgacttgcttgctgtcaactcggatgggaacatgccatatgacctctgcgaggatgaacccaccctggatgtcatcgagacctgcatggcataccagggtaagggagggcagcctgctatgaagtgagcacagcacagagttgcagagagcgtcccttaaatcaatgcaggcgaacagattagctacgcatcggcctgcctcgtgcgctgtgctcagtgaataggatgggtccccattcatatccttatctgtgtgattatcaagagcaggacatgagaggaccctggaaaacatgctgcgcagaagggaggtattgatctcattcgtgtcacccacacacgcaggtggccgcagctggccttgtctcatcttcatcagctgtgacaatttgattcaataaatgttcaccataaagatatattcctatgtgggacaataataaagtcaagaatactggagggtgcctgctctgtgccaggcaccacgctggctgccaggggcccagataaacaagatgtgggctgttctcaactcacaaatgaggttcagaaaggaaacagatgcagcaatgagagacctgcgtgccccagcaccccacagatagacctctgaagcgccacctccttggaaatatgtcacatccccagatcctcagctgcagctgcagtcctgccctggccctgcccttgtgtaccccacagagcctcagtaaccgtgattgaatgtcttgttccttgcacccagatcttcctattcatctcctgcagaggttcttaaccatttttgtgccaatctggtgactctatggaccccttctcagaataatgtttttatttttttgagatggagtcttgctgtgtcccccaggctagagtgcaatggcacaatctcggctcactgcaacctctgcctcccaggttcaagtgattctcctgcttcagcctcccaagtagctgggattataggcatgcaccaccatgcccagctaatttttgtatttttagtagagacaggatttcaccatgttggccaggctggtctcgaactcctgacctcaggtgatctgcctgcctcagcctcccaaatttctgggattacaggcgtgaacccccgcgcccagccagaataatgtttttaaatgcagttataaaagtataggattataaaggaagccaattatattaaagcgtaagtaccaaaacatttttcaatgtgttagatagaaacttcgttaattcattaaacaataagataacaggatatgaaaatagctatagtatctgttggtaacaaagttacaggcactgctaacactactgtgggttttgcttacattctaatggtagggaatactcaatttcgtttaaagcttagtcaaaagaaatgtgtgattttatttcctccttttgtagatctctcctgaattcgatcgaacagtgcttggtctaatggatctttttacggagcatgtcatcctctccttaaatactgtttgtagctgtcagtaacacacttttaagacaggaatgggattcgggctatacaatgtctctctgggcccctacctcaattgactcagctctccacttgaaagtaatacattcattcattcagtccttctgcaactaaaattgattgagcgttgtgccaggtgctacagacacaaccatggttaagatgaaggaaactaacagagaccctggtcagatagggtggtcagcagaggccagcttgggagatgatccagtccaggacctaaagaataagacagaggcagccatctgagcagttggaggtgtgtaggtggatggtaaggactttcaggtagaagaacagcatatgcaaagtgaccaatatgaatccattgcctagtgggtgccaggcaggaatgcccttgctctgtgggccaatgcatggtgtctcatcaggcctgaagacaatgatctatgggcatgtctgcatgcccgcttgactggcatatcctagggaacaagagccatgcctccctcatctgccttcccctgccctctggggtcgtaggcctgagggtgctaaataaatcccctctttcccactgcaggcatcacccaagagaaaatcaacgagatgcgggtggctcctgagcagcagatgattgcggacatccactgcatgatcgcagcgggccaggacctggactggatagatgcccagggtgccacactggtgaggagatgggccagtaccaaaaccaagaccagctaggtccgaagtgggccagcacctggtggggaccaaccctgtacccttggggcctgtctgtgaccttggacctccgcaagaatccttttgggccaggattgcccctggatagggagggtcagcagagcagggctcagcctctttgagaacctggcctctctctgggctgggcttggtggctcacacctgtagtcccagctacctgggaggctgaggtgggaggatcacttgagcctgggagtttgagtttgagttgtgattgcaccaatgcactctagcctgggtgacagaaagactttgtctttaataaacaaacaaacaaaaaagaatccagccactctcaagtggggcttggagttaggagcctgggtcggagacctggctcccacctgttcaccaactgctctgtctccaagatattccttcaccccaggcttcatgtgtccatcttgagctccttatttccctctcctctaatgatgtcctccattaaggactggtgtcaccattcacccactcactcgtgctttcttgctttgcactgtccattcccctgccttagtatcacctctcctaccctagcaccccactgccttgcctcatcagctcccctgatattactgcaacagcctctcctttgggttccctgacttcagagtctgcccaccactcccagtcatccattcatccattggtccatccaaccatccatccatccatccatccatccatccatccatccgtccgtccgtccatccatccatccatccatccatccatccatccatcattccatccatccatccagccatccagtcaacacacagttatgagcacctcctctgtgcacatactttactagaccctggagacagagaacaatgggaccttcttctctctcaaatccgcctggttaactccactcatccttgcagctcaagtgtcactgacttaggaaaacctccctggccactcctcataggctctcagagcacactgcagcctaatattggggaggtctgcttctgcaacctgtaagtcaaaattcagagcatggctatggcagcctaccccactgactggggggtgggtgccctgtcccaggcttaggttccacgctggtcgtaagcactcagcagtctcgggatctcgagctcactagatagggctcagcagtaccagatatcctcactgcccctcaggcctgacctggcagcccaggtgtgataagtgggcttctcccacctgcttcctgagctctcacatctgttttatgcccatttctattacttgggtgcctgcttggatcacctgctcagcctagcactcaagaatggggtcaggtaggaagtctgactatttctgtctgaagtcaaggccaggctgcactagggcattacccagcctcattgcagctccaatggggctgtcattgggtcctctagacacagggatcttctctacctgggctggggctggcctcagggtggccccacccccatgggctgggcatatactaggtctcaggtcttcccagtaaactggagatcatagtgtcttcctcacagtgttgctgggagcattaaatgagattctgtgtgaaagtgcttagcacagtctgcaaattctcaatagatgttagcaatgaccattatttttactaacaatgccactattccactcataccttttcatttccagccaagtagtgaggtttgtaatgtcggactggccagcaggtgtcattctctacaactgacaagcatcagacatttataaatcagataattatactaattttcacatcatacccttgctttttcaagttggaaaaaaaaaaagcttcaagcaaccttctcccaggatgaggtggcatctgaccatcagggctgtgttcagaaggatcacttcctgaggccatgccttctttgtcccactgactctccagcccaagacctcaggcccccgaggttctctggcttcctcccagctagtcttctgctagccgccttggactctcacttctatctctcatcttggctgggcagttgatgtctttttgccttatttccttctctctccttcattcattctcatggtcatcatttaggactctctaagaatgtgaatcccttactgagtgttcattatgggctaagctatttatgtattttgggggcaaattgaacaatcatgacaactgaggtctgccaggcagtggccatgactgaaggccttgaatgggatcacagtccctcattggatgtattatctattgctgcataacaaactaccccacaatgtagcatcttaaaacaataataaatatttattgtctcacatggtttctttgggtcagagagttaggaacagcttaactgggtggctctggcttggtggctctcatgatattgcaaccaagatgttgcaatattgttgagactactggggctgcagtctcatctgaaggcttgactggtactggaagatccacttccaagtcagttcacacacatggctggcaagttagtgctggctgttggcaggaagcctcagtttctcacctctttaggacctctccttgaggcttcttgaggatcctcacaacatagtggctgccttcttctagaataattgatccaagacaacataaagtagaagcagaaatgccttttatgccctagcctcagaaatcacaaacaggatattcacaatatcctacttgttagaagtgagtcactcagtctggcccacattcaaggtgagaacagtcaggctccatcttttaaaggaagatgtgtcaaagaatttgtagacatatttaaaaatcaccatattgaacctcagagaccccttcttcagggctcaatgcacagtaggggctcagtaaatgctatcgctttaaccacatggatgctaagaccaaccacaggggagaagaattcagctctctacctttccttttaagtccatatttcagacttaataatcctctgcaatgtgactggtatttccatttcattctattccattctactggccccaaggatgctgtgggagttgggtgaaggtgagagctagcctaccgtcaatgtggggctgatcccctgaggaatgctcacttctttcctctcctccagctgcacatagctggagccaatggatacctgcgggcagctgagctcctcctggaccatggagtgcgtgtggatgtgaaggactgggatggctgggagcccctgcatgcagctgccttctggggacaggtagttctcacccacagggctgtgggggaggccggcacagggctaacctgctgacaccaagttttttgggctggcagttgttttcaaagaacataagactttaaggcttaaggtgttgaatatagctcatatgtgggatatgaaaaggcctagggagtttgcaaaaaacattggacaaagcaagttgtgttttttttttttttttttttttttttttgagatggagtcttgatctgtcacccaggctggagtgcagtggtgcaatctcatctcactgcaacctccatctcctgggttcaaacaattctcctgcctcagcctcctgagtagctgggattacaggcatgtgccaccatgcccagctaattttttgtatttttagtagagacagggtttcaccatgttggtcaggctggtctcaaactcctgatctcaggtgatctgcctgccttggcctcccaaagtgctgggatgccaccatgcctggctgacaagttgtgttctaataggatggtaatcaaatttgccaaataagaaaattaccagcatttttgcttctagcagtttctccatttgtttccagatacaaaactctgattgtcacttacacctagtccctccttagatacctgccagctctagagttacagccaactctttcttctccttcttcttggtgtggcccaggcatgtggaggaggtgctaagctcattgcatctgtctggattccccccatggctctagtttgcaggccttccctggaaatcaactttgtcccaccattctttgggtcacatcctaagaggccttgggcactctctccacctcctaggctttctgagctctgggcagggggacacatgagcttcttcctgtgtttcagatgcagatggcagagctattggtgtcccatggagctagtctcagtgcaaggacatccatggatgagatgccaataggtaagtccagcacaatagctggtgtgcacaaataggcagttatcaatgttttgatgggtagagggagaaatagataaatatatggttgtatagattgatggattggtgtctagatagatagatggattaattaatggatggtagatgaatggacggatggacagattaatggatagatggataaatggatgaatggatggttgaggtggtagatgggtagatattatgaggtctggttgaatggatgggtgggtgggtggatggatggatggatggatggatggatggatggatagacagaaaaataagtggatgagtgggtaaaggatgaatctatgaatacatggctcagtcagcaataggtagatagatggatgaaggggttaggtagaatagatgggagtatgtagctttattagcatctttgcataatttattgcttgggctatgtggggtacctgcttggggactcttcttggaaactatcaaagagcaacatgaatccctcggtcatagctgggaagcttaggaattgtgactgtgcccagaacctgggtttcccattcttataatcctcttataaacacactcactcaactttggctggcattgttttcttgcctccctgcatgccctgaaagatgcttggagttttcagtgggttggggtggcagctcctctggtctggagcaccctcttgcgccacaggtcctggccccgtcccccacaacagactcctctgccccttcagacctgtgcgaggaggaagagttcaaggtcctgctgctggagctaaaacacaagcatgatgtgatcatgaagtcacagctgaggcacaagtcatccttgagccggaggacctccagcgcaggcagccgtgggtgagtccggggcagggcagccaggagtccctgtgtgtgctcctgcctgtggtgcctgggtgcagcctctaggacccactttgtcctctcaggaaggtggtgcggcgagccagcctgtcggacaggaccaacctgtataggaaggagtatgagggagaggccatcctgtggcagcggagtgcagctgaggatcagcggacctccacctacaacggggacatcagggagaccaggacagaccaagagaataaggaccctgtgagtggcctcacgccctgccctagtgtcagccactgcaatgggaggagaacagggcccagcctggccttgcctcttcaactgagagccttcagagggaagtagccaggcactgcccttaaactagcatatccagtctgatgatgatggctactgtagttaaaccagcagattcagtctgatggtggtggctgctgtagttaaggaggtgatcggggagtgtgttagaggctgagctgggtgctttggcacacaggtaggtctcctaattgacagggggtgagtgtccgctatgcgcctagctgtgctccagcacacctagcagtggacttccaaggagagagcttcagtagggcagtcacccaggagctgagggtgctacaacttctttttcaggaaatataacaagatattgagaattgtgtttatcagaacatgttttttgaaaaatggagtaggatcctagtaggacctctgagaagcctgctcctgtagcagccaatggtcctttaagctttaagctgctttcatttctgatggctgctttaagaaattatcacaaactggatggcttaacatggtggaaatttattctctctcagttctgaaggccagaagtctaaaatccaggtaacaccagcattggttccctctgggggctctcaaggggattctgttccacgcctctgcgagcttctggtggctcaggcgttctttggctcttgctagcaatgattctagtctctgcttctatctccacatgacctttttcttcgtgtgtgtgtgtctgttttctttttttatttttattttattggttttttttgagacagggtcttgctctgtcactcaggctggagtgcagtggcatgattatagatcactgaagactccaactcatgggcttaagcgatcctcccacctcagcctcccaagtagctgggactataggcgggggccatcacgactggctaattttcaaatttcttgtagagatgaggtcttgctgtgttgcccaggctggcctcaaacttagcctcaagcaatcctcccaccttggcttcccaaagtactgagattacaggttcgagccactgtacctagcctgttttttcctcttatgaggacaccagtcattggattggagcccatgccaatccagtatgacctaatcttaatttaatttattacacctgcaaatacctatttctagataaagtcacattcagagattccaggtagacatgaatttttgagggacactacttaacccagaaccaacacactcactcagcatggctgctttcttgctgagtggagtgaacaagtttggggctggagtggaattgctgaggatgagggagaagttaactgtaccagaagtggtctgccattttcgttcttccactacaccacgaacagatgaaaacatgcctagagagtttagccttggtgggatgaaattgattagctaccgagcatgcccacgtgtctcagagggaccctgcttcccagcacgaacagtggggtcacctactgcctgtctcaccaggaggtgtgaaggtgcctgcccaaggggaggccacatcaaagccaccagctggtgatggagagggcacgtagggaagatttgttctgcctggccccttagtctgaggattggtgagaaaagagatgtagatcagtatcaaatcacatttcagatgtctcccagctgtgctttatttatttttcctttgtgattgtggtgtaacttaagtatggtaaagcagacaaatctttttttatttttttatttttttatgatatggagcctcgctctgttacccaggctggagtgcagtggtgtgatttcagctcactgcaacctgtgctcccgggttcaagcgattctcttgcctcagcctcctgagtagttgggattactagtgcccgccacgacgcctggtggatttttgtatttttagtagagatggggtttcaccatgttggccaggctggtgttgaagttctgacctcaagcaatccttacccacttggacctcccaaagtgctgggcttacaggtgtgagccaccatgcctggccaagtagacaaatcttaaatgagattttcaacaaccttttacaaatgtacacactcagatgaattcatagagcattttcatcatccatgttctctctccgtcctttcccccactccaaatgtagtcactatttaactttgagttctaaagattaattttgtatatgcatatgaatgaccctgcagtttctttcgtgtctggctttttttacatctgtgagagtcacccacgttgtggcatatagcagtagtttttttttgttttttttttttgagacaggagttcactctgttgcctgggctggagtgcagtggtgtgatcctagctcactgcagccttgacctcttgggatcaagcgatcctcccacctcagcctcttgggtagctgggactataggcatgcaccaccatgcctggctaattaaaaaaaatttttggctgggtgccgtggctcatgcctgtaatcccagcactttgggaggccgaggtgggtggatcacaaggtcaagagatcgagaccatcctagccacatggtgaaaccccatctctactaaaaatacaaaaattagctgggcatggtggcacgcgtctgtagtcccagctactcaggaggctgaggcaggaaaatcacttgaacccgggaggtggaggttgcagtaagccaagatcgagccactgcactccagcctggggacagagcgagactccgtctcaaaacaaaacaaaacaaaacaaaacaaaattttttagagatggaatcttgctatgttgcccaggctggtctcaaactcctgggctcaaatgatcctcttgcctcagtctcccaaagtgctgggattataggcacgagccactgtacctggcctcattcttgttttttttttctttttctttttttttttttgagatggagtcttgctctgtcccccaggctggagtgcattggcgcgatctcggctcactgcaacctccatctcccgggttcatgccgttctcctgcctcagcctccctagtagctgggactataggtgcccaccatcacgcccagctaattttttgtattttcagtagagacggggtttcaccgtgttagccaggatggtctcgatctcctgacctcgtgatccacccgcctcagtctcccaaagtgctgggattacaggcgtgagccaccacgcctggccgcctcattcttttttattgctttctagaattcgattgtttgaatattaaaatttacatatccatgctcctttttttttttttttaaattgagacagagtctcgctttgtcacccaagctagagtgcagtggcgtgctcttggctcactacaacctctgcctcccaggatcaagcgattctcctgcctcagcctcctgagtagctgggattacaggtgcgtgccaccacgcccggctaatttttctatttttagtagagatggggtttcgccatattggccaggctggtcttgaattcctgacctcaaacgatccaccctcctcggcctcccaaagtgttggtattacaggggtcagccactgctcctggcctccattctccttttggtggacatttgggtttcttgtttctggctcctgtgaataaagctcctataaacatttttgtacatgtcttttggtggacataagcactattttgtgttgggaaaacacccaggaaagcagctggagtcacgggtaggcatatgtttagctttagtggatactaccaagcagttttccaaggtgccttgtacctgtctgctttcccatggcagagtgtttcttgccaacccttggtatagtcagtcttttttttttttttttttttgatacagagttccgctcttgttgcctagcctggagtgcaatggcgccatctcggctcactgcaatctccgcctcccgggttcaagtgattctcctgtctcagcctcctgagtagctgagattacaggcacctgccaccatgcccagctaatttttgtgttttagtagagatggggtttcaccatgttaaggtgggaattctcaaagcatggtccctgtaccagcaacatcagcatcacctgggaacttgttagaaatgcagactttggctgggcacagtggatcacaaatcctgtaatcccaaaactgagggaggctgaggtgggaggatcttctgagcctaggagttactggacaacatggcaagaccgtatctctaccccccaccaaaaaaaaaaaaaaaaaaaacaattaggtgggtgtgatggtgtgtacctgtagtcttaggtcttgtgaggctgaggcaggaggattgcttgagtcgaggaattcaatgctgcagtgagctatgatagcaccactgaactccagcctgggtgacagagtgaggcgtggtctctaaaaaaaaaataaaaataaataaatgtagattctcaggacccactccagatgtggcgatactgctgcacacaagaatttcagaaccacttatttgaggaataatttgttcagcctgacccccaaatcacatttcttccaaggctgtgccctgttagccttcagggatgactttggttcactgttttttgtttttgtttttttcctctgagacaaggtctcactctgttgcccaggctagactggagtgcagtggcgcaaacttcgttcactatagcctctgcctcccagattcaagcaattctcccacctcagcctcctgattagctgggactacaggcacccgccaccatgcccagctaatttttgtgttttttggtagagatggggtttccccatgttggccaggctggtctcgaactcctgaccttaagtgatccacctgccttcgcttcccagagtgctgggattacagacatgagccactgtgccccttgttttttaatctgatgtttaagtagcagtacagacaaactaaatcagaatctcaggagttgggacctcagcattgtatatgtttgtcattggtgtttttttttaattttttttagatggaatcttgctctgttgccaggctggagtgcagtggctcaatcttggctcactgcaacctccgcctcccaggttcaagtgattttcctgccttagcctcctgagtagctggaactacaggcgcacgccaccatgcccagctaatttttgtatttttagtagagacggggtttcaccatgctggccaggatggtctcaatcccttgaccttgtgatccacccgcctcgacctcccaaagtgctgggattacgggcgtgagccaccatgcctggccatgtcgttgttttttaaagctaaagagagactgtttttgaagtgattgcagcagtaagtagaatgcatcgaccacagaattggcaagatcttggaggtcaaggagaaaggagttcgtttcctagggaggaagacagaggctgcaaggactgagggttgggggtgggatgagcaggtggtgtaattggacagttgaccaggaatgtgtgtctggtggtcagcccatttccagaacggtcttcaggagagtttttctgcattgcagtgcttgtttaccctcagggtgagtcaaagtccaggatcctgtggggaggggagcagcttaactaaaatttggttaaatcatttaccgctgggcgcagtggctcacgcctgtaatcccagcactttgagaggcccaggcaggcggatcatctgaggtcaggagtttgagaccagcctggccaacatggcgaaaccctgtctctactaaaaatagccaggcgtggtggcaggtgcctgtaatgccagctacttgggaggctgaggcaggagaatcacttgaacctgggaggcagaggttggagtgagccaagattgcaccactgcactccagcctgggcaacagagtgagactctatctcaaaaaaaaaaaaaaatcatttagcaagcatttaatttcggttgataaattgacagtttaatcatttcagaggaaaagaatgagaatttgggggactgtgtttgggttgtcctaggaaaaggaggggtcgtctgagcgttctggaaatcctatggggaagggtgattctgtgcagtcagccattccccagaacacaaaatgtgggggttttgtttaaccttcctgttgtccagtatctcagttcaacattgccaagatgatggtgcctaccacaaagggtgttctagggtcaattgtgttcttatttgtatagaactcagcccataatttgtacctcattaagcattaggcagataagtacatttagaagttccctgcatcatgagaaaacctctttcgtctaacccacatccttcaggctggagttaattcctcttccttcaatgctctgatttctgacactggagatggatataggtgggttttgttttcttttgttgagacagggtctcattctgacagggtcactcaggttagactgcaatggtacaaacatggctcactgcagcctcaccctcctgggctcaagtgatcctcctgcccagcctcccatgtagctgagccacaggcacgcaccaccatgcccagctaatttttaaatatttgggtagtgatgaggtctcactatgttgcccaggctggtctccaactcttaggctgaagccatcctcccacctcagcctaccaaagtgctgggattacaggcatgagccactgcacccagcagggatttttttctttttaaactaatagattttttttttccgagcagttttagaactctagaaaaatgagtggaaagtacagatatttcccatatacacccccctccaccctggtttcccctgttattaacaactagcattagtgtggtacatatgttatcactgatgagccaatattgatacattattatgaactaaagcccatagtttacatcgggtttgctctttgtgtcgtaactcctgtgggttttgacaaatgcataatgtcatgtgtccgtcatgatagtgtcacacagaatgctctcgccacttggtttaggtggttatattagacagttgagattgtgaacaactggtgaaagagaccagggctgtcccactaaacagccctggtattctacttacgcttcctccccaaactctagcaatcactgatcttctactgttttcataagtcttgcttttccaaaatgttatatacgtggaattatataatatgtgatgctttcagattggtgttctatatggtttttttttgagacggagtctcactttattgcccaggctggagtgcagttgtgcaatcttggctcactgcaacctctgcctcctggttcaaacaattatcctgcctcagcctcctgagtagctaggattagaggcctgcgtcactgcgcctgtctaatttttgtgtttttcttttagtagacacaaggtttcaccatgttggccaggccggtctcgaactcctgacctcaagtgatccatccaccatagcctcccaaagtgctgggattataagcgtgagccaccacgctcggcctgtacatgtttttttttaactgtctagatgatgccaatgtgcatccaagatgggatcagtgtctcagatctttgccactctaagcatcagcaggaaattcttagaagtgccaaattgcaggccccaacccagacctattgaatcagaatatggattttaacaatatccctaggcaactcacatacacatcaaagtttgagaagcactgactaggaccaccaagaaacggtctctccatgacatggcatcagtctgcctgcatagttcagaaggagccattaaaaaaaaaaaaaaggttggactcggtggctcatgcctgtaatcccagtgctttgggaggctgaggtgggagaatcatttgagaccaggagttcaagaccagcctgtgcaacatagtgaggccctgactctaaaaggagaaagcgaagaaatacacactcataaatggaaacttactatggaaagtgttctttgccttatcacatattaccatatatatatataacatatatatgttatatatgttatatatgtatgttatatataaatacatatatatgttatatgtacatatatgttatatatgtacgttttatatatatttatatatgtatgttatatataaatatatgttagaaaactagattataaactagattatatatatatatcttggacatctttccatgccagcttgtggagaattccttcattctttttgccagctacagagcatgccaatagaagtactggccacagtgtcctgcttgcccaatgatgactttcaggctttgcactaatgagagagaaaatctgtgaaatgggcttgctggtgcaaagtatacaatcttttctaaaaatttttatcattattattgtttttattttttactgaagagctggggagagaagaaaggaaaaaaagaaaaaaatttcagtgaaggatgatgcaaaactgtccatcaaagagactgtagcaatttacattctcacttatttccccatacccctgccaacactgagtaataacacactttaaacgtatttgtcagtgtgatatccaaaagtgatattttgttgttttaatttttatagtattaacgattagtggggatgaatattattccaatgccatgtatatctatatattttgctgtgggctacatattagtatcccctgcctactatttttattgggtagataggcttttaaaaattgacttttggctgggtgcggtggctcatgcctgcaatctcagcactttgggaagctgaggagtgtggatcacttgaggccaggagttcaagatcagcctggccagcatggtgaaaccccatctctacaaaaatacaaaaatttgctgggtgtggtggtacgtgcctgtaatcccagctactcgggaggctgaggcaggagaattgcttgaacccgggaggcagaggttgcggtgagcagagattgcgccactgcactccagcctgagagacagagcaagactccgtctcaaaaaaaaaaaaaaaaggacttttaagagctctttatacttttagaaaattagtctcttttctgtaatatatgttgaaaatattttcctagtttcttcatgtgtcttttgaccttgttccctgttcatggtgatttttgctgtgctttaaatgttgttgcatgtatctattttttagtttatagtttttaggaagcagctacttttcaaactcttgttatccaaggattattaggtgtacaggatccctgggtaagaatctttgtgagatatgcttcatatacagaggaaggattacaagtgactgaaaaacccaactcaaatggacttacacacaaggaatttattggcttgtgcaactgaaaagtctgagcctggaaggatcctggacttcaaatgggtcatcaggatgcagtctctcttagcctttcttcatgccaactttacttgcaagcagacccttcaacatagtatctccccagccctcagcttacgtcattcttactacccacagttcctacagaaacttctctttcccagttgttctagcaaaagtcccagggttgcttcactgaagcaatttcagttaagaactcatccctgggccaatccctgtagtgaaatatgttgactagctaggccttgggtcatgatccaggccctggagcaaggccaggggtcggtcaactgtacggaaattcatagattgggggttccccaaaggaaaaccctggccccgatacccagggagagaaaacagatagaggaaaagtccaaacaataatgccctcagcagagagacaggtggatagtaggttcagatcttccagccagctggtaatgttgtccttctcactcgcagaaccccaggctggagaagcccgtgctactctccgaatttcctaccaagatcccacgaggtgaactggacatgcctgttgagaatggcctccgggctccggtcagtgcctaccagtatgcgctggccaacggggatgtctggaaggtgcatgaggtgcctgactacagcatggcctatggcaaccctggcgtggccgacgccaccccgccctggagcagctacaaggaacagagccctcagacgcttctggagctgaagcggcagcgggctgcagccaagctgctcagccaccccttccttagcacacacctgggcagcagcatggccaggacgggcgagagtagcagtgaaggcaaggcccccttgatcggaggcagaacttcaccgtacagcagcaatgggacctcggtatattacacggtcaccagcggagatcccccactcttaaagttcaaggcccccatagaggagatggaggagaaggtgcatggctgttgccgtatctcctagtctccgtgtgatggaggagggagatgcctggggaggggctcctggaatccaggccagcccaacagccctggctggggaggtgtcagggcagctggggagaggtgggctctgcttttcagaggaactcagaccccagccctcagctggctgcccatagcatcccatgtcccacgtcccgtggttctgcttcctgctgcatcgtctgccatctgacacaaggcctgtcgtggcctcctggttcactctgctgtctgatcttgggagggtgggcttgagatcccagctctattcttggtataaaggcttctccggatcagtacatgcatgtcacattaacacacacacacacacacatatacacacacacacaagctcgatcagtgtgtgtaggaatgacatacctgggctcaggggaagcaagggggcttagaatttgtggggtattcccaaaaggatggaagttaagactcagagtctcattaccactgccaatgtggttttagcaggggaggggacctgctaagctgagacccatagtcctgctcagagttatcccaaagtctgagccaccagccacacctgacaggggtgagaagtcctcgctgtgttcagagggagccaggaatctacatgggtagatgagatagacacagacctgctccccgcagccttgttgagagccacacttctgcccatgccaggagccagctgtgtgaccatccaggggtggagggggaaaaccaggcaatttcgttcctggaatcaaccaaatcatgttttcctcttggatggaagtgtcaaaggcagaagggtgtgggagggggacaaggtcagtatttaccaaagtgtatctgattttaaaaattcctttagtctgtaaaactcctagagggagggaggtaactgaattcacttctttttgtggatcgtatcaaggtcactgggttttactggctggtgctgggaaaatgaagctaagtgaggagcttccattggaatgcttttccagggagagaggccagttaatttaaaaaaaacagtcgctagttaacagcgacagagcccagcaccctggggtctttgtgaatatccagactgtttcagcccagcccatctcagccaaccctccttagactgagctgtcagagcaagcaattaggggccagcctgcctccacctcccacccccttccacctccatcagtcatgtgtgcagagtcagtgctcgggatcccgggcccagcttttgcctttttggggatgcttggtgagacagatttgccagtcagcccttttgagttcccgcctcacccaggggctcccagcctgcacttgcaggagtggtgatgccccaagtctgcgaatccagggtgcacgtggtcaatatcccctcctgcattcaggagagccatggtagggctagagttgggtcttgcccagccctgcagtttcatagtcccagccttcctggtgctggggagggaggactgtgaatggctgttctcccctcactgctgagtctcccaggaccccctttggagatgcccatggcatgggcactgcccacaggctcagccagaacctcttggtgtacccgataagctgcaggttatcccttgctctgtgcgccttttatttgtccttaaactacctccttagagctctgaaggggtctcctagttccagattttaatttggggaacagatctgggttctttttaaccctcttctttctcagtctatgagaaacttgccctgaggggcacctgggctaggggcttgggactggaagaccatccccgccttgtgccacaactttggtcatgggatctgctctttgtcattcttagccccctactgtggcccccatagccccataacccagagagggagctggacttcagggagcctgagtgatgctttcccaggagcagggcagctggctggaccagaaagtagagggcccatgggagtgactgcacccttggtggctgctggaaggggagaggttctcagcatcaggccacctccaccccaatgccaggatagatgtattctagagtaggggtggaggcggcccaggaggctgaagacaggtgcacagatgcttcccacgaccttgccatttggggtgggctcttcaacatctcaggctgtggctggaacaggacaggatgatctaaaacacacgtaccattggctgtaaaacagtatgagcccagactgacgctgaaatccctcatgagccaaccttagctacaaggtagggagttctgagggaagccgcgtgctcctcaggagagagctgtttaggttttccgatctttttgctcaggggccaaacactgaaggcacgtactgcccaacccactgagcgcctgaggccattccctccttttccgcatgcctcctgcctcctgggctattcctctccacccagaaggctgggaatcccagctgattccctgacaggagccgacttcacacacaggtgactctcaggcattggctcatgttttcagccagggataaaccatcccttcttggggctttaagtccctggggagctttccctgtaggtctcctgggtgttgagagacaagttggagaccaacctccaatgaatgagccgcggtcattcattaattcactcacgtaatttactgagtagctgcaacatgccagcctctacgttaggttctgcggataaaggaggaataagacagagtcaggagaactgttccttgtggtttccgtcccttggggaccacaggcatcagcagtcccattcaagtcacctgaggcaaagtgtctgcatcttcgtccagcgaccctttgcttttcggctcctagaatccttagagtctgaattcctttagctgggaacagctgtcatggtcacccctggataacatttgccaccaagtatagatgctggatcttgggttccaggcagacatcatccaggtccatctggaactttcagtgatagctgccttcagccagcatctttgggggactctataatagcagcttgagatcagtgtctagaagactgttctgcaatttgctgccaaatgcatctcaggtttttaaagtcattgtttcttgctcatggtggctcatttattacatagtcccctcaccccactaatggataatgggaggaaaagttgctgcttccttcagcatcaaagcctttccttgggaatctgcctccctccatggcaggggtggattcgggagctgggagtaaccaggcaaagtcaaccagatgcctagctcctgctgagacccaggtcctatggcagctcctcattagattaaaggagaccacttccaaagcaggtgctgcatggctcaccatcatatgccccaaacaactgaaagttggcggttatcaccagactgtgagtttctggcaagtagcttggggaagctgaataaactctaggcccagggctactaaagacttcaggatagaattctccatcaaatatacagcataagtaaaactgctctgcactgtttaatccatttccaaggggcttagaaaagctaacaagggtgtgtcccctgtcctgccccaccggtttgctggctttgtaataacataagaccattgtggttgttggtgtcagataccttcccatcctgagctctctcacctacctgctctctctcctagagcaggatactggggtacttttaagaagggtgctccttttaagatgcccagaaaagctgtatttaactcttgctatttgtaacttggggatggtctcccctgccccagggcacataagagcaaaggctccaatggtcagtggatgactctgcaaaagtgaccccctgtgccagaagctatagccctctccccaacaggtctctcttgttggccagagggcctgcttcccatgggcattgcaagtgccaccgtgcggggcctggctctgcacacccaggaaaagtctgcagacccccagccctccgcaataattcaccagaccagaagccactggtgtacagagaacacttaaaaaaatgtattttatgtgaaaaaaaattaaaactctgtatactgtatcagcagctttgtgtaaaaatggcaatcaagagagtctaatatatttaaaacttttttaaaaaaaatcttcgcagatctttgatatcgtactgaggtaacttccacgtagccccttgccacgcggcaccggtgggccttgggtccaaaactgtggctcagccacatcccaaagggggcacatgtccctggagttgcttccagctgccaaggcctgtgacagaattcgctgttaagagtttttaattaaaattattaaattccttttaataacacctgctagtgtgagtgattattgctgtgagctcacttgaacagtgctgacttgaattcacaaagaggaggttcctggaatagagggtgggtgagagctcctagtctcttcccccttaccccacccctttcccacagagggctttcccatgagacccctgaaatagagggagctctgggggctcagacctggagcagatgtctccccagactaggagatggtgaaaactgatgaattcaagaaaaggtgggtggttgggaatgaccttcattctgtcaaataatctctttgaaattaacatgaggccgtatagtagcatatatttattccatacattttcaaagtttttcctgatatttatttatttatttttatttttttaagatggagcctcactctttcacccagtctggagtgcagtggcgtgatctcagctcactgcaacctctgcctcccgggttccagcaattctcctgcctcagcttcccaagtagctgagattacaggcgctcgccgtgatgtccagctaattttttgtatttttagtggagatagagtttcaccatgttggccaggctggtctccaactcctgacctcaagtgatcctcccgccttgagctcccgaagtgctgggattataggcgtgaaccaccacgccccgcctctcatgacatttatatgtaacaagggtgcccctctcctctgtcccattcttggagtgaactgacatgtcctgtcctcttccccctgccccattccactctttcccctcgtgtgcttattgtggggaagtacgatactataaagtacttcaccttatgacagcaatacagcagctaaggccccggccattctcattttttacctcgagcattaaaggcatagagaagctatgtggttgcacagcctcagaccacagtccttggtccttgtcccacacagaactttgttggtgtttttcttgaaagaggatgaaaagggtgtcggatcacaaggtcaggagttcgagaccagcctggccaacgtgatgaaaccccatctctactaaagatgcagaaaattggccaggtgtggtggcatgagcctgtaatcccagctactcaggaggctgaggcaggataatcgtttgaaccctggaggcggaggttgcagtgagccgagatcacgccattgcactccagcctgggtgacagggcaagactccgtctcaaaaaaaaaaaaaaaaaaaaaaaaaagaaggtgctctcttgcagcctcccggaccctggataccagcgcagggacacatggaagtccccacacttattcttgagaaacttcacaaagggatggggatggggagaggagaggtagagagggagaggcgtctcaacagcggcaggcattcatccatttaaaaaggttattggttgctaaataataatggtaacatctcacatttatgacccacttttcatttacataaaaaagatgacgactgaaaattgactgttggatttagctctgtggaactcatgatgaacctgacaagaggttttggtaaagcagtgggggttttagcctgattgaagagggctggaagggaactggagacagcaagtatagacaactggtttgagggtttcttttcttttcttttctttctttctttttctgagacagggtcttactctgtcacccaggctggggtgcagtggtgtgatcatagttcactacagctgcaaactcctgggctcaagtgatctcttgcctcagccttcccactggctgggaccatcatgagcactgccatgcactaaaagttaggcgcaccaccatgcccagctaacttttgtatttttttgtaaagacagggtctcactatgctgcccaggctggtctcaaactcctgggctcaagtgatcctcttcccttggcctcccacagtgctgggattacaggtgtaagtcaccatggccagccacatctgagattctatgctgcaaaaataagaagtgagatggggagctttagaggaatgtagggtcaagagagggttgttttaagatgaaaaatatttcagcatgcttgtaggctgatagaaatgaatcggtaaagagggaagctgatgttccaggagaaagaagaagattgctggagcgatgctggtgagtagtagaggggctggaaatgcccaggcagaggggttggggttggatgggcacaggcacagttcatcaatgcccagtatacgggcagagatgcagacaggaaggtagactagatggccgcacgtggacgttcccttcttactgtttctgtgttcttgctgacatggaagacaagctgtcagagaggaaaaggtagagagaatgagggaaatgcggcctaccaggcagtttttttgtttgtttgcttttgttttgttttgttttgtttttagatggagtttcgatcttgtcgcccaggctggagtgcagtggtgctatctcgactcactgcaacatccgcctcccgcgttcaagtgattctcctgcctcagcctcccgagtatctgggattacaggcgtacaccaagacacctggctaatttttgtatttttagtagagacggggtttcaccgtgttggtcaggctagtctcaaacgcctgaccttaggtgatccgccctcctcggcctcctaaagtgctgggattacaggcgtgagccaccgcgcccggcctcctagcaggcagtcttacggattatgaatttaaaacatgaccagtcagtaagcatggttacgctctttttgttttttcttcagccctgtagggctgccggggtgcaggtggaaagtagggtataaccacggttggttggggttttacaaggcaaaaatcgatgaaatgagagaagactacccgagggtgtaatcaaaggagcagtcctaatacgatgagccggtattctttgaatgaatgaatacatggttaaaggcaggtgataaaggcgatatggttggccatgccaaagcactgagagcctaggagcagcgtggccagagtctccgggagtcggcacctgcctctcctcgttgtctaggcctgactgtccctggccttgcacggccgcgcagcggggcgaccggcagggggcgcgctgggatggccaggagctcggctctccccgctctgtccctgctctgcggcccgcctcgcccctgcaagtttaaattcctcttagcaagcccagcatcgcagccaataacgcatcagggggcggagccgtagaggcttgcgccccgcctcgctccgctattggaaggaaagcagccaatgggagagccgaggcggggaggtgcggccaatggcgcgggcctgtttgattcaaaggttgcctataaagcgggactgcacgccggtttttgtccgagggctgtcgagtccgagcgccgccatggctctgctgtccgagggcctggacgaggtgcccgccgcctgcctgtcgccgtgcgggccgcccaacccgaccgagctgttcagcgagtcacggcgcctggctctggaggagctggtggcgggcggccccgaagccttcgcggccttcctgcgacgcgagcgcctggctcgtttcctgaaccccgatgaggtgcacgccattctgcgcgcggcggagaggccgggagaggagggcgcggcggcggcggcggcggccgaggactcgttcggctcctcgcacgactgctcttcgggcacctacttccccgagcagtcggacctggagccaccgctgttggagcttggctggcccgccttctaccagggcgcctaccgcggcgccacgcgtgtcgagacgcacttccagccccgcggcgctggcgaaggtggcccctacggctgcaaggacgctctgcgccagcagctccgctcggcgcgagaggtgagcggccctccagggccctgggtcgcacgggagacccccttcaagaatgggaaattgaggcctgctgggagtacgggccggggccactacctcctctgcgccctaccggaagcgcgcgcgggctaggtggtcccagggtctccgactcacaccccactctgcgtgtctcccccggatcccccgggccgctcctcgtggcaggggatagtgggaaagcctcggttcccaaggatgcgaattgtgcccgggttccatctcctaacgttcatatccctgaaggagggaccagaagtactctgagttccaaatttcagttaaaatcaaacttggaaaattgcctatttccctgtctgtcagccaacgctagatcccactttcaggagcttcttaggagactcattaccaaagaacttacgcagggaaagttccagaaagatggtctccagagacaactacggggcattaggaagcaattattattgctaattactttcatgcatcttttgctgtaaaaagcagataaacacgagagtggcaaagtgagagccctgccgctttttctttcttgtcttttttttttttttttttttttgagacagattctcttttgcccaggctggagtgaagtggtgggatctcagttcactgcaacctccgtcccccgggttcaagtgactctcctgcctcagcctcccaagtagctgggattaccggtgcccgccaccacgcccggctaatttttgtatttttagtagagacggggtttctccatgttggccaagctggtctcgaactcctgacctcaggtgatccacccgcctcggcctcccaaagtgctaggattacaggcgtgagccaccgcacccggccccctgccgctttttctactgccagagactggaggggaaactggggcaaggggtttgttttccataggctgggtctgtgccagattgcagtggtctcctaaaatgcagatacatttgcattagatcggcttctgtattcatagtgggttttggtcctactgtctgactcttagtatggcatggtcatgggtgcaatggaggtcttgtctgcttgccagcctcgataaagctgcagcagggtgctggggatcaaggaggaagaaggcagcctgcaggtgggtgtggcacatagagtgtcgtggcagacaccttggtctggagccatggtcaggttgcttgctgactggcagtgcccagctccctggctatctgcctgtgccagggacatggcagataaagccccagccatgttaagacttgttagggctggtacctgagtgtgtctgagtgtgggtgaagataccagtgcattgtcaggttgacatgtccaagccccgactctcaccaatgttcttaatgttctttccctgactggtggggtttcagtggtagtggatacagtgacctagtgccttgcctttgagggagtggttgtgggctgcagctaggctcttaccagccctgaggtgctttgggtggactgagggttttttgatgcagcagacattttccttgcgggttcagtgaaaagattaaaaagatggaaaaggcagacttgtgtaggtatgcatccccaaagctcatgtccagtagaacttgagcacttggaacctgaaaaatgtaaagaactggtctgtatagtgagagctgtggattgttctagtcttttgcccagccccaaattttagtgatagcaaaagggcactggaactagaggccagagggaaactattaaactcacgtgctggcgtgaggaggggatggagccaggagctcagactctccctcatctcacgggcattttgtaatactgacatttccagatagaacctgctgccctagtctagctacccacagttccctccgagatgctgtatttggaacctgggcagttttaactgagaaaggtggtacattacctttaaatccaatgagtattggctgggcacagtggctcaagcctgtaatcccagcactttgggaggctgaggcaggcagatcacgaggtcaggagttcgagaccagcctggccaacatcgtgaaaccccgtctctactaaaaatacaaaaattagctggacgtggtggtgcgtgcctgtaatcccagctacttgggaggctgaggcaggagaattgcttgaacctgggaggtggaggttgtagtgagctgagatcacaccactggactccagctctgggcgacagagcaagactccctctcggaaaaaaaaaaaaaaaaaaatccaatgagtattttcagtgtgtccgatagatgccaaattatttgcttactcattgcctgctgtgtatcagacactaccatggctggggccacaggggaaggcatcatccttgccaacacttgagagtggacagtgtgctgatgggaaacagtgaggagtttgctgcaggtactgcggaaagggctaaagaaagaaagtctccggagtggcagtgacctcagagctgggtggggcttgccagacctagggtatgggggctggcccacaagtgtttaaggacctggaatgtttgggggcagccaaattccccacagcgggttagtggtaggagaggaagctggggtaagggatgctgaaatgagttgggtttgagacagtgctgaatttgaggtcccaaagacaatctcttttgtttaaaaaaaaaaaaaaaagccaggccatggtatcatgtgcctgtagtcccagctactcaggaggctgaggcaggaggatcatttgagcccaggagtttgaggctgtagtacactatgactacgctgtgaatggctactgcactccagcctgggcaacacggggagaccctgtctctttaaaaaaaaaaaaaaaaaaagtaatgctttctgtttgccaggcactgttctaggtgatcccaaggaaggtgcgattatcatcttcattttacagctgatagaactgaggcatagagaagttaagtggccccgaagtcatgcagctagagaatgaaggagcctgtactcaaattgaggcacagaatgtctgaaccactgttaaccaccacactccctgtggagggttcaggagcctgtgctcaggtggggagaggtgacagcagatctggtggctagctaagagctactactatttatgggcatgcattgtggacaagggagtggctgtgtcaccttgaccacatcctttgaaatctagtacctgtgacagcgaggaccatgaaggtgtaggtctcaggctgctttcaggatgaaatgagaagctgttctgcatccgtgttctgatagcaaaggtacctaatggtgatatgattgagcactttgaatgggtcagtttctgtgctaaacccttgacctgaattacctcatttaaccctcccaacactgggaggaggctacaattaagaaaagaccaggcacagagaagttaagtaacttgcctgagatcacacagttagcatgggacagagctgggctcaagcccaagtctgtctagttccagctctgaagctcaagtgttttttttttgttgtttgttattattttttttaagacagagtcttgctctgtcacccacgctggagtgcagtggcatgatcttagctcactgcaacctccacctcctggattcaagtgactctcctgactcagcctcccgagtagctgggattacaggagcacaccaccatgcccagctaattttttctttttttttttggagacagagttgctcttttggcccaggctggagtgcagtggcacagtctcagctctcagtaacctctgcctcccaggttcaagcgattctcctacctcagcctcccaagtagctgggattacaggcaccctccactaatttttgtatttttagtagagatggggtttcgccatgttggccaggctggtcttgatctcctgacctcgcgatctgcctgcctcagcctcccaaaatgctgggattacaggcgtgagccactgcgcccggccaatttttgtgtttttagtagagatgggtttcgccatgttgcccaggctggtgttgaactcctgggctcaagtgattcacctgccttggcctcccaaagtgctgggattacaggcgtgagccgctgtgcccggccactgaagcccacactcctaatccctgctgcatacagcctccctgccatgaggaaggattggagctttggtagttttcaacaggctgaaggtttgtaacagttgaagattgggactttttaatttccatgttgcgtattctataaacaggaaaatgacaatgactagacctgtccttttcaggaagaaaacgaggtggtcagtttttagagtaggaggcattaaggctggcagagaacctcctcaacccatcaagtggggaaggtggttcatgatgccaggagaacataggtctctgagtttaggttttgtaaactagagtgtgttttcctctccctgggaaagatagagccagatagatgtttctggtacctggagcagagggatctgtgagaatcttttggtgggtgaatgaaggaactttgaatgccacatgaagggtcccacttaaccccagaggttggggccaggctgcagtagagcacggtcgaacctcagtgttcgctccatgcagctttatctgccttcactgaggtggtctgaggaccaccctgcatcttcaggaatgtctctggaaggagccaggatacgaggctccttgaccagagtataggcacaggaagccagggttacttggtaaatggtagggcctaatcctggctttgcagcctgaagcgctggttctgggataggttttatccagcagctctctgaccacacagaatcactcagtgtgtctgatacataaaagatgctcagtaaatactgtaggggcctattatgtgcacctttgctcattcagctacatgctttgaggagaaataaagggcagggggaagggagcggtagataggaagaaaagtagttcaggtgattctgtctgcctttccactcagcaagtatttgtccctgggtggctgtgcctggggtttgtgaatctgccagccccttccttgactcttgtttctatatacctttcaaagtgtgggcattctgccacactgaatgaggtacagtgtttaaaaacaaatggtttggccatgcgcggtggctcatgcctgtaatcccagtgttttgggaggtcaaggctggaggattccttgaggccaggagtttgagaccagcctgggcaacatagcgagatcccatctctacaaaaagttaaaaaattagccgggtgtggtggcatgtgcctgtagttccagctactcagcaggctgaggcaggaggattacttgagcccaggagttggaggctgtagtaagctatgatcatgccagtgcactccagcttgggtgacagggcaagaccctgtttctaaaaaataaataaaaacacaattacgtatagcatggcttgaatacaagctggctgcttaccaggtgctcaggcgagcttcaccaaaattggaggaaatactgttttgaaccttttgagaacccatatgtttgtttcctaagcaagtttttggataatcttgaattatacaggatattttccctacatacttgctgtagatccacccctccaccactgtatctgttgatgacgcattcagctttttgcctctgttgctgtgtgaactgggatttggctgggctgtggccgcctgcctggaagggctacatagcctcattttggcaatgtgcttatgaattggctgtccggctattcctggtttgttgaatgagagttcagaggcaaagctggtaccaccacgaggttccaattcctcagagtcacgtttcttaccagtgcctattctcttttgttccaaagaggccacttttgctatgacctcaccctcgggcatcctcttgataacctgagcgttagtagtggggatcattgcgttcccagagagccctgccaggaggagtagcagcttaggaatctgttgggggcccctggcatttacttggatgtatctgaatgaaggctttcctgttcttgcaca

SEQ ID NO: 1356 - DNA, 6233 bp, Homo sapiens
agctgcggctcggggacccacagacacagccggggtcgggagccgcccggggcagggctcgggagagcgggccacaccatgaggccccagccccaccagaggccccgcgctgccctggcccccggtgcaccgtgctagcccccagccagggcgttggggagggcggtggccatggccagtcacgtggacctgctgacggagctgcagctgctggagaaggtgcccacgctggagcggctgcgggctgcccagaagcgccgggcccagcagctgaagaaatgggcacagtacgagcaggacttgcagcaccgcaagcgaaagcatgagcggaagcgcagcacgggcggccgccgcaagaaagtgtccttcgaggccagcgtggccctgctggaggcctcgctgaggaacgacgccgaggaagtacgctacttcctgaagaataaggtcagccctgatttgtgcaatgaggacggactcacagccctacaccagtgctgcatcgacaactttgaggaaattgtgaagctgctcctctcccatggtgccaatgtgaacgccaaggacaacgagctgtggacacctctccatgctgcagccacctgcggccacatcaacctggtgaagatcctcgttcagtatggggccgacttgcttgctgtcaactcggatgggaacatgccatatgacctctgcgaggatgaacccaccctggatgtcatcgagacctgcatggcataccagggcatcacccaagagaaaatcaacgagatgcgggtggctcctgagcagcagatgattgcggacatccactgcatgatcgcagcgggccaggacctggactggatagatgcccagggtgccacactgctgcacatagctggagccaatggatacctgcgggcagctgagctcctcctggaccatggagtgcgtgtggatgtgaaggactgggatggctgggagcccctgcatgcagctgccttctggggacagatgcagatggcagagctattggtgtcccatggagctagtctcagtgcaaggacatccatggatgagatgccaatagacctgtgcgaggaggaagagttcaaggtcctgctgctggagctaaaacacaagcatgatgtgatcatgaagtcacagctgaggcacaagtcatccttgagccggaggacctccagcgcaggcagccgtgggaaggtggtgcggcgagccagcctgtcggacaggaccaacctgtataggaaggagtatgagggagaggccatcctgtggcagcggagtgcagctgaggatcagcggacctccacctacaacggggacatcagggagaccaggacagaccaagagaataaggaccctaaccccaggctggagaagcccgtgctactctccgaatttcctaccaagatcccacgaggtgaactggacatgcctgttgagaatggcctccgggctccggtcagtgcctaccagtatgcgctggccaacggggatgtctggaaggtgcatgaggtgcctgactacagcatggcctatggcaaccctggcgtggccgacgccaccccgccctggagcagctacaaggaacagagccctcagacgcttctggagctgaagcggcagcgggctgcagccaagctgctcagccaccccttccttagcacacacctgggcagcagcatggccaggacgggcgagagtagcagtgaaggcaaggcccccttgatcggaggcagaacttcaccgtacagcagcaatgggacctcggtatattacacggtcaccagcggagatcccccactcttaaagttcaaggcccccatagaggagatggaggagaaggtgcatggctgttgccgtatctcctagtctccgtgtgatggaggagggagatgcctggggaggggctcctggaatccaggccagcccaacagccctggctggggaggtgtcagggcagctggggagaggtgggctctgcttttcagaggaactcagaccccagccctcagctggctgcccatagcatcccatgtcccacgtcccgtggttctgcttcctgctgcatcgtctgccatctgacacaaggcctgtcgtggcctcctggttcactctgctgtctgatcttgggagggtgggcttgagatcccagctctattcttggtataaaggcttctccggatcagtacatgcatgtcacattaacacacacacacacacacatatacacacacacacaagctcgatcagtgtgtgtaggaatgacatacctgggctcaggggaagcaagggggcttagaatttgtggggtattcccaaaaggatggaagttaagactcagagtctcattaccactgccaatgtggttttagcaggggaggggacctgctaagctgagacccatagtcctgctcagagttatcccaaagtctgagccaccagccacacctgacaggggtgagaagtcctcgctgtgttcagagggagccaggaatctacatgggtagatgagatagacacagacctgctccccgcagccttgttgagagccacacttctgcccatgccaggagccagctgtgtgaccatccaggggtggagggggaaaaccaggcaatttcgttcctggaatcaaccaaatcatgttttcctcttggatggaagtgtcaaaggcagaagggtgtgggagggggacaaggtcagtatttaccaaagtgtatctgattttaaaaattcctttagtctgtaaaactcctagagggagggaggtaactgaattcacttctttttgtggatcgtatcaaggtcactgggttttactggctggtgctgggaaaatgaagctaagtgaggagcttccattggaatgcttttccagggagagaggccagttaatttaaaaaaaacagtcgctagttaacagcgacagagcccagcaccctggggtctttgtgaatatccagactgtttcagcccagcccatctcagccaaccctccttagactgagctgtcagagcaagcaattaggggccagcctgcctccacctcccacccccttccacctccatcagtcatgtgtgcagagtcagtgctcgggatcccgggcccagcttttgcctttttggggatgcttggtgagacagatttgccagtcagcccttttgagttcccgcctcacccaggggctcccagcctgcacttgcaggagtggtgatgccccaagtctgcgaatccagggtgcacgtggtcaatatcccctcctgcattcaggagagccatggtagggctagagttgggtcttgcccagccctgcagtttcatagtcccagccttcctggtgctggggagggaggactgtgaatggctgttctcccctcactgctgagtctcccaggaccccctttggagatgcccatggcatgggcactgcccacaggctcagccagaacctcttggtgtacccgataagctgcaggttatcccttgctctgtgcgccttttatttgtccttaaactacctccttagagctctgaaggggtctcctagttccagattttaatttggggaacagatctgggttctttttaaccctcttctttctcagtctatgagaaacttgccctgaggggcacctgggctaggggcttgggactggaagaccatccccgccttgtgccacaactttggtcatgggatctgctctttgtcattcttagccccctactgtggcccccatagccccataacccagagagggagctggacttcagggagcctgagtgatgctttcccaggagcagggcagctggctggaccagaaagtagagggcccatgggagtgactgcacccttggtggctgctggaaggggagaggttctcagcatcaggccacctccaccccaatgccaggatagatgtattctagagtaggggtggaggcggcccaggaggctgaagacaggtgcacagatgcttcccacgaccttgccatttggggtgggctcttcaacatctcaggctgtggctggaacaggacaggatgatctaaaacacacgtaccattggctgtaaaacagtatgagcccagactgacgctgaaatccctcatgagccaaccttagctacaaggtagggagttctgagggaagccgcgtgctcctcaggagagagctgtttaggttttccgatctttttgctcaggggccaaacactgaaggcacgtactgcccaacccactgagcgcctgaggccattccctccttttccgcatgcctcctgcctcctgggctattcctctccacccagaaggctgggaatcccagctgattccctgacaggagccgacttcacacacaggtgactctcaggcattggctcatgttttcagccagggataaaccatcccttcttggggctttaagtccctggggagctttccctgtaggtctcctgggtgttgagagacaagttggagaccaacctccaatgaatgagccgcggtcattcattaattcactcacgtaatttactgagtagctgcaacatgccagcctctacgttaggttctgcggataaaggaggaataagacagagtcaggagaactgttccttgtggtttccgtcccttggggaccacaggcatcagcagtcccattcaagtcacctgaggcaaagtgtctgcatcttcgtccagcgaccctttgcttttcggctcctagaatccttagagtctgaattcctttagctgggaacagctgtcatggtcacccctggataacatttgccaccaagtatagatgctggatcttgggttccaggcagacatcatccaggtccatctggaactttcagtgatagctgccttcagccagcatctttgggggactctataatagcagcttgagatcagtgtctagaagactgttctgcaatttgctgccaaatgcatctcaggtttttaaagtcattgtttcttgctcatggtggctcatttattacatagtcccctcaccccactaatggataatgggaggaaaagttgctgcttccttcagcatcaaagcctttccttgggaatctgcctccctccatggcaggggtggattcgggagctgggagtaaccaggcaaagtcaaccagatgcctagctcctgctgagacccaggtcctatggcagctcctcattagattaaaggagaccacttccaaagcaggtgctgcatggctcaccatcatatgccccaaacaactgaaagttggcggttatcaccagactgtgagtttctggcaagtagcttggggaagctgaataaactctaggcccagggctactaaagacttcaggatagaattctccatcaaatatacagcataagtaaaactgctctgcactgtttaatccatttccaaggggcttagaaaagctaacaagggtgtgtcccctgtcctgccccaccggtttgctggctttgtaataacataagaccattgtggttgttggtgtcagataccttcccatcctgagctctctcacctacctgctctctctcctagagcaggatactggggtacttttaagaagggtgctccttttaagatgcccagaaaagctgtatttaactcttgctatttgtaacttggggatggtctcccctgccccagggcacataagagcaaaggctccaatggtcagtggatgactctgcaaaagtgaccccctgtgccagaagctatagccctctccccaacaggtctctcttgttggccagagggcctgcttcccatgggcattgcaagtgccaccgtgcggggcctggctctgcacacccaggaaaagtctgcagacccccagccctccgcaataattcaccagaccagaagccactggtgtacagagaacacttaaaaaaatgtattttatgtgaaaaaaaattaaaactctgtatactgtatcagcagctttgtgtaaaaatggcaatcaagagagtctaatatatttaaaacttttttaaaaaaaatcttcgcagatctttgatatcgtactgaggtaacttccacgtagccccttgccacgcggcaccggtgggccttgggtccaaaactgtggctcagccacatcccaaagggggcacatgtccctggagttgcttccagctgccaaggcctgtgacagaattcgctgttaagagtttttaattaaaattattaaattccttttaataaca

SEQ ID NO: 1357 - protein, 563 aa, Homo sapiens
MASHVDLLTELQLLEKVPTLERLRAAQKRRAQQLKKWAQYEQDLQHRKRKHERKRSTGGRRKKVSFEASVLEASLRNDAEEVRYFLKNKVSPDLCNEDGLTALHQCCIDNFEEIVKLLLSHGANVNAKDNELWTPLHAAATCGHINLVKILVQYGADLLAVNSDGNMPYDLCEDEPTLDVIETCMAYQGITQEKINEMRVAPEQQMIADIHCMIAAGQDLDWIDAQGATLLHIAGANGYLRAAELLLDHGVRVDVKDWDGWEPLHAAAFWGQMQMAELLVSHGASLSARTSMDEMPIDLCEEEEFKVLLLELKHKHDVIMKSQLRHKSSLSRRTSSAGSRGKVVRRASLSDRTNLYRKEYEGEAILWQRSAAEDQRTSTYNGDIRETRTDQENKDPNPRLEKPVLLSEFPTKIPRGELDMPVENGLRAPVSAYQYANGDVWKVHEVPDYSMAYGNPGVADATPPWSSYKEQSPQTLLELKRQRAAAKLLSHPFLSTHLGSSMARTGESSSEGKAPLIGGRTSPYSSNGTSVYYTVTSGDPPLLKFKAPIEEMEEKVHGCCRIS

SEQ ID NO: 1358 - DNA, 76738 bp, Mus musculus
  misc_feature (1)...(76738): n = A, C, G or T/U
aaacattaatcctgagcaaaagctctgtaaagcttctgggcatgtctttgatgttgtcagaactgtcctgcagtctccattttgggaaacagtactatcctggatttagtaattaaagccataaagttgagctccatccttaaactctgttccttatgtgcagctcatcagaaacctgctgatgcctcctgcttccagaacacagagaaccttctccattgccagcagcccactgtgggcactaaagcggacttctataccagccatttgttttctttttctgctcatattctagccctactactatccatttgacacttcacccagagtgctcttttttggaaacctaagtcaactatgttagtgtcttttttcactccctcttacttgaaccccccctccccccaccccatttccatctcttgtatcccaggctggccttgaactcattatatagccaagaatgactttgaatttctgatccttctacatctattctcaagtgcaaggattactagcatgctgacattaccgtctccagttttatgtagtcttagaccaattgagcatacagccctcattttaatctgttggtttcttagtgtttgttagtttggtttctgttaacatttataaaagaggatccgataagcaattttctttgtgggagtggggggatgttgtgaactctactaatggtattcaagagagtagggttccctaagttcctccctcctcctggggatctgggatggaaactgtaaagggagatgcttagtgttgggacaggaacttttcagtaactgagggcctttttcttcctacattcttgctggggcacgtggcccagggctccttactccttggaggctctgtaggccatgaggaccactaccctgttgctgtagtcatattcattgtcataccaggaaatgagctttacaaagttgtcattgagaacaatttcagccccatcatcaaaggcagaagaggaggcatcactattaagtagcaggagacaaccttgtcttcagtgtagccaaggatgcccttttagtgggccctttgatgactgcttcatcacattcttgatgtcatcatacttggctttcttcaggcaatatgtcagattcatgatagatacattggaataggaacacataagtcagtgagcttcctgttcggttctagtatggccttgcccacagccttggcagcaccagtggatgcaggaatgatgatctgggcggccctatgatcatcatgctagagcttccagaggggccatccatagttttctaggtggtagtgatggcatagactgtggtaattagtcctttcataatgccaaagttgtcatgaatgaccttggccagggaggctaagttgatggtacaggaagcattgctgacaatcttgagtgagttgtcatacttctcatggttcacacccatcacaaacatggagacatcagcagaaaaggcagggattatgacctttttagcccaacccttcaagttggacaggccttctccatgatggtaaagacaccaatagactccacaacaaactcagcatcaccccacttgatgttggtgagatctcactcctggaagatggtgacaacctttgaaaatgacaagctttcctttctcagccttgaatctgctgtggaacttgccatgtagagcctgtaggccatgtagttgagatcagtgaggaggtaatgatctgtctgctggagttgaaggaagccctggtacccaataaggccaaatatgttcactctgatcttcatcattatgtcttagggataggggtggcactgcatgagaagacatgggtgtctctggaacaggaaggagcagagacagataagcaattttcaaattataactgcactgaattttctagagagcttttaaatatacaaacctgggcccacttttgtcagtattggctcagttgaattgtgtggtctagagaatgttttaaagaagctcccagataattttgtgtgatcatattggtagctgaactgggttcttttaactcaagtgggaatgaccattctttcagaagtagattcaagctacaggtacccttgtcctaagaagtactggatttagagccagcttctctctccctctctctctttctctctccctccccctcttctcctccatcttcccccctccccctgtgtgtgtgtacatgcgctcgtgcatgtgcacatgccttgtgtgctgctatttcttcactctgtagtcctagcacctatgtgggtggtctccccagctcattccctccttcattgtagagagctgttctactggcttttccttatgagaacattagaggatgcagctgttcactagacctttaattattctctcggcgatccctgtctcccttctacttccacatcagcttctactgtgtgaattcaggtttgctttccccagggttctgtgggtaaacacacattcttgggggttctttctttttgcttgattcagattgagtttttttctacatgatcttgatttttaatttttttatatcgtcagtcatcactctgataacctttttctgttatactgtgccacagtataatccttttataatatattcttataatcggtattttacataggacattttaagagatggaagaggggcctagagagatagttggtaaagtgcttgctatgcagtgtgagtttattagatccctagtatccacacaaaaagtttagggatggggtgtgtctgtgaccacagaactggtatattgtgagtacagagacagatggataccaaggccagccagttaaactgaaaaacagtaaccatcaggttcagagataggctatgtctcaaaaaatagtgtggagagtgatagaacactccagctgtccacttctggtcttattcatgcatttttgggcagacctgacattacacatgtacaatgctgaaccaaaaattcttgacactttttgattatttctgaaacgtgtccaaggaatttagcatactagccacagaagaggggcaatggctgatttaaccaaatggaaaaaacaattctattctgttaatgaaaaatgcatttgaagctgttagatgctgttttcttgtatcaaattagcaaaacatgtttgtgtgtatgggtgtggatgttatgatagggagtggatgaggggtggaaagtgttgcatacagagtataggacattgcatgcaggcaaaagagtagaagacatacttctagtggaatgcaaagtggcacagtgtagcttggccagatgggtcttagaatgtttttagaaatgctttgacccaagaattttcaaattcttgaggtctattataagaaaacaatcatgatgaaagcattaatttacatgcaaaaattatcaaaggtaatatagatcagatttcttagaattagagatttattagattgatgtacagctatgatccagctaatccaacaatggctatctcacagaatcaagttaatggaagaaagacttattttggcttatagttcctgtgatggctggctttatgtaaacttgacatgacctagagttatcaggagtggagggagcctcaattgagaaaaggcctctataagattcagctgtatggtattttcttaattagtgtttgatgggggaaggcccaaaccaggatgagtggtgctatccctggactggtggtcatgggttctataagaaagcatgctgagcaagccatgaaagcaagttcttaagcaacaccctcttccatggcttctgtgtgagttccccggctctaggttcctgccttgcttgaattcttgcccatactgcttttggtgatgaactgttatatggaactacgagtgaaataatgcctttcctcttcaagttgcttttggtcattgtgtttcatcacagcaatagtaatgaccctaactaggacaattccaaaggtgtcagtcatggttgtcagactccacatatctggcatggcaccatgctctcagtgtgtcaaaaagacagttctttacttgttggtaggtggaaagcacaaagaggggaaaatacaggaagagttcaggaaagggcaattcccttcctcccccttcctcttcctcttcacctaatttctgtcaccatactataaataccacctggtagtccccagtgatagaactgcttttggaaacacctggaggtgtgcttttacctatctagatgtttctaaagccagacagtcaaaattgactatcatagagtactcttctatagtctcaaatacgattctgtatcgcccagtttgccatatggaatatacatggctttataatctgctttatttttacaaatgtctatccttggtactgtactttatattttcaacatacctaaaatatttgatatggaggggtgtttagagttagagaaacttgaaagaaatgcccatgtaattaagttagaatttattaagtgaaggctggtgtcttagagttccaattgctgtgaagagacactatgactaaggtaactcttataaaggacaacatttaattggggctggtttacaggttcagaggttcagtccattattatagtggcatccaggcatggtgctggagaaggagctgagagttccaaatctaaatcagaaggcagccaggggaagactggcttccaggcagctaaaagaagggtctcaaagcctaccctcaaagtgacacacttcctccaagaaggccatccctactccaacaaggccatacctcctaatagtgccacttcctgggctaagcatattcaaaccaccacaactgaggagatggctcagtgggtatagtgattgcacaataatgaaaacctaaatttaagacccataggattcatataaaaactgggtgctgttgtgttcacatgtaacttcagtactagagatggtgtcggggcaggtggatacctggagctctgtttagctagtctagatgaaacagctgcgtcttgggttcagtaagagaaactgtctcaaaaatgaggtgggtagtgatagaggagaaaaacctgatgtttgttaacccctggcctctgcaagtgcacgctcatgcatagaacacacacagagtaaataattaaagataaaattccatacaactttaaaaagatacattactgtttcacttatagatatatatgtatttttagatttattgttaatattttatgtatgtgagttttttgcctctcatgtatgtctgtgtatcacatgcatgccaggtgcctgaggaggtggtgagcctccatctgggtgctaggaattgaatcctgatctttttcaataacaacatacactcttaactactgatccaactatatggccccgtgtattttaattttaattacatttattgtgtgtgtgtttctatgcaaacatgcaatatcatgcatgtggaggtcagaggtctgctttcaggagtgagttattacttctagctgaagtgagttctgggaattaacctcaagttgttgggcttggtggcaaatgctttcatccatcaaaccaccccactggccttaaagatataagaatacacagttttcaaacatcttacctctatctcagaaccacataataatgatacacaactacttttgtgtcattttttaaaagtcctttgaacttttaattttttaataattgaggtgtgatttacatagataagacatatagatataaaagaaacaaacaggtgtttttctttctgtaggtctggctgtcctggaactcactctgtataccagactagcctctaacgcacagagatccacttgtctctgcctctgctgggattaaagctgtgcaccactaccgcctggagattttaactgcagttttgagaagggtaatcagtattccaagcactctcatacaaaatgttcttgtcaacttgaaaagagcttttatactctcattgtcattcagatgtaatctcttttgtaatttttctaccatcagagatttcttgttttccctaaaattctatataccagagttatatatatattcttttctaagattcatttgttcaataagattttgagttcaatatgatatatcaaataaatattattttttattgctaagtagtgttccactgcatacttaccacaatctgtccattctcatgttgactgaccatgtgttcaggtactggctactttaaaattgaggcttatcagtttgtagctgtttcacagagctcagcatgccatctgcttccccttttctgcctggtgaggcttgcaaacctggcatttgtcttgcaataaagggttggttttcagacacttacaataaggaccaccacagaaagcagagaacaaaactgaagttgcagatggccacatcagcaattcagctattaaacaccaaatagcagccttcaaatcagtgagaaactccatttacaaacaggaaaagagaaaaagcaaaggaggaagaagaaaggaagggctaagttttaagaggttattccagttaccatccaatggagaagccaatgcatggagtcaaatcacagcagtagtcgcaatactggagttagtccctagccagccctgcagcaagtgtccctgagtgcctggctcccttctgctttagtcttcagggttgaggagcactaatgcttcaaacccttgctgggcagcccttgtctacctttccagcagaagtgaaataatgaaaagcctcctcttggctcctggaaataaaaagcacagagtcaagtaagtgaagtaattgaattgtcctgtgcttgggtatgttgtgctatctcagattagagattctgaactgggggtttgagaagccaaggttgtctctctgacagactagagtgtaccacctctgcccccagcttgtttcttgtagagtttaggcagttcacaagagcctgtactccatgtgtgcatacacatgtacagacacacatatttgcataaatataaacaccaactagaaagcttcgtgttccacctgttcccaagtcttgacattaagttcaggtgaactgagagcagctagagtagaggagtgtgaagcagggcaaggtgcgatttagttatcttgttgaaagcactggtacagggagggtgactgtggctgccctggaggcaggaccaaacagaaagccttttctacctactgtgtcaggagggctttctggttctggagcagaaattgacagcagacacaggtgcaacagcaattccttgcttcatagactcagtcttccagtcttaaatgacttgtacttttggggaccatacaatttcctggaagttgctagtcttagaaagcactacagttgtttttttcctgttaccatatctctttcagtttaaattttgatgtgcaaacaagaaaccgattgtgttcagcccaaggaatatctataacatcaaatgactgttttctcacagacctcagccaacatttttcaagaaaatactttttaaagagcctttaggttgaagagagaacttagaggttaagagcactgtctgtgtgctgttgtagaagacctgagttgttcctagcacccacatcaggaagctcacagcaaactataactccagttgcaggggatccaattacatgtgtgatacacacacacacagtgacatatttttgcacaaatataaagtaaatattttttttaaatctaatacacactacccttcatattagagaaataaaagtctgttttagaaatgatcttctttttattaattttattctggatagttaaagaaaagaaaaaaaattctttggggacagagaaatggttcagcattgaagtgcccgtggtgcaagctggtctgacaggaattcactgtgtcagaggtccttggatagtcatggcaatcttgaaaagtgaagtcggaagacttgcatgtctgaatttcaaaattcactacaaagatgtaataatcaaacattatgattctggcatgaatatgcatatagatacaaggaataaaactgagaatacagaaaaaacccttctgagtgttgccaattatttttcaaaaggcttttaagaccattcagtagtcaaagaataatgttgttaatagtggtgtagagacaaatcgtatcttcatgtaaaacagtgatgttatacccaaaattcacaccatgtgctaaagtcaaaaggaatcaaaggcccagttataagagcaaaactatgatacctaagtaaacataaaggcaaatctcttttaaaaattattttatgtatatgagcattttgcctgcatatatgtacatgtatcgcatgcacatgtctggtgcccatagaggccagaaaaggggatcagatcacctggaactggagttatgaatggttgtcagccaccatgtaggttctgggaaccaaacacaggtcctctgggagagcaacaaatgctcttaagtgctgagctaggtttcctacccaaaaagcaaatctttataaatgttataatattatcagtcagtgtaactgagagtaagcactcgtgtgccacggcacaactgtagaagtcagaggccagttagggttttgttctctgtctactgttggctgtacgcttgaactcaggttctcaggctttggtagcaaggtctcttacctcctgacccatcttactggtcatcagtaaatcttgttgatcttggacccaatcagtaaattaaaaaaattggcaaattagagcacatcaaaatttaaaacttttgtggaccaaaggatgctatcaagaaaataccttacagaacagtagaaaattgaaaatctcataagagcctgctatttgtcatcttagaactcaacaactaaacaacctaatcaatatgggtaaaggacttgagtaaatttttctaacgaatatatacaaatgtgtatgcatgtgaaaagatactcagcacattagttattgagaaaatacagatcaaactacaatgacgtaccatttcatatccacaggatggctatatccttgagagcaaagcaaaacagaaattaataaagttataagtattgatgaggatgtgaagagtccccacatgtactttgctggtaagaatggagaacagtgtagcttctgttgacaacaattcagtaatgccctaaaaagttgaatgcagaattttcatgtgacaaagaagtttcaccctcaggtatttaccctagtaattggaaacatgttttcaaatatttaatgtttataaatagttttattaatagcaatgctattaacaatggccaaaagattaaaaacaacctggtattcatcaatacataaatcagtgaagaactgtgatacgtacagtgggtttttcatggtaaaaagaaataaaatggtgatacataatacaatttagatgaaatacagtgttaactgaaagaagcagacatggagggtcatgttacatgattctgttgatatcagttattccaaggaagttaagcattgtagctcataccatgtaatcacagcatttaggagaatgaaggtcgtctgagagttcgagactagtctgggtatatatagtgagtttcaaaacaacagaaacaaaagaagtaacccaaagaaataactctaaaataacataaatcaaattggtgatttctagggattaggggtgggtgctggtaataactgcttatgagtacaaggttttatttttaattgctgaaaatattttgtgaatgggtagaggtaattgttgctcagtgctgtgaatagtctaaataccactgaattgttcatttatgtctatggtgagtattacattatgtagattttgcttattaaagattacatcataggctttctgtgatctcacaaataactataggtttcctgtcatagttaccttgtgacttgttggaatccacatgattttgtagcattgctccattgggacatttctctctgtgggtggttaatcttaaagacagatggtcctaagtgggtttcttcctataataacaattaaggaatgtagttttgacttatcatttttatttgattaattttggaaaacatctaccttcgattaataatttaaaatataggctggtctgacattgattagcttctttatttagcctgtttaaaccagctttgtcttgtttaggaattcagcaacatttgatttatgaaaatgtgtagaaagcaatgcagttgtattttggggggtggggtgggggggtggcttcttctgtgctacaggtaggaacgttcgttttactctgcaactactgtgaatgcttcttggtaccaggagaattggtgttgcaaaaagaaattatattttcagttcaatcaagcacattttgtgcaaaacttaaacacattgatttcttcattgtccacctgctttgtgtttttgaaggatgcattctgtcagtggagctgagggtgagaagagcttctcacacagagataggtgtgtgttggtcatgaagcttttcttcaggaatgaagccagtggcttctagcccataggcactgctgtattttatgggtccttgtcttttcagatatgtatatgttagttgtcttgtatacctgatgcttcttatgacaaaaatacaccatccaggctaaagagtctagagctttgaaacaaacaatattcaaatggtctgtagtgaatcaagctgtttgctgcttacattattagcattgtgtccctgccagctgaactggaaagtgaagaagtgtcttacttatattgtgacttcaaagttaaaggtgatttggtgaacaacaaaatagctataaataaatagaataagttagaggtgagtgaatgtaattgtttatgataattattgcttctgattttcacatcagatattctttcttttcaggaaaaaatacttatttttattttatatgtatgagtgttttgttttcctgcatgtatgtctgtgtaccacatgtgtgcctgttacccacagaagatcccttagaactggacctacagatagctgtaagctgtcatgctggtactgggaactgaatccagggcttctgcaagagttggcagtgctcttaatcactgagccatctctctagactccagattttcttcttcttctgttcataagataattttctaaaataaaaaagtcagagaattatgaattaggtttttaataaattatgaattaggaaaaacccagggaaacaaaagcgaaacagtgatgagtgttcaatgtactggaaaattaaaattaaatttgcttgcctgtgaaaagcatcatagtacacgtggcatggctaaaataatttactgaatttctgtgtgtcatcatctgggtattagaacgatagaatttacatactaagatcatggtaaggattatatgtgctaatgtagctgaagctcctagtgcagagtagaagcagtaggaaaggcgtaagtgcatgttaggataaaagaatgctggtaataaattgtagccattttggtttgtttgtgagggccaaacctgtttgtattcatagatattcacaaccctgatgcccttgtaatgtagcaagatgtgaatatctgaaacttcaagcccttcttactagcatactcactttgggtccattttgttttgttttttttttccattttttattaggtatttagctcatttacatttgcaatgctataccaaaagtcccccatacccacccacccccactcccctacccacccactccccctttttggccctggcgttcccctgtactggggcatacaaagtttgcgtgtccaatgggcctctctttccagtgatggccgactaggccatcttttgatacatatgctagagtatcaaagctagagtcaagagctccggggtactggttagttcataatgttgttccacctatagggttgcagatccctttagctccttgggttctttctctagctcctccattgggagccctgtgatccatccattagctgaccgtgagcatccacttctgtgtttgctaggccccggcatagtctcacaagagacagctacatctgggtcctttcgataaaatcttgctagggtatgcaatggtgtcagcgtttggatgctgattatggggtggatccctggatatggcagtctctacatggtccatcctttcatctcagctccaaactttgtctctgtaactccttccatgggtgttttgttcccaattctaaggaggggcatagtgtcgacacttcagtcttcattcttcttgagtttcatgtgtttagcaaattgtaccttatatcttgggaatcctaggtttggggctaatatccacttatcagtgagtacatattgtgtgagttcctttgtgactgtgttacctcactcaggatgatgccctccaggtccatccatttggctaggaatttcataaattcattctttttaatagctgagtagtactccattgtgtagatgtaccacattttctgtatccattcctctgttgaggggcatctgggttctttccagcttctggctattataaataaggctgctatgaacatagtggagcatgtgtccttcttaccagttggggcatcttctggatatatgcccaggagaggtattgctggatcctccggtagtactatgtccaattttctgaggaaccaccagactgacttccagagtggttgtacaagcctgcaatcccaccaacaatggaggagtgttcctctttctccacatccacgccagcatctgctgtcacctgaatttttgatcttagccattctgactggtgtgaggtggaatctcagggttgttttgatttgcatttccctgatgattaaggatgttgaacattttttcaggtgcttctctgccattcggtattcctcaggtgagaattctttgttcagttctgagccccatttttttaatggggttatttgattttctgaagtccaccttcttgagttctttatatatgttggatattagtcccctatctgatttaggataggtaaagatcctttcccaatctgttggtggtctttttgtcttattgacggtgtcttcttcggtgaagtagctggatataaaataaactcaaacaagtcaatggcctttctctatacaaagaataaacaggctgagaaagaaattagggaaacaacacccttctcaatagtcacaaatagtataaaatatcttggcgtgactctaactaaggaggtgaaagatctgtatgataaaaacttcaaatctctgaagaaagaaattaaagaagatctcagaagatggaaagatctcccatgctcatggattggcaggataaacattgtaaaaatggctatcttgccaaaagcaatctacagattcaatgcaatccccatcaaaattccaactcaattcttcaacgaattagaaggagcaatttgcaaattcatctggaataacaaaaaacctaggatagcaaaaagtcttctcaaggataaaagaacctctggtggaatcaccatgcctgacctaaagctttactacagagcaattatgataaaaactgcatggtactggtatagagacagacaagtagaccaatggaatagaattgaagacccagaaatgaacccacacacctatggtcacttgatcttcgacaagggaactaaaaccatccagtggaagaaagacagcattttcaacaaatggtgctggcacaactggttgttatcatgtagaagaatgcgaatcgatccatacttatctccttgtactaaggtcaaatctaagtggagcaaagaacttcacataaaaccagagacactgaaacttatagaggagaaagtggggaaaagccttgaagatatgggcacaggggaaaaattcctgaacagaacagcaatggcatgtgctgtaagatcgagaattgacaaatgggacctaatgaaactccaaagtttctgcaagggtccattttgttaattggcattttaaccaagaagaatgctttggtaaaggaatatagaactcaaaagcactgtgtttttaagtcctttctcagtaactttaagaactcataaagcatctttggtggttttggtttaaaagactttgctttattccttcactataaattgccatatgcctaacattgcccgtgggcaaaatgggatgaagtagatgcaagaatctgagaggagaaagaaaaatagttgttgcttggcctagaatgaaaaaatatatatgtgtgtgtgtgtgtgtatgtgtgtatgtacatatatatatatatacacacacatatgtatgtatatatgaatagatagatagatagatagatagatagatagatagataggtagatagatagatagatagataggtatgtagataggggggacacatgtgcctagggcttcaaaggaagaaaaaaaattaccacatctttaggttatcctggaagttgaaggccacatgcttatcagctaattattgctgtcagattgccggaagcttaactagagtgggggatgaagagattttaatgaatcatcttgatttgatggctgagctcactgacctgtgtttgtatgctccagtctcagttttaagtagtcagagctcacatcagtgatccagcagcactcgcagttgctgtcaatcatcatgtgcattttaatgacctcacttggctctgtgcacctggtatttgtccagggctctgataatgaattaggaaagattaaggaagttagataagtggacttcctagaaatgtgctttcttttcttgtgaggtgatggaattatgcttcttttacagggctgaattgcagctacagaggcagcaaacgactccttaaagatgccacaggactgcagaaagtgaaggggaccttggagaagatgatgaaggaaaaagaatgtttctcccaaggacaagaagtatgtctgtattttaacaaaattcttgctgtatccagtacaaagtctgtaatgtctgaggtgtgatagccatttttagtttttattactgttacacattctttttttcatagtatggtggtgtagtggtgatggtatcatggttacaagtctcatgtagttttggtctgcacctccaaatgccagcatacacacttacacactagttggttttaatccacacttaacaatgcatggaaagtatctctctttaaactttcatttcttttatgtgctattttcccaagtttatgggtaccttttctttctttttgtaattacatttgccagtactatcacttttagtttattcacaaatattcctagttgaaatattaaactttcattgggcagtggatcacattttttgatttatttattacatataagtacactggagttgtcttcagacccaccaggagagagcacccatctcattacagatagttgtgagccaccatgtggttgatgagacttgaactcagtacctccagaagagcagtcagtgttcttaaccgctgagccatctctccaacccatgtggttcacatttttaattccagcacttggcaggtagaagcagggagatctctgagtttgaggccagcctggtctgcagagtaagatccaagacagccagggggtaccatagaaaccctgtctcttgaggccccagggaagggggattctggcggggtggggaacagagggagaacaccctctcagaggcaaggggaagggggaaagggatgaggaactgtgaaaggggggactgggagggtggctacaactggaaggtacataaataaaacaattttttaaaaaagaaaccctgagtaatagtgtcaggccttgggacctctccttgagctggattccactttgggcctgtcactggaccttcttttcctcaggctcctcttcattttcatccctgtaattctttcagacaggaacaattatggatgagagatgtgactgtgggatggcaaccccatccctcccttgatgtcctctcttcctactggaggtggactctgtaagttccctctccctactgtcaggcatttcatctaagatccttctctttgagtcctgagagtctctcacctcccaggtctctggtgcattctggagggtcccccaatctcctatttccctaggttgtctgtttccattctttctgctggccctcagggcttcagtccttttccctcacccaataccagatcaggttctcatctctctcctacttccctcccaggtccctccctccctccccacttgtgattgctttcttctctctcctaagtgggactagggcatcctcacttgggcacttcagttttttgagttcggtggattgtatcttgggtattctgtactttttttttttggctaatatccacttagtgagtacatgtcatgcacatctttttcagtctaagttacctcactcaggatgatattttctagttccatccatttgcctgcaaaactcaggatgtcctcgttcataattgcagagtagtattccattgtgtaaatgaaccactttttctgtatccattcttctgtcctggcacgtctaggttacttacagcttctggctatcacaaataaggcctctatgaatgtagttggagcactcacaaaaagggacctatcatgactgccctccaaaagacccaacaagcagccaaaagagtcagatgaagatatttgtacccaaccaatggacagcagcagctgatccctgttgttgaattagggaaggctgatagaagctgaggagaagggtgatcttgtaggagaaccagcaatctcaattaatcgacccccgagatctctcaaacactgaaccaccaaacagacagcatacatcagctgatatgaggcccccaggacacatacagtagaggacatccgggtctgtgttcattcagagatgatacacctaaccctcaagagactggaggccccagggaatttagaggtcaggtggggaggggagtgggttcatcatgtggagacaggggtggggaggagatatgggatgtggaacagtcgaaggttggatggggtggaataaaatatggagtgtaaaaattaaaaaataaaagaaataaataaaaaactcctgtcttgaaaaaaacaaaataataataataacaacaataacaataataaaaactttcttgggggttgtttctttgagtcagagttttgctttaaagctcatgctgctcttgaatctataattctcctgccttagcttttaaggagtattaaagttacagatgtgccactaaagctggctttgaaacaaaacctaaaaaaataaaagaaaaacatcttttgttttttcaagatagggtttctctgtatagccctggctgtcctggaactgacttggtagaccagtctggcctcaaagtcagagatccacctgcctctaccttccaagggctgggatttaaggtgtgtatcaccatgcctaattacaaaaaaatatttttttaaatataaagggtttttgtaaagtaagctgttccttagccagtttctttctgaggcagcagtcctgcagctcccagtgaatcctttcagagtggtgtctggcatgataacatgtacctgtaataatcagcactctgagaggaaaaaggattatttccagtctgagattagctttcactacataaataatactatgtctcaaaaaaaaaagcaaaacaaaatgcagttcatttccttttgaagttccttgaaattcttttgtttgcttctttagttgtataattttttttgtaatactgaaagagatgcttgttgtctttcattcatattctctctctctctctctctctctctctctctctctctctctctctctctctctctctctctctctctctccccctctctctctctttctctctcatgtttatcagattgtctttgaactcagacatctgcctaactctttctcctgagttcagggattaaagttggttctgtttcctttttaagatttatttttatcagggggaggggaagaaagaatataaatgttaaaggatgagtgcatatatgtatgggtacccatggaggccagaagagggggttggatctggatctccttggatctggagttgtgagctgcctctcgtgggtgctgagaaccaaacttgagtcttctgcaggaacagtaaacaccacacaccactcttaactgttgagcaatctctccattctctagtctctagataatctgtaacaattattttgtgtgtagtaactttagaacacttcctaggctcactaatatttgaaagttttttctcttacaaacagattattgttggttttcacctttgttataacctttttgaggggggattttgtgtctgatgtagaaatttatgctttctgtttttagggttggtattgcattttctttctttctttttctttttcttttctttttttttttttttttttttttgagacagggtttctctgtgtagccctggctgtcctggagctcactcggtagaccaggttggccttgaactcagaaatccacctgcctctgcctcccaagtgctgggattaaaggagtgcatgcgccaccactgcctggtgctattacattttcttctgttttctgaatttgtttattttaatattaattttaatattcgttccttttcaaagaatatttgtttccttttggccttgaaatgagttttaaagtgaacaatcttttgaattctgcaagtgctaaaaagaatctttatttatttacactcatcagagcaggagcaggaatacatcattccattcatattcagaaactcagtttctctctttcttggcattttctcttcctaatcctaacctgtattttctcttgtccaccaattatttttttcttttccttcatatcctacatatattgtctctaaaatgtatcagttcttcggagctttagttggttcttctatttattttttatttctgatccattcagttaataaccactgaggccttgtctgcaactgataggcagtgagtgaagacagtgagtgcaggcaggtcacacagagctaagtgtagctctgtccctgccttcaagatcaccacgctgggtgaggtggtggcatgtgatacaaacataacaacaatggcagattgttttgtttgtgggtaaagacattctgtaagctgagggttgcctagccagcaagtttaagtctgcatcttataggctgtaccacagaagtcttatggagggaaactgtgctgtgtgagttcattcttagaaaggagactctgtgaagctaacagcaggaaggaaaggcaactaagaaactgtagttgtctccagatgaaaggtgagggctattggcataagagcccacagtagggatggagaatataatgtttgaagcagaatctacaaacactggtgtgtgtagtgtggggattaaaggatatcaccaaagggtttttgtttattagtcttatagaaagtaatgatagaactgttgatcaactgagattgaggatatgaggggaggacagaaactaatttggagataggcaagagagaatctattttagtacttgatgatgtttagggaaacacctagatgctaaaatgggccagtcaaggctggagatacggtgttttactcatttgcattgaggagaatgcaacttccaaacaatgggtataagcccttcaaaatagagcatttaggcagaaaataaaacaggctcttgggaaaggccaaactctatgtacaggaaatcaaaacataatgagcattttaatgtctagcatgtagtggctaagtctcctcaaatggctttcttgatcttctcaacagccctgtgcatggaaattattactctgccttgtgagccaggaaactaaggctccaaggcaagctaggcaagcagtgggattgcaagccaggacctaatgccaagtctgtgcttttctgctagaagcaaagaagtgacaagtagacaagatgattgcctacaaggagcaatggttagcaggccacatactcagagatgagtaggataaggacacattaaatctctgggttctcaaaaaactaaaagctttgcccacatgctcagtttctatagagtacctaagccagcctgtcctggattcagtgaggaccagggagcagttctgtgtcatagaaacaagaaggaaacctagtttgggggctgtggcttcatggttaattgttcacatatgacagcgtgtgcatgtattgttcacatatgaggtattctgatttgctcaagtctttaaacctttgaggcctatagctcttagcttgtcttttgacgttagatattataaaaacaagggccttgatcccctttgtgccatctgcttgtttaacttgtttacttgaaagttatttttgctttgttctattttctttctacatgtttttagatgtttctagactgcagacactctggggtaactcttttgattgctatttattcatgagaccctgggggcttcttctgtttcttctctcagttctttctactctggaagttgtttccttctgccattttagtcttgttcagctcacttttctccagaactcttaattcacaggttatgactttcctctaggaaacagcgctctaacaacagaggcagtggtgctaaaagccaaactctaaagcaggatgcctaggttgaaattttggctatgaaccaaaggcaagttatttcctgagtgtctcagtttgctcatctgtaaactttgagacaataatagtattgactaccagaggttgtgttaggggttaaaagacatacaacatgtaaaacgttcagaacagatgacatctagtatgccatgtgatacaccactactaacttagcattctaaggggagaaatagtgggagagatgatctctttgattgtcatctgacccatacaaacaagcaagaattcacagactgttggttcctttacttgatgatgaaaaataggcaatcagatagtcttctcttatactaccctgaattcaccagggaacatgttagttttggccaaatgtagcatctggagatatccactgcagatacccactgtatgacctcactttccctatctcagtgttcaattgatcttccttaacaaaccataaaattatttccatcctccagggtagctcttccaaattaaaaaaaaacaaaagttctctttgagctttctcatctacaaacaacactttagagatggttaatcttcattgtcaacttgactgggtttggaagcatctaagaaacagggtgtggatgaggttatttctgattaactggagagggaagacccaccctgaatgtgggtagcactatcctttagaatggggatctacaatgaataaaagagtcaggggaaagggtaagtgagctttactaccagtatttatctctctccacttcttgactaggaccacaaaaccagttcttgctcctgctaccatgtttccctgccatgaattatatcttctccaactccaagccaaaataaatgaactaaagttccttttgtcacctattgtcacacaatgacaagaaaagcaattaatactatttaactgactccagcccagggcttcctggccagcggagttgcctgacactcgcaagggcccccacaggattccccacgggatcctaagacctctggtgagtggaacacagcgccttccccaatccaatcgcgcggaacctgagactgcggtacatagggaagcaggctacccgggcctgatctggggcacaagtcccttccgctcgactcgagccccgggctaccttgccagcagagtcttgcccaacacccgcaagggcccacacgggactccccacgggatcctaagacctctggtgagtggaacacagcgccggccccaatccaatcgcgcggaacctgagactgcggtacatagggaagcagactgccctggcctgacccgggacaaaagccccttccgctccactccagcccagggcttcctggccagcggagttgcctgacactggcaagggcccccacaggattctccacgggatcccaagacctctggtgagtggaacacagccctggccccaatccaatcgcgcagaacctgagactgcggtacatagggaagcagactgcccgggcctgacccgggacaaaagccccttccactccactccagcccagggcttcctgaccagcggagttgcctgacacccgcaagggcccatacaggattcctcacgggatcctaagacctctagtgagtggaacacaacttctgccaggagttccggtttgaacaccagatnnnnnnnnnnnnnnnnnnnngaggctaacagagtcacctgaagtacaagctcttaacagagacaactataacagctagcttcagagattaccagatggcgaaaggcaaacgtaagaatcctactaacagaaatcaagaccactcaccatcatcagaacgcagcactcccaccccacctagtcctgggcaccccaacacaactgaaaatctagacccagatttaaaagcatttttcatgatgatgatagaggacatcaagaaggactttcataagtcacttaaagaattacaggagagcactgctaaagagttacaggcccttaaagaaaagcaggaaaacacagccaaacaggtagaagtccttaaagaaaaacaggaaaacacatccaaacaggtaatggaaatgaacaaaaccatactagaactaaaaggggaagtagacacagtaaagaaaacccaaagcgaggcaacgctggagatagaaaccctaggaaagagatctggaaccatagatgccagcatcagcaacagaatacaagaaatggaagagagaatctcaggtgcagaagattccatagagaacatcgacacaacagtcaaagaaaatacaaaatgcaaaaggatcctaactcaaaacatccaggaaatccaggacacaatgagaagaccaaacctacgcataataggagtggatgagaatgaagattttcaactcaaaggaccagcaaatcttcaacaaaataattgaagaaaacttcccaaacataaagaaagagatgcccatgatcatacaagaagcctacagaactccaaatagactggaccagaaaagaaattcctcccgacacataataatcagaacaacaaatgcactaaataaagatagaatattaaaagcagtaagggagaaaggtcaagtaacatataaaggaaggcctatcagaattacaccagacttttcaccagagattatgaaagccagaagagcctggacagatattatacagacactaagagaacacaaatgccagcccaggctactatacccggccaaactcaattaccatagatggagaaaccaaagtattccacgacaaaaccaaattcacacaatatctttccacgaatccagcccttcaaaggataataacagaaaagaagcaatacaaggacagaaatcacgcactagaacaaacaagaaagtaatccctcaacaaaccaaaaagaagacagccacaagaacagaatgccaactctaacaacaaaaataaaaggaagcaacaattacttttccttaatatctcttaatatcaatggactcaattccccaataaaaagacatagactaacagactggctacacaaacaggacccaacattctgctgcttacaggaaacccatctcagggaaaaagacagacactacctcagagtgaaaggctggaaaacaattttccaagcaaatggtctgaagaaacaagctggagtagccattctaatatctgataaaatcgacttccaacccaaagttatcaaaaaagacaaggagggacacttcatactcatcaaaggtaaaatcctccaagaggaactctcaattctgaatatctacgctccaaatgcaagggcagccacattcattaaagacattttagtaaagctcaaagcacacattgcacctcacacaataatagtgggagacttcaacacaccactttcatcaagggacagatcgtggaaacagaaactaaacagggacacagtgaaactaacagaagttatgaaacaaatggacctaacagatatctacagaacattttatcctaaaacaaaaggatataccttcttctcagcacctcacgggaccttctccaaaattgaccatataattggccacaaaacaggccttaacagatacaaaaatattgaaattgtcccatgtatcctatcagaccaccatggcctaagactgatcttcaataacaacataaataatggaaagccaacatttcacgtggaaactcaacaacactcttctcaatgataccttggtcaaggaaggaataaagaaagaaattaaagactttttagagtttaatgaaaatgaagccacaacgtacccaaacctttgggacacaatgaaagcattggtaagagggaaactcatagctctgagtgcctccaagaagaaacgggagagagcacatactagcagcttgacaacacatctaaaagctctagaaaaaaaggaagcaaattcacccaagaggagtagacggcaggaaataatcaaactcaggggtgaaatcaaccaagtggaaacaagaagaactattcaaagaattaaccaaacgaggagttggttctttgagaaaatcaacaagatagataaacccttagctagacttactaaagggcacagggacaaaatcctaattaacaaaatcagaaatgaaaagggagacataacaacagatcctgaagaaatccaaaacaccatcagatccttctacaaaaggttatactcaacaaaactggaaaacctggacgaaatggacaaatttctggacagatacaaggtaccaaagttgagtcaggatcaagttgaccatctaaacagtcccatatcacctaaagaaatagaagcagttattaatagtctcccagccaaaaaaagcccaggaccagacgggtttagtgcagagttctatcagaccttcaaagaagatctaattccagttctgcacaaactatttcacaaaatagaagtagaaggtactctacccaactcattttatgaagccactattactctgatacctaaaccacagaaagattcaacaaagatagagaacttcagaccaatttctcttatgaatatcgatgcaaaaatcctcaataaaattcttgctaaccgaatccaagaacatattaaagcaatcatccatcctgacaaagtaggttttattccaggaatgcagggatggtttaatatacgaaaatccatcaatgtaatccattatataaacaaactcaaagacaaaaaccacatgatcatctcgttagatgcagaaaaagcatttgacaagattcaacacccattcatgataaaagttttggaaagatcaggaattcaaggcccatacctaaacatgataaaagcaatctacagcaaaccagtagtcaacatcaaagtaaatggagagaagctggaagcaatcccactaaaatcagggactagacaaggctgcccactttctccctatcttttcaacatagtacttgaagtattagccagagcaattcgacaacaaatgaagatcaaggggatacaaattggaaaagaggaagtcaaaatatcactttttgcagatgatatgatagtatatataagtgaccctaaaaattctaccagagaactcctaaacctgataagcagcttcggtgaagtagctggatataaaaataaactcaaacaagtcaatggcctttctctacacaaagaataaacaggctgagaaagaaattagggaaacaacacccttctcaatagtcacaaatagtataaaatatcttggcgtaactctaactaaggaggtgaaagatctgtatgataaaaacttcaaatctctgaagaaagaaattaaagaagatatcagaagatggaaagatctcccatgctcttggattggcaggatcaacattgtaaaaatggctatcttgccaaaagcaatctacagattcaatgcaatccccatcaaaattccaactcaattcttcaacggattagaaggagcaatttgcaaattcatctggaataacaaaaaacctaggatagcaaaaagtcttctcaaggataaaagaacctctggtggaatcaccatgcctgacctaaagctttactacagagcaattgtgataaaacctgcatggtactggtatatcaatggacaagtagaccaatggaatagaattgaagacccagaaatgaacccacacacctatggtcacttgatcttcgacaagggagctaaaaccatccagtggaagaaagacagcattttcaacaattggtgctggcacaactggttgttatcatgtagaagaatgcgaatcgatccatacttatctccttgtactaaggtcaaatctaagtggatcaaggaacttcacataaaaccagagacactgaaacttatagaggagaaagtggggaaaagccttgaagatatgggtacaggggaaaaattcctgaacagaacagcaatggcttgctctgtaagatcgagaattgacaaatgggacctaatgaaactccaaagtttctgcaaggcaaaagacaccgtcaataagacaaaaagaccaccaacagattgggaaaggatctttacctatcctaaatcagataggggactaatatccaacatatataaagaactcaagttggtatacattgcagaaaatcaaataaccccatttaaaaatggctcaaaaaaaaaaaaagaattctcacctgaggaataccgaatggcagagaagcacctgaaaaaatgctcaacatccttaatcatcagggaaatgcaaatcaaaacaaccctgagattccacctcacagcagtcagaatggctaagatcaaaaattcaggtgacagcagatgctggcgtggatgtggagaaagaggaacactcctccattgttggtgggattgcaggcttgtacaaccactctggaaatcagtctggcggttcctcagaaaactggatatagtactaccggaggatccagcaatacctctcctgggcatatatccagaagatgccccaactggtaagaaggacacatgctccactatgttcatagcagccttatttataatagccagaagctggaaggaacccagatgcccctcaacagaggaatggatacagaaaatgtggtacatctacacaatggagtactactcagctattaaaaagaatgaatttatgaaattcctagccaaatggatggacctggagggcatcatcctgagtgtggtaacacattcacaaaggaactcacacaatatgtactcactgataagtggatattagccccaaacctaggattcccaagatataaggtacaatttgctaaacacatgaaactcaagaaaaatgaagactgaagtgtcgacactatgcccctccttagaagtgggaacaaaacacccatggaaggaggttacagagacaaagtttggagctgagatgaaaggatggaccatgtagagactgccatatccagggatccaccccataatcagcatccaaacgctgacaccattgcataccctagcaagattttatcgaaaggacccagatgtagctgtctcttgtgagactatgccggggcctagcaaacacagaagtggatgctcacagtcagctaatggatggatcacagggctcccaatggaggagctagagaaagaacccaaggagctaaagggatctgcaaccctataggtggaacaacattatgaactaatcagtaccccggatctcttgactctagctgcatatgtaacaaaaagatggcctaatcggccatcactgggaaagagaggcccattggacacgtaaactttgtatgccccagtacaggggaacgccagggtcaaaaagggggagtgggtggttaggggagtgggggtgggtgggtatgggggacttttagtatagcattggaaatgtaaatgagctaaatacctaataaaaaatggaaaaaaatactatttaactacccatacaatgtctatattgatcttatcttagtcttatttattagccagaattttaaaactattcaaaacggttgttgccttactttttttttttacactccagcttttatctccccatccccgtccaccctctgactgtcccacatcccatacctcttccctatcctctgtctctatgatgatgtccctattccttacccacgccccacctgacctctaaactccctggggccccagtctcttgagggttaggtgcatcttctctgactgaactcaacctggcagtccgctgctgtatttgtgttggggggctatatcagctggtgtgtgctgcctggttggtggtccaacgtttgagagatctcgggagtccaggttaattgagactgctggtcctcctacagggcctccctcctcctcagcttctgttgtcttactttttattgctatgataaacacataacctacacagcccagaaaagaaagtgcttatttgggcttatggttcagagggttagagttcatgatggtggaacaaagacatggtagcaggaacagctgagagagctcacatcttaaacccacaaacagaaggcagaaagcacatgggaatgtcttgaaaccttaaagtccatacccagggacacatcttcaacaaggccacacctcctaatccttcccaaacagttctaccaattgggaaccaagtattcaaatatataagtctatgggggccattctcatacaaacaaccacagtcacagtagtcttacactgtaaaagtaacttttattcactagatgtaattattgtcttggtggtttactactgagtaagcttactctttctagttcgttctgagttggctgtgtttgtttgtttgtttgtttttgttttttcgagacagggtttctctgtgcagctctggctgtcctggaactcactttgtagaccaggctggcctcgaactcagaaatccgcctgcctttgcctcccgagtgttgggattaaaggtgtgcgccaacacgcctggctttttttttttttttttttttttttttttttgtaaagggctttagaaggttgtcgttaatcattcagtgtatcgagataattcatagagtcttttttcagtttttattagatattttcttcatttacatttcaaatgctatcccaaaagtcccctatatcctcccccctgcccgattcccctaaccacccactcccatttcttggccctggtgttcccctgtattggggcatataaagtttgtaagaccaaggggcctctcttcccagtgatggccaactaggcatcttctgcttcatatgcagctagagacatgagctctcaggttactggttagttcatattgttgttccacctatagggttgcagatcccttcagctccttgggtaatttctctagctcctccattgggggccctgtgatccatccaatagctgactgtgagaatccacttctgtatttgccaggcactggcatagcctcacgagagacagttatatcagggtcctttcagcaaaatcttgctggcatgtgcaatagtgtctgcatttggtagccgattatgtgatggatccctgggtggggtagtctctagatggtccatcctttcatcttagctccaaactttttctctgtaactccctccatgggtattttgttccttattctaaggagtaatgaagtatccacacgttgttcttccttcttgattttcttgtgttctagaaattgtatcctgggtattctaagtttctgggctaatatccacttatcagtgagtgcatatcaagtgacttcttttgtgattgggttacctcactcaggttatatcctccagatatatccatttgcctaagaatttcataaatttattgtttttaatagctgagtagtacttcattttgtaaatgtctgagttggctgcttcaactcagctgttctggctcaaaattcctctcctagctgactgattcaggcaggcttttcttgacttctcactgaattgttccgcttggaaaagctgcctcttaattccatgaactgcactgcacttactttatgagctgaatagaactgaatggagccgcatgaactgaatagaactgaatggaacgcatgaacgcaactaaaccaactgcattcagctgaactgcactgaactggactcaagtgaactctactgcattgcctgaacacaactgaattttcctgtctattctcatgggagttgggcgtctcctatctctgattcattctgtcaaatatttctctgactcatcactttgcccctcaagtgtcactttcaaacatggctgcttccttctacaaactaactttacctccattttttgggactaaaggtgtgtactgagggcatgtcttcattccagtcagagggattaaaggtatgtcattccagctggatcatacaggctagaaggtctttggatgtgattcccttgccagagcagccatgttgctggattaagattcctttacattactctcccactttaggtttatcttagaagtgaagtatattccctctgtgatgttactctcctgtgttgccttcctttggtctcagtattttcattaggaatgaatattagcaaatgatctgtttgtatccattgaaagactcattcagtttttctcattaaatgtttgtttttgtatcattctgttctgggccaatcaatccctatccatttggttgttcttttgtcatttaattgcttttgtcattgaaaaaaatcttaaggcctatattgatttagaattgtctttgacaaagttctttatttttactttgtttcttaaaataactaatgtgcctttgtaaaagaaattgaaataatagaatagttacagactaaccaaacatgcaatcacacagtcttgaaattctaattttcatttactagtatatcatgtgtccaatagtatagcatctctctgtgtacatgcatatgtgtctgtttcactatctgtataatatcctataacatactatgatcataatttatctagttggtccccttggtagatgtttatcctatttctgatgttttgttttgctaacatcatgtaaaacattttcttacatgtttagatgtacaagtattatataggatagattactaaacatgaaattatggtttaaagataataaatacaagagtttcaagactttgaacccctattgttgtatgcaaaataggttgtatactatatatagtgacattttcctagatcagattcacaaaaagtcactatccctatccatagccaaaaagggaaagcctgtgagctgacaaagggaataatctgcctgaagtccatgggggaacttagatagcccatggtctctgactccaatgtgactaatagaaaagttaaaacggaatgcccatcagtctatcatgctagtctctgaaggagggttatgagaatgccacaacgttttctttttcttataaaaaaaggaaccaactcctactacttgccctctggcatgtacatgtgtactttggcatgtggtatcctctgtcacaaggaagtaaatatttaaatataaataaaatacattatatatattaatattatctgggcatggtagcacatgcctcagactgctacctgtgaattccaggtcagccaggcaacatagactctgtcacaaaaccatccaaagtgatattcaaattgatataaagtagtaacaaaagtgctgcttgcatgatggaagtagtgaggagaaatcatatcaatgaatcactaggggctcaatttaaaaaaattattaccgggcgtggtggcgcaggcctttaatcccagcacttgggaggcagaggcaggtggatttctgagtttgaggccagcctggtctacagagtgagttccaggacagccagggctacacagagaaaccctgtctcgaaaaaccaaaaaaaaaaaaaaattattatgggtgtgtgtgtttgtgtttgtgtttgtgtgtgtggtgtgtgtatacatacaaagcacctgtgacatagtgtatatgtggagaacagaggacaactttgtggagttggttctctcctcctgcttgtttgtggatttgtcaagtgtgtgttaagagtgcttttactcactgagccatattgttagcctataactttgtgttaaggagagtgaacaagtttgtcagtgagggagaaatagtcctgtaaagacctctagcagcatttttataatctcaaaacagctacctcaacatataagtaaaagttagccaatgtatagagtaggaattagtttgaccaagtgaccaattttatatcagtaatatgtcaaataatccatcccatgataaacactaagacaaatctaatatcattgctgtggagtttgcccaaagtgtgtaattataatagtataatagtaagaaaacaagtagtacacccaaggatatagccaacaaaataactgataaataagtttatagcatcaagaatatgaacaacaataaaataaatggagttgttagatacttcaggagactaaagagaaataactaaatatcttgggattctggaaagaagtctgggacaaaaaaatattgacaggaaaagctagtatcatttgaatatggctttagtttagtatattatgccaatattagtgttcaggttctgataaacatactatgttatgtaagatgctaacattgatgacactatatcaggagtgtatagaaagtaagctatttctgtaacttttcaaaaagtctaaaatgttactaaaggagggtttttaaaatcctgtacaagattccttataaatttctatatctttgtcttctttatcttttaagttaaaatctattatgaggttaaaagaactgtttaatccttggtagaaactggccttaaaaaaaaaaaaaagtaagtttaggattgaatccttgtgagcgactgggtagatgttaccagtaacttaccatggtattgtgtctaggctcattttctaatacatctaattttctagactccttttaaggttatagtaatgaagagccatgggaagtatctctgaacattttatagggcaaagtgatcatgtaagacactgtacttttagtcaggtatggtggtgcatgcctttaatcccagcacttgtgaggcagaagcagggggatatctatgagtttgaggctagcctggtctacaaagtgagtccaggactgccagagctctataacatagagaaaccctatctccaatatagatagatagatagatagatagatagatagatagatagatagattgtatataaatggggaaaaaattccaaaccacacttacataaaattatgggtcccaagatctttagatccctggagttctctgaatattgtgtttgctgctgatattaagattatttgaaaactggtgcatatcccaaaaccatgtcttctggaagcatatgaagtccctccttggtcattgggaaacagccaaactagatcactatatatagaaaaatctgaaaaggccaggggtttatatcatatatcgatcatggtctaatggggaagcagactgggaatatgcatggagtcttagatttggggtgtgaggaaggctctgtaagaacatctgtgggaagagatgtcaggcccagggcagacattctggatttggtgaaactgggcatgcaagttaaacatcttgaggagctttgaatttgtttctggggcatcatcctaacttggaattctgtttgctagaagctctgggtgaataacataccaaggctctaagaaagtctcagtcaagccaggcagtggtggcgcacacctttaatccccacacttgggaggcagaggcagaggcaggtggatttctgagttcaaggccagcctggtctacagagtgagttccaggacagccaggactacacagagaaaccttacttcgaaaaagaaagaaagaaagaaagaaagagagagagagagagagagagagagagagagagagagagagagagagagagagagagagaaagagagaaagaaagaaagaaagtctcagtcagggtctactttgtctctggagttcagttggtgtttatctagttcttccctacccagttgtgaattgactaatctcttacagaactaaaagaaaaaattagatcttgaaattaacaaagctgagctagacatacttagttaggttgatgttttgtgagcactgtgttcagtcctgataatacagagcatgctcatcgtaatcctaccttcatggtgctcacaggcaagaaaactgttcctcctaacttgcattagctggctcaggtatctcactcagaagtgccttcactaaatcactctgatgtctataaacatatgccttttatttaatactaaaatcaactagtgttttaacttccttgcagcagtgtggaaaagatattttcatgtatagttcgatttatgtaattttgagcatgcattttgtccctttgatcttaaaaccagtccttgtcctgactgttgttcccctcaggctatgatgttgaagatattttgttaaggctttgtgggtttgctcagtgcatatgacaaccaaaaatttgtttactaaggtctaacaaatgtgtttactaaggcagtgtggccagctggcagcatccaaagggagccaaatttttctgttgctgtgtggacatttctctcttcctgaatttaatctcctgggtcagattccaagctgtaacctcaaagcaatgaaccaactagagtaataccatctaactgattccatagcactaatagcctctaccaaggcccttctatatcagaggcttttgaccgttttaatctagtggagatatatcctcataacttgagttggaaaaaatggatgttataaatggttagcttttctatatcaaggttatagtcaaagctaggcaatgaaggcccaccctgtaataccagcactccacaacttagaagctgaagcaggaggaaaaatatcaaggatccatcattgcttgacatagtttacagtccagtagcatgtttgaatgaatgtgttctttctagttactttttcagggcaaagtctatgttcatcagctgagctttgaccacactcctcttagcagtggatcttacagctctccctgccttgttagtctcttaacagccaatgctgtgtcatcctgaacatcctggttcttcagtcaccatcctccctgtaaagtggtctttggtacatttcactcttctctccctccctcttggggtttctgaaaaatagtttcatgtagctatatcattaacctcaagctcactatagcctaggctggccttgaactcgtgccactgcatcctaagcatcaggattgtaggtgtgtgccaccatgcctgactctggctttaccccatcattctctccccttgagttttccaaacccagtgtagtgcctttcctgaaactccataggctgacaggtgatgacaacaactactggcatgattatctcctatcctgaattaccagctccctaagttgacagctgtgtgttttcatctttctgtcacctggtacccagaaagctaatatcagtgtttaatattctagccatcacctgaacactgtacctttatttttatttgtcataacaatgctgtgagagtaacatagcattattcttgtttcacagatgaggaaatgaagcatagaaagattaaagatgttgcccaaagctacaaaggtaatagtagtgaagtttggattgtaagccaggcaagaagtccgtatacagagcttttaagcactacttgtaatgtttgtggtagtgcccatgccttacactgtgtgacatattaacaaacaaaaagctagtgttttgttgtaataattttaaatctcatttgggggtttctaccccctttgatcattcagtttccagataaaatatataaaacttttatatttataataagtcttaatctgccacagacactctgggtccctggtctgtgaagaacgggatttcttaggcagatggacaaagagtttggatgaaaatgacaggcagatacacgaaagatgtgttgaatctgaatgtattgttctggttgagcttcagacttatattacaacgaattatcagaggatacaaatcacaaaaagacaagatacactgaaattcaccagttacagcagaaaggaatttacagggactaattaaatgtttacattagggataacaagccctgcctaggatcagcctaatgccaggcaagaatttcacactttaaggttaaaagcatcagggggttgttaactcttgacaggccttaagagtaatgcgctatcacagagctctaaattcttaggtctaataaaacttatcttgtctggagagtttccccttatcagggtagtatatcaacttatacttgacatggaatgaagcctgtagtaaaagatttctatcttagtgagacttttagtctctatctgtaaacaactgagtaaaatggcaagtgcttaattgtttactgaatgggttaagctccttgctgctatctggaatctaagaacactgggaaaaggctttagctatgttagaatacaatcttaaaaggcatttactataaggtaaagctatatagagtgcacgtggatccatacactagactaaagtggatttggaaaattaattttatgggttagggaaatagccaaagatccaggagtaagtttccttgaaactttttcctcatgagaaagctttcagactttcatctgtcaagctgactccaccggagtccctggcattaatcagcactagagctggacaggtatctatctgctatgctattatgtctactgttcagccagtaaccccaagatatgacttgccatattctgtctggttcactcagactggccagcttcatagccagttctcacaattgtttaccccatggcttcttctcttctctccaccttctctctctcttccctgtgtgtgtgtggtcctgccttaccccaagcctgcctacttctcttctgccaagctataggctgtaggcatctttattcaaccaagagtataaaattaaggaacaaggtaacatagcatcacttggtgtatgtgaaaatttcctcatccctggggcaaccagaccttgggaagggcaggttttcatatcacaatatgtagcagcagaccaaaccacagcagtgcttatgacggttgattatgtggcaggcaccaggttgtgttatacattacttcacccatcctcacactaagcccatgaggcacgcacacagttgttctgtaggtgagaatactgacgttagagggattggaggtgaacatcttgtgctaggcaacatttcagtgtggcctagtaagatttaacagatgaatgaggagtgaatggagactataggagaagggcgtaaggagagggaaaggtattctgaatgccttcctttttcttttaagtatggttttttccttttttaaaaaattaatttattttatactccatattttattccccccatctaccctccgactgttccacatcccatacctcttccccatccacctgtggccatgcagatgaacctacccccccaccccacctgacctctaaactccttggggcctccagtctcttgagggttaggtgcatcatctctgaatgaacacagacccggaaatcctctgctgcatgtgtgttgggggcttcacatcagctggtgtatgctgcatgtttggtggtccagtgtttgagagatctccggggtccagattaattgagactgctggtcctcctacaggatcacccttctcctcagcttctatcagccttccctaattcaacaacaggaatcagctgcttctgtccattgattgggtacaaatatctgcatctgactctttcagctgtttgttgggtcttttggagggcagtcatgataggtccctttttgtgagtactccatagcctcagtaatagtgtcaggctttgggacctccccttgagctggatcccactttgggcctgtcactggaccttcttttcctcaggctcctctccatttccatccctgtaattctttcagacaagaataattatgggtcagagatgtgactgtgggatggcaaccccatccctcacttgatgtcctgtcttcctgctggaagtggactctgtaagttccctctccctactgtcaggcatttcatctaaggctcctctctttgagtcctgagagtctctcacctcccagatctctggtacattctggagggttccctaatttcctatttccctaggttgtctgtttccattctttctgctgaccctcggggcttcagtccttttccctcacccaatactaaatcaggttcccctctcccccaacacccacttcccccacccatctactctccctcctaggtctctccctccctccatccccatttatgattgctttcttctcagaatttctaacattttactattaaaactttcaaagttactataaagaaataagaatatatggtgagaaaccatgcatccaccgctgtctcatccattaatatttctcttcatgtacttcctactcctgttttccaaccgtttacccattgtgtttttgattatccctcccctaggtacttatatgtatgtcatgaaatagaagtcggtgtttgttcatgggtttttaaatactaagcttatttacaaggagagctcaacattccatggcatatatatgaaggtcagaaaactaatgggagatcttttaggaaaaggagggcccttgtaattgcttgctgaaatgtttttctgatggctgctttggcatcagttgactattttctcattcaggttgtgattttcttggttctggttatgaccagtaattttcactgttgtgaacagtgtttctataacactgggagaatctgtgtcttaatttgctgttgagtcgccatattttgcagtcccagtagactgcaaactctttggtttgcttagatcctgtggtactgctggaagatcccatcgggccttattgatagaatattaaataataagtttccccaggctgtggtgctggtgcctgtgtgtaaggagagcaagtctcgctgggatgaaggtgacttctgggcactctgtagagaaagtgggagtatttccctagcctgatttattttcagctggacatgaggtattctgctagttggtgttggcagctggcctggtactgtcgatagagctcctatttggctgccttctcttgctaggttgggggttgggtagcattgagcctgctacctttttctgttgtgtgatggaggggtatcataacatgcccagctgcatgttgttcctgggttgttaaccgttattcttccttcctctgtctttccaacatcctttgattgcctcttgtgttactcccattgtacttagagaggtaggtgagaagtgagctcatggcttatccctgttgcccagctcatggcactcgctgttctgtttagtcactcatcttttagataataggattgttttcaacagttacaactttaaacttcctaaagtggatgagggacttctggtggaggctttccaacagcctcagggtctgaaaagctttcttacaggacagacccatggaaggctgtttcttatctgtctttcccttacctggctgttgatgtatttttcatgtctgctttagaaaggcagccccttccttgttcttaaacttgatgaataatacagtatgtttttatacctctagcacagttaagacaaataaactgtagttttgtagggacttttcttagctttttgatcaatgccaaatccctgttgacagggattttattttaaattcaactatgtaaattttacccatcagttaactgtaagatatttaatttttatctgagtatttaaatttatgaactgaaaaatattcttatatatgagttttttacattcttttcttgcaaacaaaagacttgaggtcacctcagttcttccacagtaaatatgcctttgaaaaatcagaataattcctaacattggaagccagagactgttttatgtagtttacaatagtaattttgcacaaatgatttcaggttaaaattgcatactatttattcccacccatttcctttattggctgtgacacacaggaattacgcccattgcttaactaacctttctgaccttttgttacttggctataaattgacttgggtcttttgcaaaaaaacacttggggggggggatctttttgttagaacccagccaattcctgcttcagtgcagaacagtttgttctcttgaaggaatgagccagttcagtgagcagaaaaacacagccataaactggcatcagcagggcctgcaaagatgattgcccatggtcattccacaaagcaagggactcgcaaaagaatgaggttttggagagagaaatatgcttttgagctccactgactttaggtaaatataattgactttctaaagtgagttgtgaacacatgaaaagggttttcttcctgtgctctggtggacatgaacattttaactatttaaacaggagtatagtggaatgctcttctgctgttccattgtccccgtgactgtgcttgggcatgaagaggtgcacttcaccagatctgcccagcagggtgggagcagcttctgctctgcatacagacacttactgattgatggcaccttggaaggcttgagtgctggcccaccctccaaagaagacgctgatggcagctgatgaattagaagaaaacatgaaacattttacacaattgtgaggcagatataataatagaaaacacacaaatcacagtatttgacaaagtgattggtagaaatgagggcatttataagggctttttttttttttagctttttgatcagtgttgtttaagattgttaggagactatttaggagtttgctagatggaagggtctcgttgctgcttagcttatcctgcagtgtactcaagaagctttctttctttaaaaaaaaaaagtttctgggaaaatatggctttaaagttatggagtaatgagaccctctggaatttaaggtactagtagaattacacttggaactaacgttaagagtggggaagggagcgaaacgagctgactatagactgtgtgctgtacatctcagtcatggcatgaaacagcctagaatgtcttctgtcggcactagggctgaagatattccagaaaccagagattgccttggcagaacagggtgaggaaaagtacatttgagcataaaaaaggcagattgaaccaaactaaggaagggccataataccaggctgaagtggtttctgcatgaagtcagtagagatagtgatccgtgtcctgggaaggcagataggttgtgacttggacgaccatatgggaagcacaggtgcaggtagtgtaggtcactgaagtctctgcagcaaataaggagaggacactgctcagggatgaccttggtggagaaaggaggcaggaggcaagaagtctcctgaactttcaacatgctgtcaaagactcatatacacacactatcatgtccactgtagtagactcagtgctgtttcactccaatattgtatcagagaaagccgaggttggggagattccgtgtttccccaaacctaagtatcctgtacgaggaagcagctgagtcagagttggaacccaggttatctgtcttcagacataatgacatgcccactcttggagaggacctgatgcagctgagcaacccagtgtttaacaagcctcaaaatgtatacatattcttttgcatgcatttatttatgtagttgagacagagctacgttcctgattgacctagaacttcctatattgaccagactggcctcaaacttgtagtgattctcctgcctctgttttcacttccctagtgctatgcttacaggtgtccagccttgtataattcttagtttacacatataaataatcatctactaatacttagatactagcactaatgctaatacaagtaacattttgaaagtctgaacattggcatgatcttatctcttaaaatctcaccttatataagaattgctttgggaaaaggcccaatcaaactggcaaagcatgagtggaaataacttttaaaaattactgattgattgattgaatttaatattattataattttgttttttatgtgaccatgtgtgccacagtgagtgtgaaggtcagcagaccactttccagagcttgtttttccttctaccatgtggcttttagttgttacactcaggtcatcaggtgtggggccaagtacccttacccaatgaaccaactcaccagccctaaaccatgcaagtttcagtgttcagtgcatgtatatctgtttataagagaacaacaaattttggccttcagaaactaaagaaccatttaggactaatgtgaatattagcagggaatcactttttgataagtgtatgctctaagatggttcagaaagacacatttttcaggtaactatgtaaaaggggggattattatacagagttcagctttagtcaatcccaagacaaattaatagttttctgcttatttcattcatccttcaatcatgacaacatgcattccagggttagctcctaggaaatagatataaaaggcaagcaaacatggctaaccattttctgttgagtaccagagtaaaatccacagccgtttgggactggatgctcacagtttagaatcaagattatacttatactaactgtcttcttagcatcccatttctcagattcttttgcatgtttctctagcagagcaagagataatgaatgttgtgaagatagaaaatctgagtaaagtatctaaacttaaatatctcagtactcagcctgtattattgtgtaccaatactggtaaaaatgctgggtctttaggggaaattttaatacttaatgtagcagagctgtagcagtagcacagtcccctgttcaaagtctggattatgtatagctcaggagagaaaagccagccctgcttttttctagcagatgatggcatagcaggagaggcaggtatatagctgagtgtgcttgttagtatgcagtaaatccagacagctaggcctctgcgatcatttgtcacgtgcttccttgatggctgttaggcttggtacatacgaggacactgaaaacaaggaatcccaatgacagtctgatgttagttcactggagcacacagacctgtatgcaagcagtcccaactcacatagagtaaaaggttcgtggtatactaaacttaagatgacacaacaaggagaaatccaccatccacgcctggggcactggtcgttccatgggctcccttatctgtaactttgcttctttgtacttctgctatgaaaacatcttaatgcctgttccatgtttgagtattacatgatattgtggtgatgcaggtaatgtgccttccccacattgctatgcagtgagcattttgcaaatattcctttctcctccattttcctctgctcaacttctgcagaccctagttctgccttttttcatttttctgagaaatgtagtcccattcatgaactccactatatattcagtacctcaaaattctctcatcttcaccgtcctcctcccctttcctttatgtctcccaggaatgtgtatccccactctcttttttctgttcttgggcaacagcaggccaaggatgagatgcaggggaaaggagctggcttgagaagactagggtgaattgctctcataatcatatcctagatcaaaatttctcctaatccaagatcactcaaatctcccaaatagaggagaatgccagattcttaactttcttgcagcatgtcttttcatacttccttttactcaaaagagaaaaaaagagtgtttgaccttgccaagctgcccagttctagagtctgctcctgtcttagtaggtgttaggctgggatttttttctaccaagcccacatcatgggttctcactggctgtgcacttcatcttgtcagagttcacatctgaggctcttgtgagagagtccttgcagcagcatctctttgcctttcctctggctctaggcctctccttattctgcacctgcccagaccacccctatccagccaccccttctctgctacatctttacctaaagagataatcattcacttaggggcatttggaagagcctcaaatcttgataggtcgtcaatacttgggtattatggaaagctacaggtttctagtgagtaaaggtcagggatatagtgacagaccctacaaaatataggacagcatcctattcccaagtgtagagcttcctgttgcaatttttcattagtagcaaggttaagagctctgactcaggatctgatgctgccctgcctacctctgtgacactaaggagttttgctaatctcagcagctgctcctttccctgtatgacttcacctctctcaactcttccttcattcccttcccaatcaagagtggatcctcccttaggttcctacctgcagtgtcagttcattgcagcccgtctccatgttgctttgatagcccccaataacttgttctttcaagagcagagaaatagcttgtttggaatggggatgatcatttatcaagtacaatatgctgtaatcgctatgtaatatttatatataaaaacaaaaatatttcaagggcctaaaccttggcattggaagagtaaggagcacattgaacaatgagcaaaggactcatagctcataccttctatgacctttaggttctacataggaagacagagtcagtattgacttcctgagattcagactatgagaagatatcagcgagaacctatcaatttagatgtattttagaactggaaaatgaagccaggattccagatgtgactgggatagtaggtagttagcacacatagaaaatatcattgtttgttcttgtctagatagtagtggcctcgattccagatatctacccagcattcctcctaatgacagtgatccctttactgtagaaacactaaaaagtggttttctttactccatggaagcacaggacacccacccacacatgactagtgttttgttttatgactgaatcttatgtagcccaggccagtctcaagcctctagcaattgtgctgtctcctgagtgttagtattataggcttaaaccattacacccagtttcccatttttttaaaagatttatttattattatatctaagtacactttagctgtcttcagatgcaccagaagtgggcatcaggtctcattatggatggttgtgagctaccatgtggttgctggtatttgaactcaggaccttcggaagagcagtcggtgctcttaaccactgagccatctctccagccccagtttcccatttttatagaaacatttcttcctttcctggaatattaggacactagaaacatatcctgaaggttaggaggtctgcagtgacctgaggtaggttgaagacagttgttttgtaaaattgctgaggcatgagagggacattgcccacaaatatctgttacatggagaccagcatatgatacagatcaagacagtattgccttttgttcagacaattattatgataaattatctttttccatagcattagcatgctagtgacaattgacaatatattgttaaaaactatttatcatatatactcttagggaaagggctataacattcaaataccatctaatatttattcagagaatttaaaagtcaattccactgggtgtggtcatacctacagaacagagaggaagtctttgcttgtcagagaaagaactgacttttttattaaagagagcaaaggccttaaagcatatgaaatactgatcttcaactttatcagtatctagagaagggtcataggtcagagactgatatatgcctaatgtttaggcattagcatcagcagggatcgcatagcttctagaagtaaatggagcacttcctcccctatttgcttctctgacttctcagaatagacactattatctcaggacttagctctgcactgaagtatgttttcttgtagtattcattcttataggatttttgtgtttttcttcttgccagccagaagtactgtgctgtgatttaaatatataagcattggaatctgaaatacctggctttgattcccagatgttgtgtcttatttgtatgacttaagtcaagttacttagcttttgaagatttattatcccactatgtaattgacttttaaattctctgaacaaatattagataggatttgaatgttatagccctttccctaagagtatatatgaaaatggtttttgactatattgtcaattgtaagttctgttgatatttaaatcatggtattattgaaaggctcaaaacaaatgcaagaaagttggtgagggcttacagtgattttgtttgtttgttaatggtgatggcagtggctgtactgtttgaagacaggcactctgttagctttgaattcttcctgtatctacctgagctaaatatccagtagccctcaatcttttttattaaaaaaaagtctatatcacacacacatacacacacacacacacacacacacacacacacacacacacactcacacaagtacacatggagagaattgtctgaaataacaatagtttgaaacaatttagaggtcatgtttgagctcattttctgaaatcttgttcttaagtcagtccttaccttaccattcctaagatcatttgaaaggaaggatctgaccacatcatctgatccagctactaaaacaacaccagataataataacttgctgtctgtgccttgccttctggagagcaatataagcatagcccttgcatgcatttcactgtacctttgcctggtttccttatgcagagctccaaggcatgcttctacctgagtgtcctccaggaggaattgcctctggacaggcattacgtatttatggttattaagtaatgaaacagtaccactcaaagtacatttctcttaatattagcactctgagggtcaaattatgtatcagataaagagacaactctgtactttcaccatgtccctcctcctccctccctcctccctctctgtattagcaaatcatgtttgttttcattctcatacaaaaaggacttccttctgagctctaaccttgggtcttggttacttaactaagccatgtaactccacatgttaacccaggatgaatccagtggccatagtgccagtggagagttcagggctggctatgacccagaaagtttgtaaggagcttgggaggaaaaaaaacaacaaacaaaagaacaacaacaacaaaaccaaaaacagtcctcagtcttgtaacagccctacccccaaagtcagccttccttctgacctatatttggggggattggaagcttgggattgttgtttgttacccttgattagggaaggtacccttaggatagactaacaaagtagaatacctaagtcaaactgaagccaccctgcactgaactttgtttcacatgtcagaacactcctttattgtgagccatcttaaattgggtttcttacttgcagcttggaatcatatggtatttggtagatatataactttccatttttaatatatcagtagctctaaccataaaaaggagcctaggaacgtgaggtctctaccttacaaggcatagtcagtctggctgagcacaactttgcaaaataatgacttactttttgatgtttttcaagtcttgcctttattttttaattatgagacaagatttcactcttagtctttaaacttgtgacaatcctcctgcttcagtcttctaagagttgggattataggcatacttgacttcacttgcattcactttgattgattaaatataaacttaggttaaatcaacaaagttacagaggtttttttttttttgtcatttctttttcacagtgaacaaaggttaatagcattatgtaagtttacaccaaaaaaacttcattatttctagtctactggcatttgatattctccatcagtaattcttatcctccccccttttgggaaaaacacagcttttttatttccccaacagagccagaattttgatgccttagcagccaaggctgcctgcacatacagcagtgatctcactgaaccctgctaataagtttgaggaaatactcacaggacagccttgaactctctcccagcttgtccaaaacaaaatagaaaaacctcaccatctctctttcatgtcagcaatgacaaaggcttggtgaactccacagtgccctggcctgtgtgctgcttctagaatgccagctggaaggccaggctgaggtagccagctggtggtggagcacctattctaagactgggcagttcctttcttgtgacactgaagtcagaaacaagatggggcatgctgccagctattgaagcagtgacctacttttacagtactcggtcaggtttctcttttctctcaggaggctgtacactcaacatcctcccgagtgctcaacaagccatttccctagctaaacccttttgcttggtgttcttcagtttgaaatggacctggagggtatcatcctgagtgaggtaacccaatcacaaaagaactcacatgatatgtactcactgataagtggatattagcccagacacttagaatacccaagatataagatacaatttgtaaacacatgaaactcaagaagaacaaagaccaaagtgtggacactttgccccttcttagaattgggaacaaaacacccatggaaggagttacagagacaaagtttggagctgagacaaaaggatggaccatctagagactgccatatccagggatctatcccataatcagcctccaaacgctgacaccattgcatacactagcaagattttgctgaaaggacccagatatagctgtctcttgtgagactatgccggggcctagcaaacacagaagtggatgctcatagtcagctattggatggattacagggcccccaatagaggagctagagaaagtaaccaaggagctaaagggatctgcaaccctataggtggaacaacaatatgaactaaccagtacccccccccccaagctcgtgtctctagctgcatatgtagcagaagatggcctagttggccatcagtggaaagagaggcccattggttgtgcaaactttatatgccccagtacaggggaacgccagggccaagaagtgggagtgggtgggtaggggaatggggtggggagggtatgggggacttttgtgatagcactggaaatgtaaatgaagaaaatacctaaaaaaaagaaaagaaaagaaaaagaaaaagaaagaaataggtaactccaaactgaaaagagagtaatagctatcccttctcctatcttgggggctaggagacagtttatcaatataaaatagtgggcaaagatggctttgaggaagaacaaaacaggtcatttaggcagaggatggtatttggtttataggtctagggttttgttctcaaaattctaatcacatgtaccagcttggccaccaaacttcgcttgtattccatagtataatgtgatagaggcagagtgataaaacttaacagattttgctcagataaatcttgttgaggaggaacactgtgcttgagagtttgaggcagtgtacagtgcagcagaagtaggggtgggtctgggatgaggctgtcggttgtgccgggcaagggaactaagaagggagtcagagaaattgctgtcccagccacactctgtgcttgcagcctgacttgaccctgactggctcactgctgtggaactagagcatggtctttgtgttgtttgaccattaggtatatactgtcctagtagcggattaatatgctccaggcctttctcttattactccttaaagacatggcagaatatgggaaagtgtgttgcatggttccatgctctaaggggtgactgagccatttttaaaccttgggccttttacacctagaatgaagcatattcccctctcctgcctacacaaccccttctcattcaatgtgtcctgttctctcactcacaggatgtgaactctgcctggtgtccttagggacatttgctaactgttctctaatgttcccatttatttatttatttatttatttatttaatgttgttgtgtttgtttgtttgtttgtttgtttgttttccaagacagggtttctctatatagtcctggctggcctggaactcactctgtagaccaggcgggcctggaactcagaaatccacctgcctctgcctcccgagtgctaggattaaaggcgtgcgccaccactgcctggctgccttttccttttaagtgtgcccatagaactatgagcttcaggttttacctgtgtctgtctgttcctctcagcaaaactgtgagactcatttagaatacatcatcttcttggcaaggtgaatcacatgcaagaagtatgtatatcatgaaaatgaacttgcttgccatctgctaccaagatgactaaagttatggagaggagtataaaagattctttttaaagagtggagagatggcttagtaaagagtagttcctgctgctcttccagaagatctgggttcagtttccagtacccacatggctccttacaatctggaactccagttccagggatctaataccctcttctggcttccaagggtaccaggcatgcatgtgatacacatatatgcatgcagacaaaacactcaaacattcaaaataaaaataaataaatcttttttaaaataaaggatttttaaaattctcatttattttgagaaagagtctatttatgtagcccagagggaccttgaatgaataattctttagcctcagcttcccagttgctagctttacaggcatgtaaaccttcatccagccggcagaaggtttctggctgaatgccttttgtattaaaaataataataataataaaagcaaaaataaaaaagataaaggcaaaagaagatatatcttatgaagagtaagcacagcctgttagaatttgggatgtagggagtagtgagttgcatagttttatgtcagtttgacagatgctagagtcatttgggaagagggactctaggttaagaaaatgcttccataaggcaagtctgtcaagcattttcttagtgattgatgtaagagggtccagcacactgtgggtaccacccttgggcaggtcctgaatgacataaggaagcacactaggggatggagagatgactcagtcgctaggagcactgactgctcttccagaggtcctgagttcaaccacatggtgacttacaaccatctgtaataggatctgatgccctcttctgttgtgtctgaagacagctacagtgtactcatatacataaaataaataagtattttttttaaaaagaagaagaaagcaggctaaggaaacaagccagtaagtagcactcctccatggcctctgcttcagttcctgccttgtttgaattcctgccttgtttgaattcctgccttgacttccctcagtgatggtttgttacctggaagtataaaatgacataaaccctttcattcccaaattgcttttggtcatggttttgtcacaataataaaaaccctaactaagacagaaattggtaccgtattatgggatatctcaacatgtatatcctgatcctatgtttctaggaggactgtggtattagtgaggaagggctgtgtgtagcattaactataacagaacagaagcatgttgtttccttacttttgtacatgatagatacacttaaaaaattcggcaaattcgtattatttggcagatggtattatcatgcctcaacacgaagtgctcacctgccaactttggtacaactgctgtaccaaagtctgaactcaacattcagaaggctattgggtgataccagtgttgactaagtatgggagttgaagttgcctttatggtaatccttgttccaaagggagtgcatggtatatgcttgataatagaagatatagtgataaatgaatcctatagtaactttgtacatttgtctaagttttatcatgatttggatctcagatattgagaagcatgacttcaagaatgttccttgatcgaaggacagttatgtacaccagagggtgctatgcttcaatgttcataccttcttttttgtttcttatggttagttgttagaagctttgaggagtagccagttgagaaatggctctcaacaaaggactgcctgaacacgcccttctcttttgctgctttccagtctaataaggggttcagaaatgctacaccccacactccctgggtctgtttcactgtattctagttcttaactgtcaggttctttgttaacctagacaacttttttttttaaatgctgcagcttaagtacttttcaatattctgtctttggtggaaatggagaccatctggttactgttgtctgtgtaataacaatgattgaaaatggttattaagtcactctttagccttttctcttgtctaggcaaagttgtctctgttcctctgaccataacccataaatctcattttctagtcctttaatcatgttggtggctttctgtggaaactacatcaaaggctcatttcagtgcctctattctggtaaggtctgtctggccatcagtatttaatggatatggaatgtggttttagccatcctgtttctgtggctagtccccaggcttctaagccagtcccagtcttctgaccattagaggctattttctctaactcttcattgtgacacatttgaaatacttttgattaaagtgttgattgcagcttgtgaatgactctagctgttgatgaacagacatttcagcctaacctgtttgtgtgagatccttttctgtctggttgtgacttccatgagaagctagtccttccctgtatctttgtcattgtagactcaacatctatgagtgtatactgtgtgctcaactctgctagagattgaggcggttaagaaggaggaggagaaggagagggcagagaggctagtactttcaggaacagggacttaagtgtggccaggcacgcatggaactttactgcataacagtaagtcatagaatccacatgctctgtggttctatgatagatcttggaaaagacaggtttgcagaagtaggaaaaagatgagtggtttgcagtgggaggaaaggataagaaggtaaacacagcatgatgctgcaatagtgaatacagtcaatttttccaaattcataaagtatgcaagtgagccctactgtagaccgtgggtctaagcgatcattaaatatagaaaatgccttgttttggtggaggacactcataattccggagctcagcggtcaagtgctttcttagcattcggggaagccctgggttcagttcccagcactgaaaaacgaagtagagcagagacagagtcattttgccacacatctgtcattccagtcctctgaagatggaggcagaaacatcacgaggctaaagtcatttgtgactgtatagtgaatacaaggctgccttaggctatatgagagcctgtctaggggggaaacccaagcaaaatagatctgggcatagtggcacatacctataatctagcattgaagcagagagtttgtaagttcctgggatacatagtaagattttgtctcaaagaaggaagaggggaaagggaagcgaagggaagaaaggatggaaggaaggctaggaaggagggagggagggagggaaagaaaataaccagaacaaggaaagaaaaagagaaagaagcttaactaagttaatattaataatatatttttatgggccagagagatgtctcagtaaataacaatgcttgtcgcataaacctgaaaatctaaattgagactctaggacccctggtggaaaggcagagctaagtctgaaagtggtcttctgactccaacaggagtatcccatgctctcccatgcagcttttcttttacaaatatgtgcatatgtaatatgtacttacatgtatatgcaacagtaagtaatttatatattttatttgaccagatatagtaatatattaattgttttaatatataattggtttaactttttagatcttttatcctttgtactatgtctttgcagtattttacacttacagaactctgaattttcacattggctacatcgtgagtgtctggtaggtacatgaacacctgcagctaatggctgctgtgttgaagcagccaggttctgaaacctgagtgtgctccactcacaggcctccctagccaccgtgtttccctctccccgtgttctgtaatagtaggcaaagcgaagggggaagagatctcagaatcagttcatcccacagtgcctccaactgcctgcggctccattcacagcatctagggtagtgctgcccagtacaaatatagtagaaactgtatgtgtggttttaaatgttctagcagtccaactgaaaaacaaaacaaataaagcattatttaatttatttaaaatataatttcaatatatatcaatattaaaattgttaatggaaacatagatcaatggaataaaatagagagctcagaaattaacaggatacacacatagttgatctttgatcattctttttagtggaaaaaggacagtccttttaacaaatggtgctgggaaaactagatatccctgtgcagatagataaagctagaccctttcaccatgcaggaaaaatgaatgcagtatggatcaaagaccaaattaaaaaattaatactataaaacactttgaagacaacacagggggaaaaaatctgtattgcattagattaggtaatgttttcttatctatgacactgaaaagatagacagaaggtgataagaccaattgaactacttcaaaatcttgagttctacttatcaagggacacattcaagagtgaaaagtggtgtggtgagctgtgccctggactgtgagccacagcaagtcccttccttcagtgcctttgtcaggaagtctgtcacaacaattagacaagtaggtaatccatgttctcaagctgttttggtcagagaggacaaagcctactaatacagcacataggggaagaacggagcagggcacatgatgtgggagtgacagggagatctctgcttggacatctggtgcagtgctctgaatgtttgtgtcccccaaacctatgcatcgaaatcctaacccccagggtaggatgaggaagtgtagcttttggaaagccatcggaccatggagaaagaagcctagtgagcagtactggtgcattttaaaaagaggctggacatgactatgatcttgaagagctctgggaaaatatggaactttactgatgaagtacagttgggcctggtagtttgatagaagatcagaagtggattttgtagatgtatcctgactcttaagctgagcaacccattggatggcatttaaggttgcctatcaagaaagaaatggtaaccttaacagcattcagaacacacctccagaagtgagtgtgtactttagagtttggcctttgcttctagagactggagcctgtacttctgcaacttttccctgatggagcactgcctttttctggatgaaggaactagaacttttttaacagaaaaggcaagaaagggctcaatagctttcttccccctttgacaagtagaataaatttaaaaattaacttgttgagtttgttgttctttataaaaagaaaaggaagccagggatatgtttagtggaggcacagtatggtatgggagaaggcggtgcctctgctgacccatgctgaggcatcccttccccctgaggtaccagcctcaagacgaaggtatactataaaatagagtttatttagggcatggagaggggagttgaggggggagtagagacagagaaaggtagaaagggagagaaagaaagagaaagagtagaggaatggagtagaacctggccatgagcacatgggggcgggggatagggagactagggacagaaagtaagggagtaagagcaggagagtgagaagggggcaagtagacccttttatagtgagtcaggcatacctaactgttgctaagtaactgtggggtagagcctagaggaaatgccaacagagttcacttaaaaagaagacaaccaaactgtcattaaaaaggactaggaaacaagctttagaggaagctagtttaatgacaagaactaaaagataaggccagctgatgacacctgcagctgctgccccaccagcatcataggattggggagggaggactaaggaaaagcatatgtttattcacttatgaactcctatttcgaagcattattcacaagagttaagaggtggacacagcctaatgtccactgacagacaaggagataaaaaagaatgtgatggatatagagagtggaatattagtcttcaaaaggaagggcattgtgatacagtattacaacataaaaggacattgagacagctgagtgaaaagaaccagacaatagaaagccaatagtttttgtactaagtaaccctggttagtagtaaccctggttagtagtaaccctggttagtagtaaccctggttagtagtaaccctggttagtagtaaccctggttagtagtaatgtcggcagatgatgaaggtacagactgcgtgtgactctcatctgcttggactacatcctgaactagggcttcagctcatgcgagctatagtgtaagccaatacagatagcgctgtgctattagaattcttttgttgttgttgttattgttgttgtttttggttttggttttttgagacagggtttctctgtgtagccctggctgtcctggaactcactctgtagaccaggctggcctcgaactcagaaatccgcctgcctctgcctcccgagtgctgggattaaaggcgtgcgccaccacgtccaggtattagaattcttaactccatgcctagatcccatttatccatgtgtttaataactaaaaactatcattatatgccaagcattgtgtgacatggtagaatttgaagaggaaaaggtcagaaagtttggaagtattaggaatgtctgcctgaatgaccagggcctgtggtaggataatccctgtctgcccagcccagcagtgcttccttaaaaaaaaatgaaacaagattttgacatagatgtgggaggtatcacaatggtagacacggttcccactgacttctcttctgggtgagctgcaaattgaggacttctttcatttctaattgccacatttggaaaagacagacacaaatttttatgtgcgcaaaggactgaggatatagtttggtgattggctgtgctcaaagaactgatcccaagagagtctgcagaatgaattgaaggtgcttacactgcacaggcagttactaaagtgtaagatgaagaccttcaaccatgagacaagtcaaatacagaaagaacttgttggttgtgtagtaaacagttaagttatctgtgcctaccagggagatcaactaagaaagtaaacatcacagttgtgatcagctgagccttgttgaccctcataagagcctgcagagcaggccatgtgaaagtctatctgggaaggcatctgggctgcaccctttcccccttcctcaacagtgggtgcttctgagttcccttagagctatggctttaacatgcaggcaaacacagattgtgtttgggtactgcatcctgtaggggcagtgcccatgcatagtactacagcatctacccccctaaagtttgtcagcgtcgagatatttggggtatataggaatgtgatttaccatccctgtcacctatttgaatgatctaaggctcaaccccactagcctactacattcttacttgtttctgtagcaattaaaagttctgggaaatgtgtcattttagcatttggttaaatttaacttttttgttttgaatccatagaatactcatactgttctgaaattagggggtccatggaggctaatggttagctaatggcagtataaatgtagtgcctttgtatttttcacacgtgcatattattccactttctagatatgctataattgatttgactgtctctttttgataatcgattaggttgtttctcatctgttgttgtcccagtgctggctatgtattccatactttatatatgtgtgggtttatcaataggctgagttcctatttatacgagagtggctgagttgaataaaagagaacatttccatttttgttttagtggattttataaatggtgagtgagcatatctatttttgaagccttacccactggatataacctcagatgtcactggtttttcccaagcaagcaaaagaaaagcagatagttctgtattcctcacagtgatagaatgaagtgctgtacgtctgatcttgtggactttgtaataaggtcagtgaagacagttgtcaatgagactaagtctgtaggatgaggagggatgctggatttgcagggtgagccagggagggcttttattttctaaataaatgttcttcagagattcttgtaagcatgccagcctgcaagctatttaacttgaaaactatgtggcttacactggaaattttcaattaaaacaaaacaaatgtaatttcagaagtaaaagcacatccagaacaaaccatttataatgctttaacatcttttagtttaaatttaataaagtaatttacttttgtatttgaaacaaaatttaggattcaagtctgtttcccagtaacaaatttactttgaaagcagctttctcacacctccgtggaacaagtgctggccacttgcctcttctgctaccctagccttgctcccagccctaccccaaccccttaagtctcaccccacttcctgtattttttctgtgggtttgagtgggttttggcaaagactagagtctttttcactggggacattggcatttcacagcctctctgctcattagcagtctgatccatttgctccccaaaacacttgggagaaaaccagctcaatctagtttcctctagaacagattccactatcagcagctcagagctccttttgctttctgcatggtgcttactagttccaaatatgttttggttaatagtaataccatcatcctactcaccaagttgaagtctgtctccattcacatggacacagaacacataccctgtactttcaaaagagttttcagaacccagctacccctcattgcctcagtttctcccagcctgatgccagccactgtcgtctcctgcctggacttcttccatattctcatagatgcccctgtgtagcctctggcttttcccagtttgttcttagtacagccagtgacgccatgctgaactaaacacaaggcagatcctgttagccctgtatttaaagtcctcctttggattgcctgtctcagagaaattttaacatcattgtctgtctgcactatcccacccccacagctctttaacctggtctctttctgccctctctctgcttctgccaccatttcaacacctactgccagatgctatttctgcctggaatatacttccccatatacacaagacatctcacttcttcatgtcccagctgatgtcccagggctgggaattgaaaacggccttgtacacgttaaacaagtgcttttccattgagctatgtgctcaactcccagctcttcttttaggactgggtgagtagtcactgtctgagacagtgccagtgaacaggcccaagagtaactgctgaaacaaagcagatactttcctgaaagtgccccctggagtaacacattttctcacatttcattgattacacctaaccttggttagacagggaattaattccaatgagtctgggaaagtgagcctcagtattaatggtcctaataaccattagcttcttgagttcagagatggcataaacttaacaaatctaacctacataaaggtatttgtatgtgtgctcactatataatactattctaagaccctttccattggtgctaagtattgagctccttgtctctggagatgctcagacaatgactgttctaaccaccaagtagtggtgcattgaaggaacctcatacagaggctaggctggctagactgagtctttaagtagctctgattctggggcctctgtgtttataacatgcttgcccttctgagcttgaagaataacgtagcattcgctttagaagtgataacatctgagtggaacaggctatttctgttggtgatttgacagaaacaagaattgtttgaggggtgaaagcagagagcttaggccctgtgctctcggttgaattttagttttaaatgcagaaagtattaagacctatacgcactcagtgggttaaactagctcagctctgggctctgccattctttaccactggcagacatagggttagacagatttgaactttgtgtaagctctttattttcaacagaactctgactactccaaccagcaggtctgctgtattaccacagtcttgcccacacacactcctgatggaagatggtttcctatgtgtgctgttccgttgtagcgtgctgttgactcattctatcccactgtgacagttctctattagctgtaacaggaaaaatacagcttatcttctttttttattattttatatcatttttttcctgtgcatgggcacacatgccacagtgtacaaatggaggtcaggagacactttgtgggactcgttttcttcttctacgatgtgggtactaaatatagagcatgtcaggcttggcagcaagctcccttacctactaagccatcttgttgggccactgcccctcatctgacagtgagaaaaaagtaagaatcattctaacattgaaatacccttcaggctggttgattttatgacagattgacacagctggagtcagcagacaggagggagcctcaactgataaggtgccactgtaagagtcggctgtaggcaagcctgtaaggcattttcttaattagcaattgatgtgggagggcccagcctattgcgggttgtgctgttctggtgatcctgggtgctataagaaagcagtttgaggagttggagagatggcttggtggttaagagcactgactgctcttccaaacatcctgagttcaaaatccagcaactacatggtggctcacaaccatctgtaatgagatctgacgccctcttctggtgtgtctgaaagacagctacagagtacttaaatattcggctgaagcgagttgggctggagcaaccacatgatggctcacaactatctgtatagccttggctgtcctggaactcactctgtagaccaggctggccttgaactcagaaatcctcctgtctctgcctccctagtgctgaaataaataaatcttaaaaataaaaaacagagagagagagagagagagagagagagagagagagagagaaagaaaaggaaaggaaagaaaagaagaaaagaaaaagcagtttgagcaagccagtagtaagcacccctcctccctggtctctgtattaactcctgtttccaggttcctgccctgtttgagttcctgcccagacttccttcagtggtggactacgatgtggaagtgtgagccatgtaaaccctttcctctccaagttacatttggtcatggtgtttcatcacagtagtccttactaagatatcctttaatgctttttaaaaaagaaaagtcaagtcacgtcgtggtggcacacgcaggcagatctctgtgaggttgaggccagcctggtctgtagagtgagttccaggacagttagggcggttacacagagaaaccctgtctcaaaagaaaaaaaaaaaaaaaaaggaggagaaagaataagacataaagtagaataaagaaaaagatgggaagaatgaccaccacccaccaaatccactggaataactgtcaaaactctgaaccatgcataaggagatgtgaaaataaaagggctgtgtgtgctgtagtattatatatatatagatatagatatagatattcagggtaaatgtagcctacagggaaaatggacttaatcagaatgagaccttctatgatgggcatatcctgtcctcctccttgcttctggagttgctacacctgcaccagcctctttccttgtacccctcccgtacccatttcttgagaatagacattgtttagatctggaaatcccctactttccccttatcctttcccccctgagggcctataaaaactgggacccctttcccctcgtggtcaactcctctacccctgtgtgggatatgagttgtccccagagctctgactttccccaaataaagcctcatgtggtttgcatcaagtttggtctctcgtgagtttttgggtgttcactattatcccgaggcctgagcgaggggctcctcttggagtctttcactggatgtgtgagcaccctctgatccttggcttgcctaggtgacagtgtcgtaggcacagggaggaactacagctttcccattgttgggaatacaggtggtaggacaacaagcaggaaagacaggcttggctcttacaccctgcctgcatccatactgaaacttgacttggtctctgggcccagtttgaaggagacagaggcattgtcatgttcttgtatgtgggaagactatgaaaagaaaaacccttgttggcccaaatgtttaaacaggaattacactgggtcttttgttctcagtctaaactggtcagaattaatttttagactcaaaaagaatggttctccttccctcctcctttccttactataagctgagttacttaatgcaaagatatagggagatgaacaaagaaaaaagtgtacaatttaaacatatcaaatggtacagagcatccaagctcattctcaggacaactaccaaggtgttcctgccttacaattcatagctaagaagcacaccagctccttgtgaacactcacaagatataaagtgagcagtatgtgataaggggcctgaaaaacagatagattcagagactgtaagatcttcatcatactttttttctctttttctccaggcttaaggaaaagtggctttctgcaaataactgacaaaactgaccttagaagcacttcccagggcctcatggagtagctggaatttgtactacaaggctttcttgcctactggttacctgaagtggttgtcgccatggccagcaaaaggaagtccaccaccccatgcatgatccccgttaagaccgtggtgctgccgggtgccagcacagagcctcagcctgtggagtctctgcctgaaggtccccagcaggatcttccctcagaggcacctgatgcgagcagcgaggcagccccaaaccccagcagcactgatggctctgccctggcaaatgggcaccggagcactttggatggctatgtatattgctgtaaagagtgtgagttcaggtcccaggatgtgacccactttataggacatatgaactcagagcacacagactttaataaagacccaacttttgtatgtacagggtgcagtttcctggcaaaaaaccctgaaggactttccctgcataatgccaagtgtcactcaggggaagccagctttttgtggaatgtgaccaagccagacaatcatgtagtagtggagcagagtgtccctgacagtgctagctcatctgtcctagcaggtgagtctactacggaagggactgaaatcatcattaccaagactccaatcatgaagataatgaaaggcaaagctgaagccaaaaaaatccatatgcttaaagagaacgctcctaatcagcctgggagtgaggccttgcctaagccattggcaggggagagagaggttaaagagggggaccacactttcatcaatggggcagctccaggcagtcaggcatctgctaagtccacaaaaccccctcctgctgccaatgggcccctgataggaacagtgcctgtcttgccagctggtatagcacagttcctctccctccagcagcagcccccagtacatgcccaacaccacacccaccaacccctgcctacatccaagacccttccgaaagtcatgatccccttgagcagcatcccaacatataatgcagctatggactccaacagctttctgaagaactccttccacaaattcccctacccaaccaaagctgagctctgctatttgactgtggtgaccaagtatccagaagaacagcttaaaatctggttcacagcccagaggctgaagcaaggaatcagctggtctcctgaggagattgaagatgccaggaaaaagatgttcaatacagtcatccagtctgtgcctcagcccacaatcacagttctaaacaccccgcttgttgccagtgctggcaatgtacagcacctcatccaggctactctcccaggtcatgctgtgggacagcctgagggcacagcaggggggctgttggtcactcaaccactgatggccaatgggttacaagcatcaagctcatctctccctctgacaactgcatctgttcccaagccaactgtggcacccattaacactgtgtgttcaaattcggcatcagctgtgaaagttgtcaatgcagcccagtcactcctcacagcatgccccagcataacttcccaagctttccttgatgcaaacatctacaaaaataagaagtctcatgaacagctctcggctctgaaaggaagcttctgtcggaaccagtttcctgggcagagtgaagtagagcatctgaccaaagtgacaggcctcagtaccagagaggtgcggaagtggttcagtgaccggagatatcactgccggaatctgaagggctccagggccatgatgcccggagagcatggctctgttctcattgactctgtgccagaggtgccctttcccctggcatctaaagttccagaggtgacctgtatcccaacagcaacctcactagtaagccaccctgccaccaaacgacaatcttggcaccagaccccagacttcacaccaaccaaatacaaagaaagagccccagagcagctgcgagtcctagagaacagctttgcacaaaacccacttccccccgaggaggagctggaccgcctaagaagtgaaacgaaaatgactcgaagggaaattgatggctggttctcagagaggcggaaaaaggtgaatactgaggagacaaagaaagctgatgggcacatgcctaaggaggaggaggagggtgctgagcaggagggtagagatgaagagttggccaatgagctgagggtccctggtgaaaatggctctcctgaaatgtttcttagccatgccttggcagaacggaaggtcagccccatcaaaatcaacctcaagaacctgcgggtcactgaagccagtggcaagagtgagtttccagggatgggtgtctgtgagcctgaggaagatggtttgaacaagttggtagaacagccaccaagcaaagtaagctacaaaaagaccgcacagcagcgtcatttgcttcggcagctctttgtccaaacacagtggccaagcaaccaggactatgactccattatggcccaaacagggctgccccggccagaggtggtacgctggtttggagatagcaggtatgcccttaagaatggccagctcaagtggtacgaagactataagaggggaaacttcccaccaggtttgctggtcatagcccctggcaaccgagagctgctgcaagattattacatgacacacaagatgttgtgtgaggaagatctgcagaccctctgtgataagacccagatgagtgcccagcaggtcaagcagtggtttgctgagaagatgggtgaagagacccgggctgtggcagatataagcagtgaggatcagggccctagaaatggagagcctgtggcagttcacaaggtgctgggtgatgcctattcggagctgtctgagaacagcgaatcatgggagccaagtgctcctgaggccagctcagagccttttgacacttcaagtccccagtctggacgtcaactcggtaaggagctcatgggatctaagcatggcttttctctgaacctgagggagggtacagtcacagagtaggtacaggtggcaggtacagctacctctagagcattcagaccaactgcagaggagtgaatgccagggacaactggcaataaaagccatagaagtaaaagctcagaattggacttttggttttggtgcctctgtttttttatttatggtgatgtttttgttttaaatccatgcaggggagagaacatagtcttaaagagagaacttaaagggactcctgtgtttctaaccatttcttagcatggattaagacgtcatgggagtcacagagataccatctgtatgaagacagggttagggaatttaactcagattggcaagcaaaggagaatatttcaatggcctcatttgtatgtgtgcctggtactcacaaagatcagaagagggcatcagatcccctggaactggagttacaggtggtttttgacttgctgtgtaggttctgggaaccaagcctgggtcttttgtaaatagcaagtgctttgaactgatacacaatctctccagccccattttttttttttcataatgaaaatcttgtcttagatttgtattgtttttactgatatagaagagatgtttattataatggaaaatcaccttgttttaaggaatatgaaattcagtacttaagttttgcttttcagtttctcaggatgatggtattttggtattcagaagtaaatttgattattttaaggcacgattatgaagccgtgaacatgtcacaccaatagttttgattttcatgccggacagtggtggcacaggcctgtaatcccagcactcgggaagcagagacaggcggatttctgagttcgaggccagcctggtctacaaagtgagttccaggacagccagagctacacagagaaaccctgtctcaaaaaacaaaaacaaaacaaaaaaaagttttgatttttctataattttggtccatgagttccagattcttcactgtctctctgcatttgtctcctggtgaaatgccccatcccagagaggctagaacaaaagtctggagaggagagtgttacagaagccgaaggactgggtctctaaaatgatagcctggccagctggctcacaagagggcagaggcagctagaaatgtctgtgggattagacagctgtgcgggtgggacctggagactgctgcttctgtgtggggttctaaccaagtacagcactttaaccctgaggttccatggtattttctggacagtgtttcattgtttacatacaatgcatggacattgttgtttgctttggcctaggaaatcctagttccctgtctctacttattttctacttaagacctctaaaaaaaatccacaaaatgcttattcttttactgaatattcttgatttctttcaacacctgttttgaaatactatgctgttgcttgacttatttaaggaaaaggagatttccaagtatgatggttgggggaagagttgccaccagcgagcacctgtgggtgggtgggtatgccctgtcccctccccctccctctgagtctctgactctgtatatgcaggtgtgtgtgcctgtggaaggcaagaggtcaacccctaggtatcttcctcggtgccatgcagcttgctttccaaacaaggtctctgctgggacttggggcttggccattaggctagtgggtcatcaagctccagggatccacctgtctccatgtcctcagcattggaattctaagtatgtgtcatcatacctggctttggtacaggaattctagggagcaaacttaggaccttatgcttacaaggtaagtgctttactaactgaaccatcctccaaaccagaaagcttactgtttcatgcttaccactaagatgaaactcagctttgcaaagcaaacagggggcaacacctggtggcacccaagtctcttgtcacattaggcatgtgaatgcacagtgaatgccactgatctctccagttctagtcacatatgcactattggaagaatgccttcaacatctcacagtagcttttgtccccttatttcttctttccctctccttccctctttccttctcccaatttctttttttctgtgtatatatctgtgtgcatgtgcatctaagtatggaagccagaggtccacattgaatgtctcttctgtattgcttttattctttgaggcaagattattcactaaacctgaacctaaagctcactgactagattggctggccagtgagtttccgggatctaccttcctctacactcctgccttcaccctcttagagtgtgtgtctctacttacaaaaaaaaaaaaaaaaaagctttgggagtaggtgggttggggagcagggggaggggagggtatagggggctttgaggatagcatttgaaatgtaaatgaagaaaatagctaataaaaataatctagaagtgaaggaattgttatgtgggctaaaaaaagcttttattgtatttgtcatttgataattttatgcattataaagtttatcggttactatggcactcactctctctacttcccagttctactcacaaattcttgtccctctgttttggtaacccactgagtttaaacaggctcctccatgtaaccatgcacttagaactgtccattcaagcctggtggcttctcagtggacacagctacctctcctcagaatccatcagcggccaagagttcagctttgtcccatgaacccttccccaatccacgtgtattgatagacccagatccccccatttaaaaattaattttgattttatgtgtattggtgttttacctgtatatgtaccacatgcctgtctgatgcccttagatgacagaagagggcactggatcccctggaactagagctacagattgtatgctaccatgtggatgctgagaactgaacttgggtgctctgcaagagtattgtgtgtttttaactggtgagccatctctacagcctcctaggcccagtcttatataaaccaagtaaagacagatgctgtgagatcattactgcattgacaatgccaggctcaaaagacagcatttcacagtccttgtgccctggctcttctatacttttaccctctctttaatgatggatctctgagctttagagtaggtagaataaacatcctgtttagggctgaacactcaactatcacttagcaccccgagcaaccatttgattaggcatcttgttgctgtagcagtctaactaaaaaaatactaataacttttccgctagggcctaagatttccttagccatgagtttttaccaaacaagagttctcttttctgtgagaaagcagttgtttatacatagaacagttatgtcactattgcactagcgaacacatcttgccttacagattgatattgtagtttgtaggattaacagctatataagactgttggtgccttttctccttcagcagtatatatatatagcatcttcagcactatagaagctagccagcttggaaaaagcttccagctcagttccagtttgacttctataccttacaaccaaggtatatggtgtcttacagtaatagagtcttatcaacgagttctgatgggcaaccaagaggaatgacagtggcttgtatttttgtgcacatctctggctctatgaccaacaactcataaggcattatctcacatttggcctcaccaaaacaaaaaaacaaaaaacaaaaacaaccaaacaaaaaactagcaaagcatcctgctgaacattcacagcatcctgaggtgagcatgaagaggctttcctggtttggtaaatgtctgctttctgtgcagcagtcctctttcaacacagcaggcagcctgggaactatggcccaggttgctggtgtggcttatttttgccagagggtagtaatgactttgtcctccaaaacttgcagcttgccgcatttttgccatcatagaggccagcatcttcttagccactgggtatttaaagagagcacttccaccttttggcaaaccagacatttaaagaatcttatgtttccacagagacaacacagcagaaacttcaataaccccacatatgaagagtacacacttgacaggaagtttggaaaaaaatctcaaaacagatggctccagccctcactgagcaaaaattatcaattctggaggctaagagaattaaattttgagttaccacataccatacttagaaggtccagttttcaatagaaaattacaaaacagaaaaaagaaaaagtatgtccattaacagaaaaaagagattgacacatagcttcccttgaaaagtcgaggcatcgactggaatcactgattaaagatcttagatctgccttcaatctgctcagtgaaatacaggaaaccatgagaagaatgacgagaaatcagggagaaaatggatcatcacaatgacaatgttagctaaagaggcacaaactataatagcaaacacactctagagaaaaacagtataatcactgagacgaaaaatttattaggctaagcaaccgatttgagcaagaaggaaggggtcagaggatttgaagagatgatgaaattacccacaggcacagaaaacaaaatggataataaatagaaactaaaggggcctgtgggacatagataaacacggacatgtgttgtaggaattctaggagaaagagacaaaatatctaatgacagaaaacttttcaaattagatgaaaggacacaaacatacacatccaaggaattagagaactcacagcttgtcatgtaagggatcctcaataaggttagtggctgaggaaggaccatctgaagtactgaaagaggaaagcagctaagtcatttccagatgaacaaaagcaaaagttggttgttgctataggttgttctactggagatgctatcaagaggcctttgtgtagaaatgaaatgatagtgaatggtaatttgagcccacaagaaaaaataaccacaataatgatgattttataggtaaatataataccagtgttatattgttatagctatataattatagttagtttgtaatttttctatcatccctgtatgatttaaaatgcaaacctcatgaaaagtataactctgttaatccaataggaagatgaatctgcagtaaacagcatggtcagggtctgtcttagtcagggtttctattcctacacaaacatcatgaccaagaagcaagttggggagtaaagagtttattcagcttacacttccatactgctgttcatcaccaaaggaagtcaggactggcactcaagcaggtcagaaagcaggagctgatgcagatgccatggagggatgttctttactggcttgcttcccctggcttgctcagcctgctctcttatagaaccaagattaccagcccagagacggtcccacccacaaggggcctttcccctgtgatcactaattgagaaaatgccttacagttggatctcatggaggcatctcctcaaccgaagctcctttttctgtgataactccagctgtgtcaagttgacacaaaactagccagtacagggtctgaataacacggaaagtgagtggtgtcaggttggattgtttcaagtttatagcattattatgatccccaagttaagcaataaaataacaaaatacaaaggagtcaaactgagcacactaagaaaagtaaatatccaaaatgacagtaagggagggtttaaaaataaaaaccaaataagacaaaaaaaaaaaaaatagctgggtggcaggaattctccttcttcatcagtaatcacatacaatgtcaatggattaagttgttctaaagacaaagattgccatattggaccaaaaccatacaggaaccatctatttactgtatgtaaagattcactttaaatacagggacacaaaagaagtcaaaggtaaaggatagaaagagaattaccagtggttggagtctttactgaggtgtttccaggtctctctctctctctctctctctctctctctctctctctctctctctctctctctctccccttttctgtgtgtgtgtgtgtgtgtgtgtgtgtggtttttcaagaaagggtttttctatgtagcattgtttgttctggaacttgctgccaggctggcctcaaactcacagagatctacctgcctctgccttctaagtgctgggataaaaggcgtgtgtcactaccaccctgcctagttcctagtctcttatccaaaaacctgaaaaatcagagatcacacagatgtacagaagcagcaagataactcccctccagggagacactgtgatgattgacaatggacctctactggcctcccaagctgtcatgtaatacacagacatacatgcaggaaatacacccacagacatgaaaattatttttttaaagataaaaaattgttttaagattaagatgttttgtttttagggaaatgcatatgaaacaataaaggtctacaatgagattctagctcgcacttaaatcagctgttgttaatatgtacacagacagagccaaaggcattgctgaggaggtggggagagccagctccctgatccactgctgctgtggatgtaaagggattaaaccttggaaacctcttcagcaggtctcaagaaacaaacacaggtttctcatccaatcctaagtctcactcctagcactgaaaagagggcctgaactgacactgtgactgaatattcaaagcagtcgaattcacaagtctccaaagaaggaaacaagctgtatacattaacaatacaggaatggataaatgtgccatagatggatggacggacagacagatagatagatacacacatatacatatgtaatataatattattcaattataaaaaagaatacaattctgatacactgcatgtggatggaacttgaacacataatgctgagttaaataagctactcataaaagagaaatagtgtatgattctacttttatgaagtcgacaaatttatagagattgaaggtagaatgtaagcttctgagaagaactgacagttattatataatggatacagaacttctatttaaatgtacataaaactagtgagacatagtgtggctgtgatgagaaactgtgtgttacgtgtattgtaccatattatgctttaaactggagacaagatgagtgagtgtaacaggcatggcagagcagagcagagcagcaagggcggccaaaccctagtggtagcttggcctccaaggcttggctgttatctgtaccatagcttcttgtgctctccagccagcctcagtagaaagaccctgtctgtaaacatgggataagagcctgtgatcagctgccctgaccttgacttccaacttgcaaggtgtacatgagatgtcagagctcagagctctgggggcaggaggcaggacttttggaacacagggttaacaggcatcatgggtcagaggccaggatgatgggctaggtgagtgacaggagcctaagatgtctgaaggccttgtccaactgagccagcatcttgtccttgacccacactctgctctttcacctcctctcaggctggaggggacagtggcctggcattcctcgtggaattaaggagtccccaactccagtgataccagcccaggatagtgaggataggacatccctggggactgtacacgttgtagctgccatggagtgacaggtatgtgttttctcctcagaagcagactgaatttgatcttgattactgtgaaggaccggccagtctgggatgctgtatgccatgtggaagggccaaaactgccacatatcatcttgatggccagctgccaggcaccaggagagcctctggagcctcgctgaacccagaacctgccaccgccccaaccaccttccgcctgacatttctgagcaaatagcaatggtttctcatcagcccatcttcccacagagcaggacctttccatggcctcccagggacaattcagattgcatatacctagacccagaatcaagttgttagcatatacagctgcctatattcatttaataaagcatactactacagacattttcaatacataggaactcgggttaccaaaacagtacagctctgacaatgccatgtctgttttctgggaagctgagaccacagggaccctcatcctctgcaacagtgggagtcccaggcatgctcagaactgcaccaggcctggccctacttgtcttctcaagggaacagattgttggaagagatctctgcatcactgagtggaggcaagccacattttgtgccagacttgtcttgtgttctgattgacaaagagcccactgttaccttcagttctgaacacaaccaagctatgacattaccattggatgctaaccattctctttagttaactgtaattctggtttttttttgtttgtttgtttgtttttgagtttgaatcatggaccaacttctccattatcagatcaactaaagaaaccattgttgtaaagcccaatctactgacctgtagctcccttcagcccttcaatccagactcctttagaacaaaaggaaagtgatcaaagtagagccaattgctgtggctttggtcaccaaagtgctcaatgcctcctgcaggtcagaaggaaatacatggtggctggaggaagaatgaggctgaagggcttgggagatttgaagtgactagagctacactgttcttgaacacaaagacctgcaggtcagagttcctggcaaaatgcctgtcacacaccaagggccctggccagctactggtttcatgatccagaggtgctgggcatcactggacagattcctgtgagggtgtttttaaagttccacatttatattcccaacctgagaaacaagtactctatctacttttgcctaagcctcatgtctttttaattaaaatcacaagaaatggtgcctttgaaacaatggaaaacttgcttagggaactgtactaaacattaaagccccagtctcacctaggctggcttctctgagagcagtagacaaagcagggtaggggagggaaagatgacaaacaggatgtgtcatcatagccccacttacctcttggagattccatcaggagacccacaggcagggcaagagctttgaaaaccaagaagcagtggtcaacttccaggtgttctcctccctcccttcccaggggaggggaatagtctgaggatgaacatggcggccttcagccttttaggaaagagggcttttttttgtaatccagggccctggaaccattataagttgtttctcctgcccttcctgttcccatagggatggcctcacgtttgattggaatttattattttgttttatttttggggtttttttttttttttttttttgactacttggcaagttttgttgcctatttttgtatcctttctgtttggggagggaagctatttggccccaaaccttgaggaattggaaagaataaatggtgagtgattgtttttcttcagagaacagaagcctgaacgttctccagaacatgtttgtatatgtgcagatttacatatccatatatacaggacacatacttatttgatactttattcataaatcgtacaactgatgtgcatttgagcttcatgtggatgcctagggggaagtagtctgtgtgtgaagagagaacagtatactgggcagctggagcagcaggggaagccatctcctgtctaagaagcatgtgtgtctcacctgagcccagacgcctgctgggcttctcctccagagccctgctgcactagctgaacagtagactataaaaatgtctgaacaatgtacatggaacagaaacattacgttacttggtggacattatgcaggacacagagagcagcctggtctcgggcactaggtagtcttctggatgggaagttgcagtaacactggccccagcacacctttctcagagctggtaatggcaagattgttcaggtaagaaacaagttgcttcctttgcccttggataggggagggaagttgtggcttggaccttgtttgatagataatggtgagggaggtggtcatagcgtaggcactccagggaagggctttgggtaccaagcatgg

SEQ ID NO: 1359 - DNA, 3350 bp, Mus musculus
tctctgtgggtggttaatcttaaagacagatggtcctaagtgggtttcttcctataataacaattaaggaatggctgaattgcagctacagaggcagcaaacgactccttaaagatgccacaggactgcagaaagtgaaggggaccttggagaagatgatgaaggaaaaagaatgtttctcccaaggacaagaagcttaaggaaaagtggctttctgcaaataactgacaaaactgaccttagaagcacttcccagggcctcatggagtagctggaatttgtactacaaggctttcttgcctactggttacctgaagtggttgtcgccatggccagcaaaaggaagtccaccaccccatgcatgatccccgttaagaccgtggtgctgccgggtgccagcacagagcctcagcctgtggagtctctgcctgaaggtccccagcaggatcttccctcagaggcacctgatgcgagcagcgaggcagccccaaaccccagcagcactgatggctctgccctggcaaatgggcaccggagcactttggatggctatgtatattgctgtaaagagtgtgagttcaggtcccaggatgtgacccactttataggacatatgaactcagagcacacagactttaataaagacccaacttttgtatgtacagggtgcagtttcctggcaaaaaaccctgaaggactttccctgcataatgccaagtgtcactcaggggaagccagctttttgtggaatgtgaccaagccagacaatcatgtagtagtggagcagagtgtccctgacagtgctagctcatctgtcctagcaggtgagtctactacggaagggactgaaatcatcattaccaagactccaatcatgaagataatgaaaggcaaagctgaagccaaaaaaatccatatgcttaaagagaacgctcctaatcagcctgggagtgaggccttgcctaagccattggcaggggagagagaggttaaagagggggaccacactttcatcaatggggcagctccaggcagtcaggcatctgctaagtccacaaaaccccctcctgctgccaatgggcccctgataggaacagtgcctgtcttgccagctggtatagcacagttcctctccctccagcagcagcccccagtacatgcccaacaccacacccaccaacccctgcctacatccaagacccttccgaaagtcatgatccccttgagcagcatcccaacatataatgcagctatggactccaacagctttctgaagaactccttccacaaattcccctacccaaccaaagctgagctctgctatttgactgtggtgaccaagtatccagaagaacagcttaaaatctggttcacagcccagaggctgaagcaaggaatcagctggtctcctgaggagattgaagatgccaggaaaaagatgttcaatacagtcatccagtctgtgcctcagcccacaatcacagttctaaacaccccgcttgttgccagtgctggcaatgtacagcacctcatccaggctactctcccaggtcatgctgtgggacagcctgagggcacagcaggggggctgttggtcactcaaccactgatggccaatgggttacaagcatcaagctcatctctccctctgacaactgcatctgttcccaagccaactgtggcacccattaacactgtgtgttcaaattcggcatcagctgtgaaagttgtcaatgcagcccagtcactcctcacagcatgccccagcataacttcccaagctttccttgatgcaaacatctacaaaaataagaagtctcatgaacagctctcggctctgaaaggaagcttctgtcggaaccagtttcctgggcagagtgaagtagagcatctgaccaaagtgacaggcctcagtaccagagaggtgcggaagtggttcagtgaccggagatatcactgccggaatctgaagggctccagggccatgatgcccggagagcatggctctgttctcattgactctgtgccagaggtgccctttcccctggcatctaaagttccagaggtgacctgtatcccaacagcaacctcactagtaagccaccctgccaccaaacgacaatcttggcaccagaccccagacttcacaccaaccaaatacaaagaaagagccccagagcagctgcgagtcctagagaacagctttgcacaaaacccacttccccccgaggaggagctggaccgcctaagaagtgaaacgaaaatgactcgaagggaaattgatggctggttctcagagaggcggaaaaaggtgaatactgaggagacaaagaaagctgatgggcacatgcctaaggaggaggaggagggtgctgagcaggagggtagagatgaagagttggccaatgagctgagggtccctggtgaaaatggctctcctgaaatgtttcttagccatgccttggcagaacggaaggtcagccccatcaaaatcaacctcaagaacctgcgggtcactgaagccagtggcaagagtgagtttccagggatgggtgtctgtgagcctgaggaagatggtttgaacaagttggtagaacagccaccaagcaaagtaagctacaaaaagaccgcacagcagcgtcatttgcttcggcagctctttgtccaaacacagtggccaagcaaccaggactatgactccattatggcccaaacagggctgccccggccagaggtggtacgctggtttggagatagcaggtatgcccttaagaatggccagctcaagtggtacgaagactataagaggggaaacttcccaccaggtttgctggtcatagcccctggcaaccgagagctgctgcaagattattacatgacacacaagatgttgtgtgaggaagatctgcagaccctctgtgataagacccagatgagtgcccagcaggtcaagcagtggtttgctgagaagatgggtgaagagacccgggctgtggcagatataagcagtgaggatcagggccctagaaatggagagcctgtggcagttcacaaggtgctgggtgatgcctattcggagctgtctgagaacagcgaatcatgggagccaagtgctcctgaggccagctcagagccttttgacacttcaagtccccagtctggacgtcaactcggtaaggagctcatgggatctaagcatggcttttctctgaacctgagggagggtacagtcacagagtaggtacaggtggcaggtacagctacctctagagcattcagaccaactgcagaggagtgaatgccagggacaactggcaataaaagccatagaagtaaaagctcagaattgg

SEQ ID NO: 1360 - protein, 981 aa, Mus musculus
LEFVLQGFLAYWLPEVVVAMASKRKSTTPCMIPVKTVVLPGASTEPQPVESLPEGPQQDLPSEAPDASSEAAPNPSSTDGSANGHRSTLDGYVYCCKECEFRSQDVTHFIGHMNSEHTDFNKDPTFVCTGCSFLAKNPEGLSLHNAKCHSGEASFLWNVTKPDNHVVVEQSVPDSASSSVLAGESTTEGTEIIITKTPIMKIMKGKAEAKKIHMLKENAPNQPGSEALPKPLAGEREVKEGDHTFINGAAPGSQASAKSTKPPPAANGPLIGTVPVLPAGIAQFLSLQQQPPVHAQHHTHQPLPTSKTLPKVMIPLSSIPTYNAAMDSNSFLKNSFHKFPYPTKAELCYLTVVTKYPEEQLKIWFTAQRLKQGISWSPEEIEDARKKMFNTVIQSVPQPTITVLNTPLVASAGNVQHLIQATLPGHAVGQPEGTAGGLLVTQPLMANGLQASSSSLPLTTASVPKPTVAPINTVCSNSASAVKVVNAAQSLLTACPSITSQAFLDANIYKNKKSHEQLSALKGSFCRNQFPGQSEVEHLTKVTGLSTREVRKWFSDRRYHCRNLKGSRAMMPGEHGSVLIDSVPEVPFPLASKVPEVTCIPTATSLVSHPATKRQSWHQTPDFTPTKYKERAPEQLRVLENSFAQNPLPPEEELDRLRSETKMTRREIDGWFSRKKVNTEETKKADGHMPKEEEEGAEQEGRDEELANELRVPGENGSPEMFLSHAERKVSPIKINLKNLRVTEASGKSEFPGMGVCEPEEDQKLVEQPPSKVSYKKTAQQRHLLRQLFVQTQWPSNQDYDSIMAQTGLPRPEVVRWFGDSRYALKNGQLKWYEDYKRGNFPPGLLVIAPGNRELLQDYYMTHKMLCEEDLQTLCDKTQMSAQQVKQWFAEKMGEETRAVADISSEDQGPRNGEPVAVHKVLGDAYSELSENSESWEPSAPEASSEPFDTSSPQSGRQLGKELMGSKHGFSLNLREGTVTE

SEQ ID NO: 1361 - DNA, 152964 bp, Homo sapiens
tcacttgagccaggagtttgagaccagcctgggctacatagtgaaaccctgtctctacaaaaaaaaatagaaaaattagttgggcatggtgctgcgttagtcccagctactcaggaggatcacttgaacccgggaggtcgaggccgcagtgagccatgatagtgacagtgcactccagcctgggtgacagtgagcccctgtctcaaaaaaaaaaaaaaaaaagtaacactgaagtcatcacaatggattctaacagaagggtggcctgaccgtaataatgttctctatccccacagcagagagctgtcagtcacttccttgaattccctcacctcgaaggccagtttctctcctcatccctgcatgcaggagatattccagtagggggttggttttctgtgcctgggtacaaaatggtgattccctaactagttaccatgaaatctgtctctattaccactctttctgtgtctcataagtagaggagtggtgggggattgtgggggagggacatgtttggttttgtgtggctatgggttttatagaaaggcagtcttaagatgtgtgtgtgacttctctggcttcacactcgttatcagattcttccatggtactgtgcacagctatacttcactcattttcagtgttgtctgtagtgttctgctgagtgaatatatcacaatttattccatctgctactgatgggcatttgggttgtttccaacgtggggttattataaataatgctgctgtgaacattcttgtacatgtctactgctgtatctgggcatgtgtttctcatgggtatgtattttggagcagaatttctgggttatgagctatgcctatgcttaacttaaaataatgctactgggtgcggttgctcacgcctgtaatcccagcactttgggagactgaggtgggtggatcacaaggtcaggagatcaagaccatcctggccaacagggtgaaaccccgtctctactaaaaatacaaaaaattagcagggcatggcagcatacacctgtagtcccagctacttgggaggctgaggcaggagaatttcttgaaccctgggggtagaggctgcagtgagccaagatcgcgccactgcgctcaagcttgggacagagcgagactgtgtctcaaaaaaaaataataatgccaaactgttttccaaaatgtttatacaagtgcactcccttcagcaatgtataagagcttcccttatacattcaccaacagttgttactgtcagacttggaatgtttagccacctggatctgtagtagttgttcgctgtatttcattttcatcattaatgaggctaagcacttgctacatgtttattggctgtttggatttgtgtctgtgtgtgtgtgtgtgtgtgtgtgtgtgtgtgaagagcctatttttgcccatttttctattggtctatatagtagtttttgtatattttggatataaaacttttgttatgtgcatggcaaatctgtggcttgcttcttcactctcttagtgatgtctcttgttgaacagttcttaattgtaaaaaaaaaaagtgcaatttatcgatctttcctatggctagtgctttttctgttctgtttaagaaaactttttttctttttttttttttttttttgaggcggagtctcgctcttgcccaggctggagtgcagtggcacgacctcggctcactgcaagctcggcctcctgggttcacgccattttcctgcctcagcctcccaagtagctgggactacaggcgcccgctaccatgctcggcaatttttttagtatttttagtagagatggggtttcaccatgttagccaggatggtctcaatctcctgacctcatgatccgtctgcctcggcctcccaagtgctgggattacaggcttgagccactgcgcccggccaagaaaactttttctaccttgaggttatgaagatattattgtatgttatcatctaaaatttattgttttacctttcatgtttaagtccatatccaaaaaaattggtttggctgttcattgaataagtgaagtttagttggagcaacatatcacatatatgcacccattcattcaagatatatttattgagtatcttctgtatgtcaggccatgattatagttttattttgtgtatttaggtcataagcaatccacctgccttagcctcccaaagtgctgggattacaggagtgagctaccagacctggccagcgtcaaatagttgagtcttgtttgtttgttttaatttcagtttgttaattttccccttttgctagaatatttagtccattcccatttaatataattacagatatgatttcaaaccatttaagtatataatctggctatttaaaaaaatctatttgtcctacctggcttttgtccctgtttaatttttttgtccttcttttggagtagccaagtattttttattccattttattatctccatttgattttttttctttctttctgagacggagtctggttctgtcaccaggctggagtgcagtggtgtgatctcagctcactgcaacctccgcctcctgggttgaagcaattcccctgcctcagcctcccaagtagctgggactacaggtgcatgccaccacgcccagctaagtttttgtattttagtagagatggggtttcaccattttggccaggatggtcttgatatcctgaccccgtgatctgcccaccttggcctcccaaagtgctgggattacaggcatgagccgcccggcccatttgatttatttattttttttaaactgcggtaaaatctacataaatctacataaatctaggtattaactttttttttttttttttgagatggagtctctctctgttgcccaggctggagtgcagtggtgcaatctcagctcactgcaacctctgcctcccaggttcaagcaattctcatgcctcagcctcccaagtcgctgggattgcaggtgagcaccatcacacctgactaatttttgtatttcttgtagagatggggtttcaccatgttggccaggctggtcttgaactcctgagttcaagtgatccacccaccctggcctcccaaaatactgggattacaggtgtgagccaccgtgcccggccctgtattaaccatttttaagtgaacagttcactagtgttaacttcattcacattgttgtgcaaccaatctccagaactcttttcatcttggaaaaccaaaactctatactcataaaacaataacttccaattctcccttccccccagcccctggcaaccaccactttactttctgtctctatgaatttgactatagtaggtattttacataagtggagtcatacaatatttgcctttttctaactggtttacttaaccagttagaaaaatgtcctcaagtttcatctatgttgtagcatgtcagaatttaattccttttaaagattaaataatctttcatatgtatataccatatttttcccatttatctgttaatagatgcttgagttgtttctaccttttgattattgtgaataatgctgctataaacatgggggtacaaatatctcaagacttagctttggacctgggagtgatgtatggtgaattatacaccacacaatgatgttttgcatatacaatggtgcaacactgtacgtgcagtcagtgatgaactgcatgtacagtggtggtcccataagatggtaatggagactaaaaactcctgtcacctagtggccttatagccatcataacatcagagtgcaacacgttagtcacaggtttgtggtgcttctcatgtaaagaaacctgtgttgccagttgtctaaaagtacagcacatacaattatgtacagtacatgatacaggtaatacaaataacttgatacttgtaataaatgactatgttactggttcatgtgtttactatttatcattattttagagtgtactccttctacttataaaaaataactgtaaaatagtctcaggcaggtctttcaggagggattccagaagaaggcattttcatcataggagttgacagctccatgcatattattgcttctgaagagcttccagtgggacaagatatgaaggtagaagacagtgatattgatgatgctgaccctgtgtaggccaaggctaatacgtctttttacaataaagcttaaaaagttaaaaaaaagttaatagaaaaaagcttatagttgggaacccaaggcgggtggatcacttgaggtcaggggtttgagaccagcctggccaacattgtgaaacactgtctctactaaaaatacaaaaattagccaggcatggtggcacacacctgtaattccagctactcgggaggctgaggcaggagaattgtttgaacccgggaggtggacgttacagtgagctgagatcactccactgcactccagcctgggcgttggaatgagaccctgtttcaaaaaaagaaaaaaaggaaaaagaaaaaaagcttacagaacaaaaatatgaagaaagaaaatgtacagctgtacagtgggtttgtgttttaagttcagtgttatttcccaactacttggggagctgagatgggaggattgcttgagcctgggaggttgaggctgcagtgagctgagattgtaccactgcactccagcccaggtgacatagcgagatggtctcaagaaaaaaaaaaagctaagtgttattacaaaacagtcaaaaagttaaaaatatttaaaagtacaataagctaaaaaagttaaagtaagctaaagataattattaaagaaaatctttttttacctatttattttcctttcctttttttttttttaagagatgggctctccatctgtcacccaggctagtgtgcagtgccatgatcgtaggtcactgcagcctcaaactcctgggctcaagtgattctccaaccttagcctcctgagtagctgagactatgggcatgtgccactacacccagctaatttttacatttttttgtagagatggggggtctcactgtattgcccagtttgtctcaaactcctgccctcaagcaatcctcccaccacggccttccgaagtgttgggattacaggtatgagccactgtgcctagccaaataaaagcatttaaaaactaaatttagtgtaagtatggccgggcatagtggttcactcctgtaattccagcactatggaagaccgaggcaggcagatcacttgaggccaggagtctgagaccagtctgggcaacatattgagacgctgtctctactaaaaatataaaaaattagcttggcatggtggtgcacacctgtgatcccagctcctagggagactgaggcacgagaattgcttaaacccaggaggcagaggttgcagtgagccgagatggcgccattgcactccagcctcagcaacagagcgagactctgtctcaagaaaaaaaatttagcagtaagtgtatagtgtgtatacagtctacagtggcatacagtaatttactaggtctgcacattccctcacaactccctcactgactcacccagagcaacttccagtcctgcaagctccattcataagtgccctgtacaagtgtaccattttaaaatattttataccctacttttactgtaccttttctatgtttagatatgtttagatacacagatgtataccaccgtgttataactgcctacaatattcagtactgtaacatgctgtacaggtttgtaaccgaggagcaataggttataccatatagcctcagtatggtaggctttaccgtctaagttgtgtaagtacactgcatgatgtttgcacaatgaagcaataacctaatcacacatttctcagaacatatccctgtcattaagcaatgtgtgactgtacttctactcacattttattgaccaaagaaagtcacatggctattcacaaatccaagctattgtaaggaagtacaatcctatcatgtgcctacagaggtcttatggagagcatcccagtttttgtccccttttttgctgggaaaaaaacagctttcaggccaggcatggtggctcatgcctgtaatcccagcactttgggaggccaaggctggtggattgcctgaggtcaggagttcgagaccagcctggccaacatggcaaaaccccatctctactaaaaatacaaaagttagccaggcgtggtggtgcacgcctgtaatcccagctacttgagatgttgaggcaggagaatcacttgaacctgggaggcagaggttgcagtgagccaagaccatgtcattgcactccagcctgggtgacagagcaagacacagtctcaaaacaaaacaacaaaaaaaaaacaacttttttttttattgccacttaaaaaaggcctccctactatgcagaaatcaagaactcaacaattgtttcctgtgtcactaccaaatgtttcccaggggttttgccactatgtggaaccagcagttctgtgagggacttctttcaagataccgcctcagctagaaacaatttcccttttcctggtaattggccatttcttgattcacagaggtggcttcctggtgaacttcatgcctgtaagctggcatgactgttctggaggagagtacctaccacaagttgggtcagttagagccttttctacatgattttgtgattagaatgattagggagttttagtctctgggtagttggaattgtatctcatacttgggagaggttggtagacacatttcccattgtattattaatacctggaggcagagaaaacaagtttgctggagtcatactggctccccttactctgcttccagcccatccaaaatcccagctaattatttcccttggcctctgtgagatccatcccacccaaagcctaaagataaagtccccttttattttccttgaattggtctgatgggtttctggtccttgcagccagcaaacttcagatagttctttgcctctggaccctggcacaaaaagttcacaggtgtagcccattccaataaaacagaggtcaggtggtaactattgcattaactatactagcagtttccttactgcttgagaaagctcattagaatgtgagtgcaaatgacattattatagggattacctgaaatctgcttaattttttttaaaggaaagtaatatgcctctgtgtgtaaatatcatttgtgacataccccccaacactggtattaaatggctgtttcttctgcctggaatctctgtctcaacaactctttagatgtggccccaaagtcaccttttctgggaagcctacccacactctcctgtatattgttaattatgctattctctgtgcttcccaaagcagttggcacatccatctttgttacatattttctcccagaagttttttgtttgtttgtttttgagacagagtttcgctcttgttgcccaggctggagtgtaatgctgcaaactcgctcactgcaacctgtgcttcccgggttcaagtgattctcctgcctcagcctcccaagtagctgggattacaggtgcgcctcactatgcctggctaatttttgtattttgagtagagatggggtttcaccatgttggtcaggctggtctcgaactcctgacctcagatgattcatccacctaagcctcccaaagtgctgggattacaggcgtgagccactgtgcccggccagaagtattttttttacatgactgtttcctctgaaatactgttcctcaaaggtcgggagaatacctcatttttctcaggatcccactgtgcctggatcaaaatagatgctcagaaaagtttgttgaataaatgaagttgtattggagcagtataacctatatacattctcattcatcccagaaatacttattgagtacctgaacatgtcgacccatgttctagatgttgaagatgggaaaaacaaagttcccaccttcagagatattatagatgatattcaggttagaagggctaggcagaaaagtaaagcaggcttagaggatagtgattggagttgggacttgatactttagtagagtggtctgggaaagtctggggaggtgacttttgagtagaaacttggaaagcacacgcctttctgatatctggaggaagcaacaccaagtacagaggttctgaagtagaagtgagcctccatattccaggagcaagaaggaggctagtgtgcctggcatgcaatgaggaggccgagtggaaggaggtgcagttagagaggtggagagtataagtggacgaagggcagacacataggatcttggaagcctttgggaaaaaaaccacattttggaaatgaaaaaaataggtgggcatggtggcgtgcacctgtagtcctagctacctgggaggctgaggtgggaggattgcttgagtttgggaggttgaggctgcagtgagctgtgatggggccactgcactctaacctgggagacagagtgagactgtgtcccactctccaccccactgcccccatatttttttttttttggcttttactctgagatgggaaaccttctgggggcttttgagcttaggtttcaacaggatccctctggcttctgtgttgagagaaggcaccatgagagcacagtggaatcgtggagaacaggcaggaggctactacaatattccaggaaagaggaaaaggggtattttaaaggtagagctgacaggcttttctaatgggttgcatgtgggatatgatagggagagtggagtccaggatgactccaatggtttgtctggagtcatcagaagaatggagttgacatgaactgaggtagggaaggttgtgaaaggagcaagctaaggtgccacgtatgggtgtttgactatcgacttgtttacttggacacatcgctcacacttgtgtatatgctccctggttttcaggatctgaaggttctaaagttacttgaagttaaaggcagccttacttattgaacaccaagcactgtgcagaaatctttatatgtggtgtcatttaacccttttaatatttctactgatttactcatgtttcattgcccttttacagttgagagattaacacgtccaaagtcactcagacaattattaacctgctagattaatgcagatctgggattcccatccaggtgtgtcaagaccgtagagctcctgctgtttactaatcactggattctaaaggtgggagccactttctgagcatatttgctgcagacttggttccataactaaaaaggtgcctggatcatgtgacgagaattcaggaaagaacccaaccccatcccaggcattacaggttatacaacagctatgaagaaaggacggtattagtggactcgaggaggctgactgatgtttgaaagttcaagtacttgaagactcaatgttaaaacagtgatcaagagttagtttttttgttattattcttaagaaaacagaaaatattaaaaattgcagtgaacccttggttggataaaagaccactcctagtcgacgcttgttgggaaacactggaattggaggagtgggggcagacaggagcgagagcccctgccagcctacacacacatccttttgaaagtgtaacctggtgtgaccttctttaagtggtcctctggaaagagcaggatatggagtacaaaagccaggaacctctgggaccgcagcatccgcccccagcgcctccttccccgtcttcttcagcctccacacggtggggcggggaggaggggggaggaggagtgctggcgcatgcgccgggggcaaggtccgctccccgcgacgtcagggggctcgcacccgctcgaaagccccgccccgcggccgccagaggcgacctgggcggactggggggcctgggccacgcccccagccgagtcgagcaaggccgaggggagccgtgcaaggccgagcagagccgagcgcctccgagagcggccgagcccagccgagcggcccggagtcggttggtgcagctgcgtccccgccgctcagcagtccgcggctccggcgtcgccgccgccgccgcctctgcggggcctgcgccggccgcccgcccggccgcggggagggaggcccgcagcgcgggaagagcggcccggtcgcgggcgccgccaccgccgccgctgccaggtgagcgcccgccacggccagccggccccgcgtgcccccgcggctgtcagtccccggtgtctgtatctctctctgcctgtcagaccctgtgtctgcgcgagctccttcccgccacgcctggcccgcggccggcccgcagtctcagtcagccccctcccgccggctgcccctggtctttctgtcagccgccagcacccccatgctgagaggctccgccccttccccccggagccccgccctccgccatctgtcatcaccccccgggctccaggagcgggcgtccaggggtcctaggggtcagggtagccccgcgtgccaccatcgtagaaggcgcaaaagggggtggtagaggggaagcgggggcgttcgcgcaggcccgcctgaccgtgtgagagtgcatgcccgagtgtgcgttccgcgtgtgcacccgagagccgcctgcgtccacgcccgagggcccttgcactctgctgggatgtggcagcccatgcccccggtgtaaagagcgtcagctcgaccagtgaaggcggcagagccaggactcgaaccactcggggtacagtagcaccctgaatcttgggacccttgtctgcccacgcgaaaacactacacgtgggccccaggtcctcggattccctgagtggcgtgtgagtggagtttggagcttgttaagccttcccagtttgggattttcattcagggaagcctgttggaagtgattgaggagtggatgggatgtaggacttaggtggggagtgtttgagggcttgagtcattttgagttgcatggtttacatttctgagcagtgattgccctgggcttgtgccctgcgagaaacttatgtgacttggggtgggggagtgaggtaggaaggaatgctcctttctgtttttatctatgtgaacacatagtatatatttatccagatatcctaaatgtttattcatgaggcgtccacacgtccttaatttaaaaaaggattacagtagtttccatttatacacgttcttgtgtgttgttatctcaatgctctttatttgtggtaacttagtattgcaatatttcaaaactaagagaaaatgcatcctaaaacaattggtattttgccggataattctgaaccacggagaaggagccaaaagcgcacttcattagctggaacaacttattcgagcttaatttgtttctaagagacatacagtggaaaaatccagaagcgcaaaatagtatcaaagacacatagaaaatgaatgaaaagggcccttctgttgctgccttggaaagatggtatcaaagttgctgtagaggacagagccactatgtaatgatcaacatattaaccaagttggttttgtgaccttgatacattgagcggggcttgatttgtgcagtggttcatgacaggcaaacattgcatgggaagtgtggtaatttttggaaaaaaatgttccccatgttgttttggtttttggttttgagtttgtttttttttttttcatattgaagtaagatttcagacaagggaagtctcatggtggagtgcttttttctttttaaagataacattaaaaattaccaaagtaattcatgtttaaggcagaaaacttgaaaaacaaagaaaagcattgcaaacaaaacaaaacaaaaaaaaccccataatcccacaaaccatagtaaatcacaatttggtattaagccttttagccttgttcccatgtatacgtgttttttcttacaaaaatgctatcatactacacaacttttattctatgctttttttctttgacttataactagattatgagagatacatctttgttttatgagtaggaacttgtgtttctctttgcaatcctttaaaaaattcagatcatgttagtcctctgcttagagccctccaatagctttttgtcttaaagtaaactctgaaggccttgctgtggcctgccaggctaaccctcttccgaacaaccatcctcacttcgagccttgccagacagatctctttgctgtttcttaaaaacatcaagcttacacttgtaatcacagcactttgggaggccgaggcgggcggatcacgaggtcaggagttcgagaccagcccggccagcatggtgacaccccgtctctactaaaaaaaaaaaaaaaaaaaaaaaaaaaagccaggcctggtggtgcgtgcctgtaatcccagctactcaggaggctgaggcaggagaattgcttgaacccgggatgcggaggttgcattgagccaagatcacaccaccgcactccagcctgggagacagagcgagactctgtctcaaaaaagtcaagcatactccagcctcagtgcctttgcatttgctgttccctccgcctagaactctggtccctggatattaacatagttgactcccttacttcaggtctctgctcaaaagttaggttgtctggctttgcttgactgcattatcaaatacaccccatttccctgttgttcttatcctgccttgcttaccaccacttggtaatacatatttatttgttggtgtattgtctctctccctcattaaccctgaagtgtgagacttttttttcaccgatatatcctcagggctcagaaactgcacctggcccattgtgggtacttaatatttgttgaatgaatgaaggaaagaatgaatgctcattatccatctattcatatgaccttgctggtagccttctaggcttctaggtagctgtgtcatgagttaaaatgacaatctcttaaaggtcaggatatttctttctcatctatatctgagaagaattttacaaagtgaggctgtggtcttaaaaagaattacggtcttgatttaacttgaacaattgagggaaggaacatttttggcaaatgttgttggctttccttcttatgcgttatccctgtgtcacactggatatttttgaaaagtataaagtttcccagttatgtttacagctgtgatttcaatttggtagttgatagtgatagtgtaagcctcaagagcatagtggggtttttgtgtcaacagatacccagagatataattatagctttaatgtgttttcatttggggaatagctgttacatatttacttatttttctggcaattctgtccttttcctctccctgcttatcagtttttggatggcctagcaggtatacttaatttttttttaacattttaaaataaatccttgaccttttgcaattttacatctctcctgtgactcttgaactgtttgaaagtaccagtttcatctttcaggatgaaacatctgtagtaaaatgtataattgcattttaatttatgaggatgggaaaattgtatcttggggtagaatttttacagagaagtcgtaatgtgagcgtaagcttttcaaaggtttgaatttcaggtagactacttttcattttagtgactttttggaaaaaaacagttgcttcttatttttaagaaaaaggatctccttgaacacaatccaaacagagaccttcaaaaacttgtttttcttatcctccaaatatacaagaagttggtagtggtggtggtaaggggggaatcctaaatgaaaattattttcttaaaggcctaaaaggaggctgggcgtggtggctcatgcctgtaatcccagcactttgggaggccaaggcgggcagatcacgaggtcaggagatcgagaccatcctggctaacacggtgaaaccccgtctctactaaaaatacaaaaattagccaggtgtgttggcgggcgcctgtagttccagctacttgggaggctgaggcaggagaatggcgtgaacccaggaggcggagcctgcagtgagctgagatctcgccactgcactccagcctgggcgacagagtgagactccatctcaaaaaaaaaaaaaaaaaaaaaaggcctaaaagtatgtgttaagaatttatttttacttgttccacaggtattgattgagcatgtatttgagccagttctatgtttgtgtgggctgtgttaccatgttcagttttaaattatcaacgtgatttttgattatttcttttcttttctggctctgctacctcccttctctcatcatattctctctctaaatgatctcatcaattcccaggaccctagaaccccctggatgcagatgactctttctgttacgtctccccaccctttctctggttccagacttgcagttttagctaccaccttcctgtcccagtgatctcaaatttcacaggttcagaactgatctctcaatctccctctcaagcttcgaaatttgtattcctcattcctgacccttccttactctccccttcagccttccgtctcactgttagttagtactgtctattcattgttcaggctggacacctgaaagttgtctgtgattcttctcatttcctcactccacatgcaacccatctgtatggctttttggcctagcctctagaatatctcaaaccctcccttttttccatcttcctaattcacctacccacctctctcagatggatgattccctgtctcctggttggtctcccagcttccactgttgctttcttctagcacattttcctcacagcagccagagtgatcctactaaagagtaaacccaagcatgccacccccctgcttggtggcttccactgcacttggactcgcatccacacttactctgacgtgctccctctccaggctcccctccttgtttgccatgcttgtcagattgaacaccttcagttcctcaaacatgccgtattctcctcttctgtacaggctcttcaagacctccacttgtctcatagaaagatccttaaacgtccagtctcagctaaaacatctcctcctcagaggggccttccctgatcaccacttctatagtagcttcctccccattgtcctctatctcagcacatgtgcatttattgcttgcacttcactaaaattcatagtgtgtccggagttcattccttctggtaggtctgtggtcttgctgacttcaagaaaggagctgcggacctttgtggtgagtgttacagctcttaaagatggcatggacctaaagagtgagtagcagcaagatttattgtgaagagcgaaaaaacaaagcttccacaacctggaagggaacacgagtgggttgctgctactggctggggtggctagcttttattcccttatttgtccctgtccatgtcctgctgattggtccattttacagggtgctgattggtccattttacaaacctctagctagctacagagtgctgattggtgcgttttacaaacctctagctagctacagggtgccgattggtgcgttttacaatcctggctacagagtgctgattggtgcatattacaatcctcctgtaagacaaagaagttctccaagtccccactcgacccaggaagtccagctggctttaccccctcaatagcacttcatttatatgtttccttcttttgttttcttctttattgtctactcccccaatagagactacaagatctaggagggcagggacagccttgtcctgtatatggtacagtcctagcacccagtgctctgcccagagtccagtaggtgtagggcctcagaacattttgaatagttattttaatagctacttttttcgagaattcgtatgtaccaggtccattgctatgtgtgttcacacattatctctaaatcttcgggagaacccagtatggtgatgatggtaattatattaccacttctgtttttttagttgagaaaattgaacttagagaatttaagtaatgtttaaagttacatagctaagaatatggtggaattaggattttaatctatgtgatgtgactttagaaccttcccccttattcattactgccttctgatatgaatgcaggaatgaatgaatatgaaatatgctgcaatattaatccctgatggtttctcttgtttttctaagcatgtatgagagcattaaaaataagaacacttgggttaggatgttatattctcctgggaagcttctgttaataaccactatgccaaagcatatagatagtttgctttcaggctctgtgttctaattttacctttgccactttctagctgtaagccttgaggaaaattacatgtctaagtctgttttttcagctgtaaatggagaaaaataatagttcttatctcataggatcttttgaggagcagaattatacacaaaaaactatcaatgttagctattactattataaggagaaaaaaaaatcctcaagaaaagacttgtaaactcatcaacaatttagagtttggataagagtgaatgacagacaataactaacttagtgttctttcactgaccgtagttttgaatttataaaaattatcagagaattggccgggcacggtggctcacgcctgtaatcccagcactttgggaggcctaggcgggcggatcacgaggttaagaaataaagaccatcctggccaacatggtgaaaccctgtctctactaaaaatacaaaaaattagcttggtgtggtggcacgtgcctgtagtcccagctactcaggaggctgaggcaggagaattgcttgaacctgggagggggaggttgcagtgagccgagatcacgccactgcactccagcctggtgacagagcaagactctgtctcaaaaaaaaaaaaaaaaaaaaaaaatcagaattaactatctgggttgggatttataattattctattgatgtatgacaacgtatgtttggatttgtgcttgttaaatgcttgtgaagtaagatagctttctttaaaaaaaaaaaaacctcttccccatctttagaagtattctcagggtagagagatctttcaagaagctggctatactattttattttatttttttgcactagaaagatattcaccagcatactgtttacgtcagtaatgcttaccaccagggagtttatttcaaataaccaagtgaacagtagactcagtttaagcataatgggcttgacagctcgcatgttggaatatctgggcacagttatattttctggtgggatgccttatgagcaagtgccaagtctggtggtggttatcatctctgtgaaatagaggtgaggtctgctaagaataaatgggaagaggtcagaggaaaacaaggtttgacataccattgaggtcaagaagagtgggtaatgaacctgagacaatgtccatgatctccaggcagtatgcagggctccactgagataggaccatggattaactggggcactggtagcattcagctgcctggttttaggagcaaagaaggcatatagttggattgagccagggttggggtttgctggggtgagtggcagaaagacagtggagcagaggaactgggatattggccagggggtgactaacgtgatagctaaaggtatctaggctagatggggaggagaaaaggaccagtgttgttgaagtcaaggaatgggtgtgtggagtgatggagtaataggatgtggctagagagggacgcatgagtggaagatttcagagttggagcaattaattactgggcatgacagattcctgtgttttgctacagatataagtgactgaaatgaagtgaactcagtgaagaaggctgaattcaaggaggtcaagtaactgagaggctggagagttgtttcagccatctgtgtggtcagagaagccatcagaaggattgtaggatatttaggatggagaaaaggaaagtgggccgaatcttcagcaaatggggtggggttggagatcccagcaatgagatgttgtggttaccctgcaggaatctgaaaggatcaggggattttacccgagggagatggaaaagtagtgacctggaaggtttattggttgccaggtctctcaggaaggagtcggccatggcccaggttcattatacttctgaaggaatcccaattcaagagggcagcactagaggcatgtagtattgtgtttctaaacgtgttcatgaaaatcatatgaggatgtatgttaaaaaaacagattccaggctctatcccgggcccactgaactacagtctttagtaggaggagactgagaatgtgtatttttaacaccctccccacttggtaattctttataattaggcaagtttgggaaatgcagctgtagtgattaagaacatggcatctggaagcctattgcctgggtctgaagaaggtgggactggtgggagggaaccttagcccatgacacttaagagtttggctttcctgatacatctgatatcagaaacagtgaactaagaatgctctatcagaggcaaacacactgacaacagcaggaagggacagctagtaatgacagaaacagaaatgctctataaaataattcaaagtatagctgtttggagacatttattatagagaaaaacataacctgtttgcctcggtggtctctgaatacatcaactgattataattgttatcatgttcaacaggaataggtcgaattagggtttagtttgttcagaaaggctgagaaggaagttgtgcaatttagaaagctttccgtcataaaccagcatgcttagtgctttaggtatttgtaaaattatgtgcacaattctgtctctgaagatactggatttaaaaacaaagttttactcaacaagccaaagttaagaacagttgttatccccaaggggttgtctatatgattagatatttaatattatgatactggtagccttactgccccattctccctattttccctgggaaaattctttccatgacaaggagaggaatcctgcaaaagaatagctgctcacgagggaacttggagttagtcattcttggctgaccacttacactccccctgttgctattaaagaggttctgaatttgagttgcattgtttagattacttaacactataccacctggtttatcatacccaaacactaaagctttgggaaaagaatgttgtcagcactgttgaagtggttgctatggaccttgagcctaaaacttgatttgctcaatcatgtgttccatttcttatttcctcttggactgagaaggctggctttcaaactggtgaatagcagcacctcagttgcattccagtcacctaccacatccttccagtcactgtctcctctcctcagtgaactacagggagctagtcaaatgtacatcatgaggcctagaaaatgtggccgtggaggattagcaatgccatttcaaccagaactttcattttgcaagttgagatttgtaaaaagtgattccattttagagaaaaaaaggaattcagagtgttgttcccttttagaaaaacattttcttctaaagctgaggaatactcaaccgatcagtgtgatggtgataatatgttctttaatgtcacacttttcctcccgtcagagctcaggaacccttgcaggctctgctgtattacggtgctctttataatgtttaagtcactaaaggtattcatcttgtgaagtgtttgtattcctgctgtgaactaggtaccttagttgaaaagagggtccatgtcctcaaggaactttttaaaaagtcgaggtgcatttagatctctaacctcaagcagaccatgctatgtgctgtgaaggagatataatcaaaatgttataggatcacagatgaaagagaggttatttctagtggtggatggaggtggcaagaggagattggaggttgctttaagggaatgtttgtattcagactggatcttgaagtttgagtaaaattttggaactagtaaattacatttgatattttatgtttactaaggcatcatttattttagcaagactacaacatggtgcttaatgaattagccttcagttatctgaaatgactcaattgctttggataccttgtttctgtaattaatgtgtgatgcattaaggaatatttggtggagaagggcttttatggaagcatagctgaaaatgatcttgggatcatagtagagatctgaaagaatgggatatatagtggtatggtagtgaatagaaaaccagaatgataatgggatgtatatgtttgaatatatggtttaaaatggagggaaaatagagctctaaatgatgttaatgaggccttcataggaaatgaatagtctgccaggttaacaggacttttgaatactcaccatctcatttctgggtatctttctctggggtggttgtcaatgtggtcggtagatccctgtggggttggccacagtaaaccaaaggaggtcagctgctcctcattctgccttgctctaggtggctaagcacagatggttttacagaaagcctgtgaagccatgtccagagtggctctttctgccctagacctttgcacacttggttcctgggcttggcctacctcaaagctatgtcttcctgccatggagtggattctctctcactggtgtgtgtactctctggatgagttcacactcctttggcaagcccatttcttgccatggtaggttagctatagctggaccattgtgctagccttgtaggtggtcatcgttatgcctgaaatcttgcattcaatttttcctttcccatgttaaggctcttccacttgacccctccattcaactcttaattttccaggaagctgaaaaacatactacttgctaccttttgtgctgaaatggggccctggcccagaattttgatccccttgggaatcaacatatatagttcacagaagatagcatttcctttttgtttattcctgataatgacaataccatttaaaaagccaagatatttggcaatgctataggccccattttaccatacaggtaactaaagccacttaagaaaatgatttcagtaattcaccaaataacatacttattatgtgactactatgtgtcagatactatgctggacaccaatggagagcaaatcagacatggtcttctgtggtactcacagtctagtggacctatggccagaaagccatgagagctttatagaatgactgtaggctttggggaagaaaggcctggtgtctagtcccacttttgccttttatcaattacatgaccttaagcatttgaccctattttctgtcaagtaaaataaaaaggatttgccctggcttataagatttttctaagactggatgagaccacgtagaaaagagctttgcaaaggtcaagttactatatatgcaaatatagttgggagtaatcagccgtgtcttctttaacaagaatgactaatggagtattttcacttctctgtggcttcagagaatgcgtcgcatccccaaatacaatgcttgaactgaatattaacatttcactaattctaatgtatattaataaataaggaaaccagctacttaggtggtacctagggctatatagttatctttaaagtcgtagatttaatacatattggctttatttcagaaaacagtgcttctggatatttactatataaccagaaattttttattacaacaatggatatataattctaataatacaatacataccacaatatagtacaaaaatcagaacaatagttataataaaaagtattctttgtaaatagtagaagattactttttgcaggtttatgttgataaggagttttgagctgagctgttactttttggtcgttggttggggtttatttatttatttatttatttatattttttttgagacagagtctcgctctgtcacccagactggagtgcagtggcgcgatctcggctcactgcaagctccgcctcccgggttcacactattctcctgcctcagcctcctgagtagctgggactacaggcgcccgccaccacgcctggctaattttttgtatttttagtagagacggggtttcaccatgttagccaggatggtcttgatctcctggcctcgtgatccgcccgtcccggcctcccaaagtgctgagattacaggcgtgagccaccgtacccagctggttggtttttgagacagggccttgctctgttgcccagactggagtgcagtggtgtgatcctagcttactgcagcttctacctcctgggatcaagtagcctccctcctcagcctcccgagtagctgggaccacaggtgtgcaccaacatgcctggctaatttttgtattttttgtagaggcagggtttcacctgggatcaagcaatccacccgcattggcttcccaaagtgctgggattacaggcatgaaccaccgctcccagccaactttctgttgttttaatgttccctcttaccttgcgtatcactgaacaactaagacatttcgttgtaggtattttttgtagcaacctagacaagacccttaatctttgaacctcaattttactcataaaatgtgaccttttctttgccatgccaacttaacagggttgttgagacattcaaatatagtattgaatggatatgcttctatctgtgtaatggtccttgttcagtcatgggtgtagtgatgcggtaattctggcaaatgaatgccccagaagggctatgtcttgatttgtaacatagtccttggtcaagtcttgattcttccccatgatgattcatcctattgtcccattctcatttaataacatctcactttatacccacttggccattagccaacactttctgagcttctgctgtgtgtcaagtctgtgtaagatgctggggatatagaggagagtacctgtctcctgggtacttgttcgagtaggggagttcaaaactgcaacagcaattcttgcctccatttctagcctgctggtctgcccaaaatttaagacttgtcagccctacaattgcgtgagccagttcttaaaataaatcttagtgtgtgagtatgactgtgtattcatacagatatccattcacacacacatatatatagttgtttcatattggttctatttctctgtagagcccttactgagacaataataaatgctctccttatggatgcagtaagaagaggaataagcatggtaaacaagatgcttgctgtggttttagccatgttgagtttgagctggaattccacccatggaatccaggtggaaatactggcaggcacgtgtagccagattgtggagagctcacatgagtggtctggactgtggagatatagctacacttccacagctacacactgtggaagtctccagtgtgtagctgtcagttgaagttatatctgtggatgatttcaaacagaaagtatagtatgtagagtaagaggaagtataaagatggaaccccaggaaataccaacatttagtgaggaggcagaggggaggagactatactggaaaccaagtaggagtagacagacagggggaagatcaagagagaatggggccatggaaactaaggcaggggataatttcaagaaggtgggagtacagcagtgttaagtgccatgaaaaggtaaagtaagagaaatgttggaagttgtccattggatttagctcttaagaggtatcactggaggtgaatgtttcagcatcccaccaccacattaccttgggtgggggtggagtagagaatccatggtaatgaagtagagatgcattttcactgctgatgcttaaaagagctcagctaggaagtgtgaggataagagggggctatgggcttcccaaggaaggggtgattttaggatgagaggggctctagcatgttcagaggccgaggaaaggaggagccaggagaaaggaaaaaaatcagagattcaggaagagaaaggataagtgcttgaacagggtctcttctgtggatggaggggcatgcacaggagatggccagtagcattgccagaggaggagtgcctgtttcatttgactgtgtggaaagaggaaaggctatttggggatacagagaagtctatagaaggcaaggggctggaatttttgcccttgtaaaagcttctatttttttgtgtaaagtggagcattggtatccactgatagccaagggtagatgatgcagtaaggtctttgaaggcaggtaaaatataaaattactgtgtggagcttggaagtgggagttgatttttgcttctcattgtgttttgaataaaagttatactccacagtctgatatttacgaagacctccacaatctgccttttatcagttctactagactacctatcctttttgtttcattctagcacccttgtaccttagttcagtgtgtctgatgtggcactagaatgtggctttgagagattagatgctgcagggaagatgctgttagactaagagtcaggggtcctgtgtccagtttggcttcgccacttatcagctatgggatcttggacataccttaacttcactaagtccatttttttcatttgtgaattgttaataacaatagtattgatgaaagtgtgtcaaatgagaaaacatattttaaagtacttgaagaggataagtaatacagaaatggagatggtcgtcaggctatgcctaatcctagctccaggctttcttcattaccactagagtcctctcccttctctccagctgccattttaattcagcctgtattgtgtagagaaacactagctactgtaatagataaaccctgcagaaacttcagtggcttaaaacagtagacatttctgtgctcatttaaaatccagtcacctgtggggatggagggggcccagactaatgatgctctgccatcttcaaaccatggtttccaggttgccctgggtgtcagtggcctgccagcagtgttggagaagagagtgagagggcatgattgggaggcttttgtataccaggcctaggataggagctagtgaccaaggctaaaagagagatggttgagaataggcatctgtctactggataggtggtgaattgggtgtgtgtgggtgtttatttgcagaaaatggttgaggtggctctgagaagagtgaggtgcaggacctgcgcaaccccaggagggaatggagaagctcctgcctctatgggcagagttcgggaagggccaaggggcctaggacttgttcctggtaaagaaggcaagtgatgcaaaggtgggagagaggtccctgggtcagggaagagggagctgagaactggggtgttagtacacctttgtggtgagcttcttaaaggctagggagacactgtttatcttttttaggataagaaaattgatgcagtggtgccttgataaagggcacacaactaattggcagcagagaaatgagctagggcctgggtcttttgacatcaaagcccctactagtgagacccaggaaacatcccactgggagggctggaaaacctgggctctgaagaagttgatttgaggtaaaccgttgggcacggggttggaagagcacttgcggtggcctgttcctttttttttttttttttttttttttttttgagatggagtctcgctccgtcgcccaggctggagtgcagtggcgcagtctcggctcactgcaagctccgcctcccgggttcacgccattctcctgcctcagcctcccaagtagctgggactacaggcgcccgccactacgcccggctaattttttgtatttttagtagagacggggtttcaccgttttagccgggatggtctcgatctcctgacctcgtgatccgcccgcctcggcctcccaaagtgctgggattacaggcgtgagccaccgcgcccggcctggcctgttcctttataggtaactcaccctttgcctgcatctgctggatgggaggtgattttggggtgtgtgggtgtttatttgcacaaaatggtggagggagctctgagaagggtgaggcaggacctgtgcaaacacaggagggaatgaagaggctcctgcctcgatggacagagcttgggaagggcttgggggcctaggactagttcctggtaaaggaggaagggcaaaaatcctaaggcaggactgttcttaatgaattcaaggactgaaaggagaccaggttggtacaagactaagaggaggagaggtgtatgagaagatactggagcgcaaagcaggtcccatatcactcaagaacttacagggcatagcaaggcattaagattctattctaaggtcagtgagaagccattgtatattttgagtatggggtggtatgatggcctgatttatagtttaaaaagaccacccagactgttgtatggagaatgggtagtggggaggccagaatataaattgagtgtagtcggtgggggaaaaggaggaattcaagaggagatgaaagtctggagcttaaagaagaggttcaggctggaaaatacaatttgatccagtatttcctgttagctcactccctgttcttagccaggcttcctgcgagtagccttatccatggtctctacttcctcacctcctgcaatttaaccctctgtactctggcctctgtcactgccacttacttccctgaaatgtctcaggcaaagggcaccttaggccctttgtggttacctaagtctaggccttttagcccttgtctgacttggtttgcgttccttcacactgtgagcgacttctgccttgaaaggccctcctccttagcccttctgtctttctggcccgtctgtctttctgacccatcattctgtggcccctttctggtccccaagtccttaggccagccctgaaatgttagcattccccagtcttctgggtttccagttggtcctcctggcttcccctgtgcccctctgcatagaataaaccctatcctgcccattaggccaacactacttgcctttccagcttcgtctcaggtgcccctcctccaaaagccttctctgacccctcgggctgggtaggtgccacttctccttttccatttctcctggagcataaagtagattacctctgtgatagcacttagcaccctgttgacttgtctccccagtctagtagtgcttgagggatagagttacaatgaaatactgcgtgatctaggacaaagattgctttctccagttcaggtgaaagccacactttataatgaaggtatctatacttgattgtatatcctttaatagtgcattcatttctcactgggtctgaaggctggaattctggtataatatattctatgaacagattaatttaactagaaataatcagtgtctcaattttctgaaaggaaaaaaaaatgactaagaatctgaattgcttcaaaagggcttctgaagccttgaatttcttgcctggtaatttggatctccactcctaccctcccatcccaaagcctgttacatgtgtctcatattttgtgattccacagttctgggtttgacattacaattgcctccatggtgatgagcactaacattcttgtgtgctgaattgtgatagccgtcaaaggcagcaaatagactgaatgaaagatgagcttctgcctttatatccttctctcctgctacccaactcattgtggtgaaggaaaaagaaaacgcgggtggagactgcactatatgcttaggtatacaaatcatacatctggagtttcaggaaggttttgggtggttaatgtcactaaactctcatgcttggcttttttttttttttttttttttgagaccgagtctccttcttctccttctgtcgcccaggctggaatgcagtggtgtaatatttggcttactgcaacctctgccttccaggttcaagcgattctcctgcctcagcctcctgagtaactgggaatacaggtgcctgccaccatgcctggctaatttttgtatttttagtagagatagggtttcgccgtgttggcaaagctggtctcgaactcatgacctcaagtgatccacctgcctcagcctcccaaagtgctgagattacaggcatgagccaccgcacctagcctcatgcttgtctttcatatgtctttttctactcttgaattttttctttttgtctttctcagctccaaattcactctatcatttttggcaggtggaacaaagaaaatataatgttgaatcactttcttctcagtggctgtgatttttagaatatttcttgatttttttcaatgtttagttttctgagcctagcagagcaaaaaagcaatgatgcctttgattaaatgaaacccttagcataattactcaaaatcatgtgacagattatccttgtgccttttttgatatagtgttgggctgattaatttatctttaagaaaaaacattatagagttgttatttacctttaactagaatgcctctcaaatggaataagactgcccaagtaaatgtaatagcagactaaatttgagctgttatattattctctgaaggttttgttgttagcagggtgagaaatgctggcacataggagctgcactctattgattcccaattatgtttatttctggtgtccaaataagacattaggattgcagactttcaggtaggaagtgaccacagggttttccagtatgcccactggtgagatgccaactcatcatcttacgtaggggacacctcttggttagcacaagaacagtcttcctcataggaagccacaatatttgtcctgggactcttgacccactggacttccttagtctttcccatcatatataacatatgcaacccttcaagtacctgaagaagctttcttcactttcatctcccaagtccctctcttcagattctggatccctggtttcttcagatgtaaacttcctccttagtctgcatattgtgatcctaatgaattatcctgaggttttgttagcattttaatggttcagtcccttactaaacttactcctggctgacacccactctcatggaactcccctctgaatgtaggttctaaaacatctattcaatgaagtatttctagctcagtgatcttactagcatagttttactgctatgttttgttacatttgttaatattgtaatatacttcctctaaaagtaaacaaaggcttttaagccctagggtgcaggtaagatgccagtaaggctgtagaatttgatttccagctagaggagacttaaccaacttcagtttggtctgattataaaagcaagcatttattgagccctcatagcatgtcactcactgtgctaaggactgctacatgtatcattaaccctgtgttaatagtagtgtcattaatagtggatagtgttattgacctcattttaatgatgaagaaatggaggtttggaaaggctggggcatgctccatgtttcacatgtcacagtgtgacccagagcaacgagctcctaatgtgccactatgctgctgctttaatgccttcctgctgggtaatgctctgtgtacagttcctttctcttgtactttgtatttacttctctggtcttcttaaaatataaataaaaaaaaaaagaattggatgactctttttaactcaccagggcatctggaagagccctctgcacatggcgggtgctgacagctaaggctgtccttagctctatatctttagactcaatagaaatagatgaaacttctgtgagttcttcagtcttaggatgactagggccactctagaccttgtaagtgcatcttaaaccagtaaaagtctgacacattatggtgggctaggactcaactgaggggtgtttcctttaactcgcctttggacacctggacagcacagaccaaatgggagaaaatatggccgttgtcattaaagttggactggcagtcagttgcctttattcagtcctggctctgccttacatacttacttaccctgggtaactaggtccccatttcctcacttgctctgggaattggaaaggagagaaaggtgtgtgtaggggggttacttcatattctttcccactccatccgaggctaacacaaccctttggttttggagagtccattcttgtgctctattttctaactccacatgaaaccatggcacaataggaaagatgggatgtttgcgaggctgctatgtttccccttcccccagtctctgagagattggtaatttggacacctttattagtttgagataaaactgggactcactgactgaggctggactgaagatttaaaacatgggggtgcctagaacttcttgtcaattcacagggtcccaagggtttagaagctgatgttattcctctggggtctgaggagaatggctcagctgtgggaccaactcaggcctattgggggaacacaggctagccttgggagttttgaatcatcaatacttgggagtattttagaattatcagatcctgcctgcatgtgcatctcaatctgaaaccccagaactgccattctccttgtgttgattcaagatataaatgattctggaattctatagacagaactttatctgtcagagtcccaacaggaaaagttggcattctcaacttaggataattccaagagagtttacttcaagaggtatgggcaggatgtagagaaaaccataagggatagtgcaggaaccagggtttatagtgatggtggagctgttactacccctagctccaaagagacaaatggatgaaaatggatgaaagtagttatcaggagccagaagagattgtcattatcaagtgtcaagaggctaccttgagaggagcagtgaattttggttgagggatgcatacgccacaagtagaatgaattctcaactttattccctccctcgcttctcccttcctcccccgatctctttctgggacttagcattggctaaacccaatcagaggtcaaggtcatagggacctgttgatgtgattcataatgattagcctgccaagacagagagcagggtagagaaagttggagtgggcatctgggaaatagtagacttaaggacccctgtagttttagaatgggcagagctcatgtgcacgtgtgtggcagaaggtggggaaaaaaggatgagatgagcatttcttgagcatcaccatgtgctagggactttcttgtgacatcaccttttggggcaagtagtattatttccatgttatagatgtggaaaacttgagctcagatctcttggccctaagtcaactcagtcctggtgatccccgtggtgacaggtagtatttggatatttctcttatcttactttctctgtggcccattccagaaagccgcatttcatacatagtattgctgggagaacagtgaggactgtaacagagctgccatgtatttttttttttttttttttttttttttttttttttttactttatgaacttgaggagaagggaaaagaagaggaaaaaaactcaacttggcatgagtgatgttaagtgagatcaaataaggtgaaaagcaaaatagactccagaaatttagttttgcttttacccaaagttcatgggcagttgctgaacaaagtcctttttgctttccacaaatgttaggcacttttaataacatgaatctcattatctttactttttggttgtttatgaacttaaatagcattataaaggacaaccaactgaacgagaagatcaaactgtgtgtgtcaccttttactatttcatttcttgcgaatgtacaaattcttacacttgtaatgagttagttattttggctcctgataatttttttttttttttgagacggagtctcgttgtgtcgcccaggctggagtgcagtggcgcaatctcggctcactgcaagctccgcctcccgggttcaggccattctcctgcctcagcctcctgagtagctgggactacaggtgcccgctaccacgcctggctaacttttttgtatttttagtagagatggggtttcaccatgttagccaggatggtctcgatctcccgcctcgacctccccaaagtgctgggattacaggcgtgagccaccgcgcctggctggctcctgataaatttattataaaagtattgtacagccaacagtgaaatagaaagtttaaattttttaaaaagggaattctaatactctagaaaattcttggattttcttttttcctactttttgatcacatgcatgcataattttatatggctagaattatacaagtttgtattgttcccatgtcattgtaagcatttttccatgttgctatgtaacctgcataattatatatgatagtttctcagtttaccttaaatattgtcttattatatatttttaattttttatgccttgctgcattctatgaaaaggattgcattctactgaagtgttttatgtattatttttctttataaatattgtttatttgcatctcaggcaactagtttccccacccctccctcttttgttcttctggaagaagaaatggaattatttctttaggataattttgggagtggaatgagcaactctgaagctacatcaaggaactggaaatatagtagtttgagggatagctgagagaagagtacaattgaaataagtcattaatacagagtttttacttaaaatattaatgtgggctgggcgcaggggctcatgcctatgtataatcccagcgctttgggaggccgaggcgcatggatcacttgaggtcaggagttcaagaccagtctggccaacatgttgaaaacctatctctaccaaaaaatataaaaattagccaggtgtgatggcacatgcgtatggtctggctgaggtgggaggatcgcctgaacccaggaggcagagattacagtgagcagagattgtgtcactgcactccagcctaggcaacagagcaagactccatctcaaaaaatcaatcaataaataatgtggatttttattaaatcttaggttttaaaaactattgctaaggctgggcacagtggctcatgcctgtaatcccagcactttgggaggctgaggtggatggatcacttgaggtcaggagttcgagactagcctggccaacatgttgaaactccatctctactaaaaatacaaaaattacccaggtgtggtgggggggtgcctgtaatcccagctactcgggaggctgaggcaggagaatcacttgaactcaggaggcaggggttgcagttagccgagatcatatcgctgtacttcagcctgggagacagagtgggactccatctcaaaacagcaacaacaacaaactattactaaatgagaacttagacatcatttactcataagtttaaggtatgacatcatttacatacaaaatttagctgttaattctaaattgttaagttttaaaaattttgttgtcagctaaattgaatgtagcataattctaaacaaatcttggattaatgtcattgaccccaagcatcctctagccctggaatattagcattggcctgttagtcccctgagctactactccctgggaggtggtcatcctttcttaactcattctttccagccctggggagcctcggaacttttgtctattcacttctttacaaagctgtagccttctggccagaaggggcttccttgaatggtgcccatgtccttccacttgcctttgattgtctggagttgtgctttctggaaaaacaggcaggtttcttccattaggcaagaaacatcagaaaattagagatctgttctggttttcactctctgtatccttagctcctggcatggtgcctggcacatagcagatgctcaaaaacacatttgtagaatgaaatgtcttgagacaatctttcagatgtgtgaatatgaccatgatgtccccacattgtcacctcttcttcaggtttaagatccttcagttcagccattcttttcgatagaatttccagatccctttccctccttgtttctcaccaaactgtgtgaccacagttcactgtcagtcacttagaatgtgtgaccagacttatagctagttctctagaagtggtctgatttgtagcagtatactcaagtgtgccttacttttttttttctttagcaaatctctggttgtttatattcttttacgtgatcagctgtcaagcctggtctcttccaagaggtgcttttgcaattgtttccttctagtttagtgttacttgggatttgatgagggttcttcaatatccttatgtgactcatcagtaaaaatgaggaacaggaggggcccaaggaagagttttgtggaaacctccttccaaactgacaataatcctctaaatccatgcttttcaaactgtgatgtgcatacaaattacctgggaatttggttaaaatgcagattctgattcagaaagtctgggtgaggcagagcttctgcctttgtaacaagttttctctaagcttgtgctgatgttgtgggtctccctgatcatcttttgagtagcagggcacagttcttggggaaagttgttcatgaaagcaaatcctttggtatttgggtagctgtgctgtacccatcagagcccccagcagatactatctgatgccggtatttgacaccctataatcaaacgtgcgtctcccatctcactaggtagatgaagaaaacaacagcagggctgtcttgccagcttccaaatggtggcacacctctgtgtatgttcaattggaccttttattctagccagacaagctgttacccaacatacttagtatcttttcaagtttcttgtcatctggacatctgataaagtggttgtgtatactgtttttttgagttattaatctgagatactctcacataccagaaagttacagaaaagagacagtcaacagttttttaagcattggctagaaagtacagtgttactgataaaattcttttataagaaatgttatggagcatccaatttttttcttactctattggaatttggataaaatggatgcactgttgaaattacattcctaaactgaaaggtactcatgcaaagggcagcttttgaatcgtagatgagcaagtgagttctgtagaaacacagagtagagagttcgtgatcacctgaactcccttttctccaagtttttaatcttttagcttaggggagaggtgcttttctcttgccctttgtacatggcaaacagcactgtgacccatacttttttggtcatttcaaaaaaaaattactattaagcattggttagaaagtaaagaagtttagacaacaaagcatttgcacttgtttattttgtagagctcattgtgacctggtcagtgggacaggacagttctgtatactgttgattaatatgttcagataattctggttcctaaatattagagacagtgtcttcctaatgtgtcacaaaagttgaatcctgtaactagacattaaattcaaaagtcccaatcggaggataaagacaacagcaaaaaaccccaaagctttgacactgacaattcagctgctctattttcataaaaaataagcaataatgccaatattcaatccagattgaaaatgaaatgacttggatgtattaatagtaattgaattatagaactcttttttttttttttttttttttttaaagatgaggtcttgctgtgttccccaggctggtgttgaactctcctggctcaagcggttctccagcctcagcctcctaaatagctgggattacaggtgcacgccaccttgccaggcttgaatgatagaacttaaaaacaactagagtgccattaacttacccctaaataacaatagttctttaatatcatctaatactcagtctatatttaaatttccctgattgctcaaaaatgcattttttttagattcatgctttacttttaattgatggcccatacaaaaacttttgtaggttttgaatatatacatatataaacttatatctgtgtgtgtatacatatgcatacacaaacacgtgtgtcatacatgtatgtgtgtatacgtatacacacatatattccaaacccacaaaatatatagtatatatatattcttgtccatcaatcttttatttatgtaaccacagctttcatatggtacttatgctctgtgcttgctgaattattaacaaagaagagtgtagtcatttctatcataattactgcgtcttcgttagaagagatttaaaaagttgatgcagccaccctttccaatcctgtactaacatggtgttagcatcttcttagagatgctgccgtaatcctaattctgcaacatttgtgtcattttgaatttgcctttctctggcagcatttctcatctacttccacatatttttaagatttgttgtgacttctgttctctgatcttctctttctatatggattactgaccttgaatttatgcagcttctctttcggttgtggaaagaacactgcatgggggaaaaagtctgagttcacatctcagctccgtgtggggaaaaatgtctggattcaaatctcagctccatcacttactagctgtatgacctgaggcaatgtatttaacttccccaattactttgtaattgagcaacatatttacttccctttcagtgggcttcatcaaacaataccacatattgcttaaaatatcctaaagctccccaaagttgtaggcagggaggaagcaaattattgggtcactgtttattgtcccaaactacaagttagcattgcctaaggagccaggttgggaggcccccagatgaagaaagtgggagaggagatggtaactaattaactgagtccctgtagccacttttccacatgatcatttagaccttgaagctgtcctggagattttatgatttaagaaactggctctgccatcgtagccaaatggttaagatcagtagcttgggttgaaatacctgccttcctactgcatactagtagctgtatgacctaaggcaggtcccttcacctctctgcatctgttttctcatcagacacagagataactcagattctgcttcatacaatgtttgtgaggattaaatgaaacaagtgaccagatgcagtaacatgtgcctattgtcccagctacttgggaggctggggtgggaggatcgctttagcccaggagttagggctgtagtacgctatgccagtcgggtgtccacactgagtttggcatcaatatggtgacctcctgggagcagggaacccccaggttgcctaaggaggagtgaacctgtctaggtcagaaacaaagaaggtcaaaactctcatgcagatcagtagtgggattgtgcctgtgaatagccactgtactccagcctgagcaacagagtgagaccctgtctctaagagaaataaaatctattctgttgtactggcaaaataaataaataaatagtaagaaatgtgtgaggtttcaagcatagtacctggcacataatcagcattcaataacacaaactgttactcatcttttacttctctttagagctagtctttttaaaggaagactgtggagttctagtgacttttaataaaattcatagtagtgactacagactaagcagattttctaacaaccataatggaactttgtcaaacatgaatgctttcctttcaaattggttatcttgaaagcctcttattttaatgttgccccaatgtttggcgttattattagtttttagtttctaggtttctttttgttgaaactacaactaggatagaagtgcatacttacataattcaaattagttatttccatgttttcagcaatcttttattgaccacctactatttgtcaggcttccgctaggcacttggaatatggccatgaaccaagtaagacaggatcatttctcggtggcatttgtaatctaggggccagagagctttcattggcaccttggattatgttaaaaaaaaaaaagtgacagtcttaaataacattgttaaagctgctgaaaggaaatggacaaattttcaaatgtttggtagacatagccaaacgttttattagtacaataagattgcatccttggcatgttacctaaaaggaagacagatgccttcgttatgaataaaatgagatgtactgagggagacactactctgtaaccagtgcaataatgtaactagcactttaaattcaaatttggagtaaaacaaggagcaccgttatttttctctgtttgactgtgactttggaaccactcattcatgaactagaaatgggaggcatagttacattaaacaacacacctgacaaagttatttaccaatgacctggtaattattgaaaatggttatatattcaagaatatttgtgctgagtgctgtggctcatgcctgtaatcccagcactttgggaggctgaggcagggggattgcttgagcccaggagttgagaccagcctgggcaacaaagtgagaccctgtctccctgtctctacaaaaaaataaaaaaaaattaactggacatgacatgaatgcctatagtcccagctatttgagaggctgaggtgggagtatcacttgggcccaagaggttgaggttgccgtggaagccatgattgcgccactgcattccggactgagtgacagtgagaccctgtctcaaaaaaagaaaaaactatttgttagattccattaattagcatgtctaaaactggctgattcttctaaaaagtttctaaatatatgtctattcaatgtaacatctaagtattaaataattgcaaaacacatacaattaaatgaatgaaattatagagtcctgaaattcaaagtcactttagagataatttaggatacccacccttatagtatgaaaatgcctgcagctattttccaacacctctagtgatggagaatgactaactatagaccaggggtcatagacatataatataaaggtaggaatttgttagttataagacaagagtggtagttacatatatggcaaacttttgggccctatttgtcataaaatttttttcaaaatatcattctggctagctaagatttgtcttctgcaggctggtttctgcctgtgcaccaccagtgtgttgcccttcaagtaaattttggcattgcctagggaaacatctcaagatcttttcattttctaaatttgtaataaacattatagaatataatttttaaccatgtattcatttagcagatatttattaagtgactactgtgtgcctgtaacttttctaggcaaaagggatggtagtattcagcaaaaagtcactaccaccatggagatttcaaattcatgaatgagtggctctaaagtcaaaggctgggaacggtggctcacacctgtaattccaccactttgggatgccaaggtgggtggattgcttgaggccatgagttcaagaccagcctgggcaacatggcaaaaccctatctgtgcaaaaaatacaaaaattagccaggtgtggtggcatgtgcctatagtcctggaaggctaaagtggggaggatcgcttgagcccagaaggtggaggttgcagtgagctgagattgtgctactacacttcagcctgggcagtagggtgagaccctgtctcaaaaataaataaataataaaatgaagtccttgctttactccaaatttgattttaaagggctggttatatcatcacagtgcatatagagtggtgtctttcttaatacatcccatgatattttatattttacacatgagagtatattatctattgctacataataaatgactcaaagtagcatcttaaaacaacaaatacctgttatgtaacagaaatgggttgagaatctgagcagggcttaatgggtacctctggctcacagtctctcatgagattgcagtcatgctgtaggttggagttgcagtctcatctaaaggattgattcaggacagggatggccccactaccaagcttactcacatggttgttgctaggcctcagtctctcaccataagtacccatctatagggatgcctcatgacttggtgtattggcttcccctcggggcatgatccaagagaaagtaagaaacagaacccaggatggaagtcatggtctttatatgacttaatcttggaagtgacatttcatcatatctgctgtatttgttagaaatgagtcagtaagtctggcctacactcaaggagatgaggtttcacaaaagcatgaataccaggacgcagagatcattaggggccatcttagagcctgcctaacacagaaggtaagacatattataaataaatataatgtgtcaaatggtaatacatgctgtaaagaaaaaatagagcagaataagggaatagagaatgatagaatgggagtctgactgctacttggggtggtgtagtcaggggaggcctctctaaacagtaatatttaagcagagttctgaggaagataaagggaacaggtgtggattcctgggataaatgattgattcctgttattcaaatcagaatgaatagtaagtcaaaggcctcaagtcagcagcatgtttgaggaatagcacagagttcacgtgtattagtctattcttatactgctataaagatactacctgagactgggtaatttattaacaaaagcagtttaattcacagttccacatgactgatgaggcctcaacttacagtcatggtggaaggggaagccaggcactatcttcacaaggtggcaggagagagagagagctcaggggaaactgccacttttaaataatcaggtatcgtgagagaactccctcactatcatgagaacagcatggagaaaccacccccatatccaatcacctcccaccaggtccctcctttgacatgtgggaattacaatttgagaggagatttgggtggggacacagagcaaaactctgtgattaccagagatgtggagtaatcaaggggagaagagaagagatgaggttatagagtaatgggagtggggaagatagatcatgcagggcttttagcccatggaaaggatttttgtttgtactctgaaatgggaagccattggagggttttgagcagagataagaaaagaatagagagaaggaaagagtagcaacattccaagagttctcatataagaattacaaggaatcttgactataataagtatgacttacagaagacttttcgacagcagcaatcaaggctgaaagacgatggaacaaagtgctttgaggaaaaaactgtcaactgagaataaactgccatgcaagagtgtgatatcaagttaaactatcagtagatctcaagttaactataattcaagagtgtgagtgaaatggcttttttcaaagactgaagtttatcattcactgaccattgctaaaaaaccccttaggaagtacaaaaaatgaatgcagaaggaaggattaggagtcaggcagcaatgatacaattcataaacttgacagtagccatctttctgaaagtatttttaatgttttcaataataagtggctaattttgggtaatgggaatgagtaagcgtgctttctatttgtctttataattttttgcatttttaattgaaaagagactttacaagtattcaagaaagtgcattctcaacagtgactactactctgatgctattataatgtttctcatccttgtcaatataagaactcttcgctgatagtttaaaatgataatagcatttattgatcatttactctgtactaggcatactatgctaaaccttttgtatgtatcatctcatttaatccttaatagttctgtgtgaaaggcactattgctatttctcttttacaaatgaagaaactgatgctatgaaagttgagtaactctgtgataacactagttattaagtagcacagccaagataacaccagctagtgaacagcacggctaaaacaagaacctgggaagttttgaccctataattcatgcttctaactgctacactgttttctcccttcttctacccagttttgattactttattttgataaatggtatcagtttattgatacagtaaattaaactggacttctcttgaaaataatttgacaatgatgccttgctgcatttactattacagaattttataaacaaaagagattttaatgaactagttcagctccctcattttataaacagggaaacagaggctcaaacaagttaactgacatgtcgaaggccacacaggtgatagcagcaacatttagaagatgggcttcctaacaccaacattagtattatttcctctggaatctgaatatttagccttaaaaaagttcagggttctattgaaatggcttcagtaagtaaatgatttgtccagagatgcttattctgtaagttggcattcatataccaatattgatgtaaatgccttccatggagaagagtggcagacagaacccttcacctcaagtaatttacagtttagtgaggatatagaggaataaaaagaaattatagtttagcatgttaggttccatgagagggataaaacagaatggcaagcagaaggatcatcgacccagtatttgcagtggggagatgcaagggtagttagagaaagcttcttagagaaagaagtgtttacgctgaaacctgaaggaccagtaagagtgtaccaagtcaagggatgggagaggaagtatatggaggaagaaaggtgtaccagatagtaaggggaaaaactatgaggcaagtgaatgcttgtatctaggaccctaaagtaatgaagcatagctagtgagagcatgctgtgtagggggtaggatggagcttaggagagaggggtggttagtttggtggaggatgaggctggagaggtgataaaggcttagatccagatcataacatccctagatttgatgctgagggtttgatgaagggctcccgaaaactttccaggatgagagcaatcaatcagatttttagtgagaaagattaaacctggaacagtaaggaaaatgattgcagagagcttcaaggctggggtcttgatgagaaaggctagtcctttgagaaaatatgtaactgtagggaccaacagacagattgaagatttaggaagtggagaactggccattgttggatactggtgaaaggtgaggggttgggcacttgggtatacactgagatgggcaacatagggagtgggtcaggcctaagggagatgatgattctggtttgggacatgttgaacctaggaggtagtgggccatccaagaggagatacctaatgggcagcttgctctgtggtgagagaaagctggctttggggatagttggcatgtaagatgggacttgaagcaattggagaatagaagatcagcaaggaaagtgagtggcctgagaagaggagagagtctaggatagcatgctgcttggcaccttgtaagtacccaaatgtttataaatgcatttatttggtaaacagctgtattccttcttaagtaattaggtaataggcgttccttatttggtaattgaaacattatgaagcaagtgcaattttctcattactctggggacgctaactcattctatcacaaaggtttgagaaaaagacatttttgtttaatagcctttccttttttcttttttaaaattacataaataatacacaatgcatatatattaatacttgtaccctccaaaagatacagaagtacagagagtaaaaaggttttctcttctctcctcatcttctctccactcaagaccttttgaaagtaattatccattactgttcctaagaggagctgggttctggacagtctaggttggagactggagagtgtgatcctcatgtttgtctttgactcacagtgaccatagataaaagtgattttttttttttttagatggagactcgttctgtcgcccaggctggagtgcagtggtgcgatctcggctcactgcaagctccgcctcccaggttcacatcattctactgcctcagcctcctgagtagctgggatacaggcgcatgccaccatgcctggctaattttttgtatttttagtagagacagggtttcactgtgttagccaggatggtctcgatctcctgacctcgtgatctgcccgcctcagccttctaaagtgctgggattacaggcgtgagctaccacacctggcccgataaaagtgatgttaatgttcagtgactgtctccccaggagatgcatttgcttttgcccttagtggtgtgtgaccttgtttttataggaagtcattcaactgcatagttagtggagagctgaaaccctgcattatggactttgggaagctctaccacagctggacagatgtggaggagagggctctcatttccagggtatagaaaatcactggcatgtgaatgcacacacacatgcaccctgatggcgatgtctaaagagttttgaggccgggcatggtggctcacacctgtaatactagtactttggaaggccaaggcgagtgtatcacctgagctcaggagttcaagaccagcctgggcaacataacaaaaaccctgtttctactaaaaatacaaaattagctgggcatggtggggtatgcctgtaatgtcagctacttgggaggctgaggcataagaatggcttgaacccaggagacggaggttgcagtgagccaagatcatgccactgcactccagcctgggcgacagagcaagaccctgtctccaaaaaatgaataaataaataaaacaataaagagttgtgaaagcctttggttatgcagtgaatttttagtgttattacgtgtaccagtctctagctgatcaaaataattatctttaggaaatgttagaaacagacatgagatgtcatgtattttattagattccttgtttgcccagttcaatttcatgcaacgtacctgggttttagacttgatatttggccaccatttaaaggtggacttcattagaggcatcgaaagatgaatcgtgggctgggtgcggtggcttacgcctgtaatcccagcactttgggaggccgagatggatagatcacaaggtcaggagttcgagaacagcccgcccaacatggtgaaaccctgtctctactaaaattacaaaaaattagccaggtgtaatggggcatgcctgtaatcccaactactcaggaggctgaggcaggagagtcgcttgaaccctggaggcgaatgttgcagtgagccaagatagcgccgctgttctccagcctggtgacaaagctagacttcgcaaaaaaaaaaaaaaaaaaagatgaattgtgtctaatggacctctaagacattacttctccagtgttaaatacgcataaaaatatgtggttgaggaagattgttacttggtagagaagatgagaagttaagtgattgcctttggcatttgcagcataccacaggatctagaatttaaatgaaaaattagtctcgagctcaagcactgaaagggtacttaatatttttttgacagcttgctgatatatttattttctggtcttcttcatcttggggtaaatgacatcttcatggacttagttgttaaagtcaggaacctgggagtcatcctaacaactctgtccctcatgcccaatccacaagaaggactaccgattctacctgtaacacatagggaatccatcttccctgccagcaccctaatgtgggccactgtcatcatagcccaggacttctgcaatagccttctgccttctctctcagctgctactcactcccatccactctacatttcagccaaagtgatctttttggaaacataagtcaattatgttactcccctgcttaaaacttttaaatggcttcccattgcacttaggataaaatgtttaaacacccatcactgtttgcaaggtgatatgtgacatggctgtggactaattaacctcatgttgtgctcgcctccattcaccaccatccttccagttcctggaggaagtcatccttttatttgaacctaactttctctgtaagcatcaaaatttaattaccatctatggttcttccgcaagtaagaaagattttatgtctgctactctttcctactcccagctatttttcaaagtttttcattaattttctacattatatcttttttctttcaataattcttattagcaattgcacttcacctaatgtgtattttatcgataattgtggagtagagctttaaacctatttctttgttcagcactgcttcttgtatcccaagtcatcttttatttcttggattcaaatttaatttgctacagtacacctttgagtctcttcctacttacccccagagtacacagtggtgaacttcatggagcagttgtatatacccaaataactttattttgccttcatacttaagtaacagttttagggatatatgagagtctatgcttaaaattatttttccttttaaactttgtagaaattgcttcatttgtgttttagcatccgaaattgcagatgagaagtctggtgcaaatacaattttccttttgttacagttagcatgcttcctaactgtagcatgttcctagatttcaactttattttgtaatttaaaaatttcaccaagttacatttactttttttcaatattgttatacatcatgtaaacttggcagaccctttcaacctaatgctcagatctctttaactcagatctgtttggtcctattatttctttggtaatttcttttcctctgtcctctcctttaaaaaaaaaaagggttagacatattggatcatctagatttatcctcctttcccctctcatttcccatttcttggtttgggagaattcatcagtttgatcttctaaatcactacttttgtctttggttatgccccttttgctattcagacctctgttgaaggattaagaaatttttttggcctggtgcagtggctcacgcctataatcccagcgctttgggaggccgaggtggttggatcacttgaggtcaggagtttgagaccagcctggccaacatggtgaaaccccgtctctactaaaaaaaacaaaaaacaaaaaaacagaaaaacatagctttgtttttttattccccactaataactttttagtattgttcctctcccttagtatctccatagatctttgaaatggtatcttaatagatctttcagagaatactacaattattttctgcttcctttgctgtttttatttgttattacttaagggcacattaaattatctggagaatatttaaatacaaatgcctagatccctcttccctctataaatactgattcagttgcattgcggtggggcccaggcaattggtatttctaaaaagctcagcagatgattctgatgtgcatccaggattgagaactctttgtgtgatccgagtggtaactgtagtgggttctctcagcacaagtgggaattattcttccagaagtaaattcagagtacaggagtgctggtcctgctaagtaccagggatatacgtccagggattcagtcagctgccttctgggtgggtgtgtgcattgtcatttgtggtgctgtttcttcattctgtagtcccagcgcctgtgtgggtggttcccccacagctgatcctccactttattacagagagctgttctcacaccttagcctttctgagaacactggaggatgcagctgttccataggcctctaattattctcctgacagtcctgggctcacttctacttctacatccagcttcacttatctctgaatttgagtttgttcccccctagggttctatggttatattcacagttttagagtttccttcttttgcttggttcaaattgaaatttcctttacgtcttagtattgctgtcattcagtcagtcctgatggcatttcccctccctttggcccagaagtcctcatgctattctgatggtgtctttcctgtttatcctgtgctgctgtgaacttattactcttgtatttttataatatatattcttttaataagtagtcttttatattggtcattttaagagaggggagaagtacattctaagttaatcattatttatgatgaacaagaagtcctcaaatactttttggttacttctgaaaagtatcagacattcaaggaatttagctgtctatttacagaagaggaacttgaggtggtttaaccagatgaaaaactacttcattctgttagttaaaaaaaaaatgcatttaaagttgtaagatactgtttttcatgtatcaaattagtgaagtgtgtttttgtgtgtatgtgtggagcgggggttgtggtggggagtatataaggggtgaggattatatatgagaaagagaatttaatgctaacaaggatgtaaaagtatagacattcttatatacttcttgtggaatgcaaagttgtacaatactcagtgcagtttggcaatatgggcctttaaaactttcatactcgttgacccaggattcaaattctggcagtccatcccaaggaagtaatcatgggtgaagacaatagtttatttacaaagatgttataaaataaacagtctgggtgcagtggctcacgtctggaatcccagaactttgagaggccgaggtgggcaaatcacgaggtcaggagattgaggccatcctggctagcacggtgaaaccctgtctgtctctactagaaatacaaaaaaattagccgggcgtggtggcgggcacctgtagtcccagctactcaggaggctgaggcaggagaatggcatgaacccgggaggcagagcttgcagtgagcccagatcatgccactgcactccagcctgggtgacagagggagactccgtctcaaaacaaaaacaaaaaaaaactgtgcagagaaaagtaaaaattagcagcagtgattgtttctatgatttgaattatgtgaattttttcctctatagtcttatactcttctgtattttccatatatctacaataagtatattcaggaaaatattggcattattttctaaattgccaagctgttccacaaagaaatatgaatggccgctaatcacatgaaaagatttaacctcagtagtaataaaagatgcaaagaatgctcaataacatgagagatgtttatcagacctatatttaagtgagaaaaaataccaatatgtgcagtatgatcccagtatggttaaaattgtgcatgtgcatcagaatgttgacagtgcttatcttttggtagtggatagttttggcttacatgagctttcccccaactataatctttttttttttccttcaagacagggtctctctctgtcacccaggctggagttacagtggcacaatctctgctcactgcaacctctgcctccctagttcaagcagttctcctgccccagcttcccgagtagctgggactacaagtgttacccccaacacccagctaatttttgtatttttagtagagatgtagtttcaccatgttggccaggctagtctcgaattcctggcctcaagtgatctgcccacctcgacctcccaaagtgtacaatcccaggcgtgagccaccacacccagcctcccctagctataatcttctctacttctttgtattttacagtttgcttttattgaaagtgtattgctcttgtaatcaggggagttttttttccacacttaaattaatctttccatcccctacactatactttctgcatttaaaacatgcttaaaatatttgacatggagggggccgggcgtggtggctcacgcctgtaatctcagcactttgggaggccgaggcgggcagatcacgaggtcaggagatcgagaccatcctggctaacatggtgaaaccccgtctctactaaaaatacaaaaaattagccaggcatggtagcgggcgcctgtagtcccagctactcaggaggctgaggcaggagaatggcatgaacccgggaggcggagcttgcagtgagcggagatcacaccactgcactccaacctgggcgacagagcgagactctgtctcaaaaaaaaagaaaaaaaaaattaacatggagggtagggcaagagaaatttgagagaattctctgtgtaattcagtcttaagaattaattgaactcaatataaatttatatactactttgaagagatttatgtttgtttaaagaggtatatttgagtgtatcaaatactttaaaaatatacctttttctcaaaatattagccacgtagatgcaacatgatggaaaactgacttcgtgccattaaaaaatgttacaaaaatgtttgtgtcattttaaaaaagtatatagttgaataagtttgtttcttttgtaagagatagggtcttgctatgttgtccaggctgaccttgaactcctgggctctagcagtcgtcctgcttcagcctcccaagcaactgggactacaagtacaccccaccttgcctggtaaactttttgtcaaatgtttatactcatgtaaacaccactcccaatcagtatacagaacatttttgccactctagaaaagttccttcctcatgctgtcttgtctgtcttcaccattcaaaggtaatttctattgtgatttttaccaccagaaattttgtcttttctagaactccacattttattttatatctaacttatcttgctcaccatgcttttgagatttatccatgatgtgtgttagaaacatactcctttttcttgctgagtagtattctattgtgtgaatatcacaatttttaaaatctattcttatgctgacaggtatgtaggatgtgtccaggttttggctatttaaaaattgaggatagtttgtagctatgtcataaaccccagtgtgctttcttcctcctttttcctgtctagcagggcttgtgaagcaagcacttgccctgcagttaagggcatgtttccaggcgcttataactaagaccaccacaaagagaacagaaaacaaaactaaagtgagcccgccaagtcccaggcggacgcctcaagagttcagctcttgggcacagaacggcaggcctgcaaattaactgaaaactccctttacagaaagaaaaaaagagctaagcattgagagagctcggggaacccaattagagacccagagagctactaccacattggatcaaatcacagcagttgttttgagaccgagaggttattcaaaacgctgagccttgactatactgagagtgaggcagggcgcttcctctccccagcagccttgcagcaaatttcccaaagtgccttatctgggctcccttttacagaggcttcaggctaaggagtactaggatatactcttaaagtacttccctgactgcttttccaacatgagctacatttaaaaaaaagaaaaagaaaaacagacttttaagggtggggttgggggacatacttgataactggaaaacaaaaaaaatcccacagactcaagtggctatcatacattcaggtattgagcatactccctaagaacaggaattctcagctctgggtttgaggggcccaggatgcctctttctgtgacagacagggcacagcatctcctctcctatctcattccttgtagagttcattttcctctatgccaccaccaaccaaagagaatgtggcctttatcctgtttcttcggacactgcctctgtatccaacccatcctctgaatctttgtttgtttagtgtttttataaatttatttttattttttgtatttcttctgtcctctgaatcttcacacagagttcaggttaactgagtgcaactagagctgaagaaatggagagggagaagtacagtcattcagttagcgtgttgaagacacttttagaagatgggaaattgtgtgagccctaaagataggaccctcatcaggcagtggtaagaccaaagaataggaagtcctctccatctgccatgttagaagggctttccagttctggaagaatttgtggcaaaactcatgccatgagagtgagtctcctacggatgttatgctgaccagccttgctcactgtgctgattgcttggcatcagactcagccagcaggagtccaccctatgtctatcctaacccagttctcgtcatcactggactgttgtctatcttttgcgtcactgcatcaggtttttacctggttaccttctgggccccatttcttgcctgggcctatttttttttcccttgccctcttcaacttaaacttcctggtgaaaacaaaaaataaacattgactcagaaattcaaattttacgttagctaacatgctctgccaaagcactgaccctgagcacctgccagatgatatttttattgcttttagtttcattatagatcgcaaaatatatggaattggatttctttttcctgcgatttggtgctggtttatttcaacagatggtattttctgactgaaggtatttataaacagtttgattatttcttttctttttttttgagacggagtttcactcttgtcacccaggctggagtgcaatggcacaatctgagctcactgcaacctccgcctcctgggttcaagtgattctcctgcctcagcctcccaagtagctggaattaacaggtgcccgcctccacgcccagctaatttttgtatttttagtagagacagggtttcaccatgctagccaggctggtctcaaacttctgaccccagttgatccacctgccttggcctcccaaagtgctgggattacaggcattaagccaccgcacctggcccagtttgattcttaagatcctttctgatgttgctggatcaccttggactatgagtttcatgtagcttatacattgacaggaggtgcaaactgaaactttgaaaagttgacaccaaacatcactactgaggcaatcactgcccctcactcagactcataatctactggtttcaaatgaaccagtatttattttaggggaatatatactttccttgcaattgcgagtcttagaaaactccacagtgatttttcctgggttattgtgttatcttcagttctaattttgatgtgtgagcaaaaaacagattgtatccagctcaagttacctttataatatcaagtgattgttctctcacagactttagccaaaaatttttaaagacttgtaaaacccttcctctccaaccgacaccctgtccaactacagttgatactttaagctctgactctcaagcttctgtgagcaaaatctttggcgaagtagctaatgtgacataatcaatttggggggatttgaactacatgaaaaagagttcctgatactgttctgcgaagtctgttaaacaacttaactcttatcagtgaacaaataagcttcgtgcatctctgttcctctactgggaactgaagataatgaaacttaattataaatcaggaaaatgaaaatccttaagttctgaccttttccatagcccaaagcaaacaaaacagacgttacataatttaccttcattctctggagtatgaattttggattaccaatggcaagtataaacttcatatttgtgacatactccaggatattagtaaattaccatagcgatacagacagctaaagaagttagtgtatcaccttatcaaggacattttaaaataaccttaaaattacatcatagaatggaaagacatccatggattagaatacttaaagatggcaatactactcaaagtgatgtaaagattcagtgcaatcttgaccaaaattccagtacctatttttgcagaaataggaaagctgatcctaaaattcatatagaattgcaagggaccctgaatagtcaaaacaatcttgaaaaagaaaaacaaagttggagtattcatgcttcccaatttcaaaagatactacaaagctacaataatcaaaataggtataagcataagaatagacatatagatcagtggaataaaactgagagtccagaaataaacctgtacatctgtgacctttgagaacagtgccaagatgattcactggggaaaggacaatctctttaacaaatggtgcaggtacaactggttatctacatgcaaaagaatgaagttggaccccacacatattaaaattaactcaaaatggaccaaataactaattataagagttaagactataaactcttagaagaaaacataagggtaaatcttcatgaccttggatttggtaatggattcttagaaacacaccaaaagcacaagcaacgaaagaaaaaatagacaaattggatggcatcaaatgttaaaattttgcagcaaaggatgctatcaagtaagtggaaaggcaacctgcagaatgggaggagatatctgcaaatctgttaaaaaacaaacaaaacaaaacgaaaaactcttaacaactgaacaacagaaaagataacccaattaaaatatgggcaagggacttgaatagacattttgtaaagatatgcaaatggccaagaaacatatgaaaagatttcctgggtcattggtcattaaggaaatgcaaatcaaagccacaatgatataccatttcacacctactaagatgtctatactttaaaaacaaaacaaaaacaaaattacaagcattgatgagaatgtggagaaattagaaccttgtactttgctggtgggaatgtaaaatgttgaagccactgtgggaaacagtgtagtagttcctcaaaaagttccgtatagaattaccatatgacccagcaattccactcctgtttatatgtccagtaattgaaaacaagtatcagacaaatacttgtacactcatgttcatggcaacactattcacaatagccaaaagatggaaacaacccaaatgtctatcaatgaatgaatggatgagcaagatgtgcatctatatacagtggaatatttttcagccataaattggaatgaagtactgatgcatgctgcaatgtagatgaactttgaaacattatgcagagtgaaagaaagccaaccgaaaaggtcacatattgtttgattgcatttttagggaatatccacaagaggtaattttatggagacataaagcatattagtggttgtcaggagttggaggaggaggaggaggaggaatagaagtgactgcttaatgagtacaaggttcattttggggtgatgaaaatatttcatcagtaatgtaaggtaatggtaaatgtgatggttgcatgatactgtgaatgtgctaaatgccactgaattgtacatttaaaaatggttaatgttatatgaattttcaatttttaaaattacatcatataatttctgtgatctcacagataactgtggctttgctgtcatagttaccttgtgactgttggaacccatgtgctttgtacattgggaagttctttccagctctggacaggaaaacatgaaaacagatgatcccaaggaggtttctccctaaactaacaattaaagaatatagttttactttttcatttttatttgttgaaactggtaaagcttctaccttgagtgggtctgggttgttttaaaatttatcagaccacattggtctgatattgtttccttcatttaatttgaaaaagcttgtttaaaataactatttggagatggaataattttttggttttatgaaaatttaaaggaattgtaaaagaatctaagacatacttatggaattgcagtcaagtttttctggtgattttgtaagctacactcctagagatttttgtaatactttctaaaatcatttcaattttttttttattgtcagtgaccttggtgtcaggaataagaaaattgtattcagatcagtcaagcagagcctgtgcaaaaacgaaaaacattaattttttatttgtatctcatctgttttgtttttcgaaggaggagcttgaggctatattctggcaaatgatctgagaagagcgtcttactcagaaagctagaagtgttttgccaattattatgaagctttttttttatgaatgaggctgttgcttctggcccacagtcagtgctgtttttggagacttttttctccagcaaatgttgtcttccacactcctacctgcttcctcttatgatccaaaatatgccatccagactaaaaatctgtagatgtgaagcaaacaaagctaactggtttatagtggattgaacccatagcttttggcatcatctgaatcaaccaatcaactgaactctaatgccttggttgagtaagggtgttgcaattttaaagttagaagggatctggcaagcataggaaaatatctatcatgctggctatttttctaaaaaaaacttttgtaggctgggcatggtggctcacgcctgtaatcccagcactttgggaggctgaggtgggtggatcacgaggtcaagagatcgagaccatctggccaacatggtgaaaccccgtctctactaaaaatacaaaaattagctgggtgtggtggcgcgtgcctgtagtcccagctactcaggaggctgaggcaggagaaatgcttggacttgggaggcggaggttgcagtgagccgagatagtgccgctgcactccagcctggggacagagtgagactctctctcaaaaacaaaaaacaaaaatacttttgtagagactgtggtctcaccctggtgcccaggttggtcttgaactcctggcctcaagcaatcctttttctcagcctcccaaaggataattttcaaaaaataagcaaagatgaggtttaaggtagggagaattagaagttgtttctcagtaaattattaataaggagaaattttcaagagctaattcagtagacattgagctactttaggcataccaggacagaagcagaaaaagtgaaatagatggatgagactgtagcttactgcacagttatatttgcccaggtacccctgactatgaacagcagcatagtgcataatactttttttttttttttctgagacggagtctcactctgtcaaccaggctggagtacagtggtgtgatcttggctcactgtaagctccacctcccgggttcacgctattctcctgcctcagcctcccgagtagctgggactacaggtgcctgccaccacacacagctaatttttttgtatttttagtagagacagggtttcaccgtgttagccaggatggtctcgctctcctgacctcgtgatttgcccacctcggcctcccaaagtgctgggattacaggtgtgagccaccgtgcccggccttttttttttttttttttggacggagtttcgctctgttgcccaggctggagtgcagtggtgcgatctcggctcactgcaactgctgcttcctgggttcaagtcttctgcctcagccccctgagtagctgggattacaggcgcacaccaccatgcccggccatttttagtagagacggggtttcaccatgttggtcaggctgtatcaaactcttgacttcgtgatccgcccgtctcggcctcccaaagtgctgggattacaggcgtgagccaccgtacccggccttaacataatgcttttctttaggtaatttacctaacaagtttccttatctgggtgattagaatatagaatcaacctcatagcatcattgtaaggattggattaatgtatttaaagatcttagaacaatccctgatgcagtgtaaagctagatatgtgtatgttaaagacataagatgctggtgttaagaagttaagccacttgggtgagggatttttttttttttgaggggcaaaaaaaatgtgtacattcatggatgctcgtagtcatgatgctctagtcatgatacactagagtctagtgtacaatgcctacacgtctgttggaagttctgagaccttctggtatactcgctttgggaccattttactgctaatgggcatctcaatcaaagataattcttcaagaaagaaataagaactcaaaagtagtggttttacagctgtttcccaagtaattttaagatcccatgaagcatctctggttgtctgttgaaaacatagttactgtctcattcatttaccgaaagtgccatgatgaaataggggtaataatggtcagagacagagatgaaaacagttccttggcctggaactcacagtctgagccatttttgtgcctctagaatccacaccaggaaaacccgaatggaagaacatcagaaaatagcacatccttgaagttacaaagcaacacatctgttagtattatttctgccaagctgtctcaaacttagctgggagagagacatggaaactcattggtggaaagagcgttaaaattacagattttgttctgatctgttatcagagaccattgagtttgctttatttctactaggaattttaatagtttcaaattgctagtttgtattttgataacctctttttcacctttgtctcactggtttttctgtttatgtatagttctagtgcgaatgaattaggaagggagactgatgagattggataactcagcctcctaaaatgttttctcataaagtgatgatgtgctgcttcttttataggactgaaatgcaactgcagaagcaacatgtgaccttttagagatgcttgtgggactgcataaagtgaagagggaaactggaaaaaaacaatgaagtaaggaaaaagtatgtttcttgggtaaatagcatgcttctgagttttcacaagtttcttgctacattaattaccacaactttgtaatgcagaagtctttatatttagtcttcgcattgctattaaacattattttctcctcccttgttttttattgctgaagtctttgatcaaatgattcttttttggattaatctaaaaatctgcattgaatctacaacttcgatgatttctttgatcatctgataggaatctgttataggttgaccattgagatcataagagtatcctgtgttgtgtctctctatgatgtgcagggtgagtcaaagtgtcagcttttagtttgagtgcagaacatacacttgattgacttgaaaaactagaaaactaatttgaataccaattattcaagccatattctcaggttacaatatatgtgacactacacttatctctgggatctgtggaataggaaaccttttaaaaaatgatctagtgtatttaatgatggacatatattcacagtagactattaaaaagcagttacaaaacatattaaaatttaaattgggaaaactttttttaatgctaaacttaatacggaaagcaaagcacactagcaaacaatcattgtaaatagagccttcatttgatgaaatagatatgccttagtaagctgtttaaataaagcatgtcttttacattattttccattattaagaaactttgtccagtaagctgaatagaaatttttagaaggagagaaagaaatggaggcagagtcattgatgatgtgtgatgctggaagttctgtacaacttctttaggcaactccatggcaacatctctctctcctccttcacaagcctggggaccaccagcccgtgggaattttcccacaaatgtaacttctggaactttctgtcttgtggtgggcaccttccctatgcttcagtaatggattgctgcaggcgtaatcttgggtagtctaccttgatcattatttaactttgagtcttaaaattgagtaaaactgtttagtggctttatatatcaatcctctaaaccaaaaatgtcataagacaagtttcttacgtacacatctcctagtgctcactctcatactgactgcttcatcacactggtctgctggccatgcttcagtctgcccagaaatattcctgctttggagccattgttcttgttccctctgcctggaatcatcttctcccagatagccaaatggctactgccctccttcttcaggtttctgctccaaagttaaactttcaaagatgccttgtatggtaccctcaattgaaaatgataccttaccataccctggaatcactctatccttctctattttttctatagcatttatcaccatccagccactgtagataaatttgattggctgtctccctgccttcccttcacacccagtaccttccctgcctgaaatcctcattgagggcaagaactttatccccaggatctaaaccagtgctggacaatagatgctcagtaagtatttgttgggtgaatgaatgaagaatgcttacgttaggaggattaagtagatttggagatcatgtgattggattgaaaatgattaacagggaaaatgttgtggaggaagtatcttaaactgtatgttaaaagcctgctaaacagcggggcttaaaaatcattgtcaaacatagctctttgatctagaaggtaatttatagccactttaggaatataaatggcagattagatatttacactaaaaaaaagacataaaatattaaactaatgtctaggaaagctttggatggtaataaattgggagggttaggccaggtgccggtggctcacgcctgtaatcccagcactctgggaggccaaggcaggtggatctcttgaggtcaggagttcaagaccagcctggccaatatggtgaaaccccatctgtactaaaaatccaaaaaaaattatcaggcatggtggcaggcgcctgtaatcccagctacttgggaggctgaggtgcgagaattacttgaacccgggaggcggaggttgcagtgagccgagacggcactccagtctggacaacagagtgagattccatcttaaaaaaaaaaaaaaaaaaaaaaaaaaggccgggcacggtggctcacgcctgtaatcctagcactttgggaggccgaggcaggcagatcacgacgtcaggagatcgagaccatcctggctaacacggtgaaaccctgtctctactaaaaatacaaaaaattagctgggcgcagtggcgcgcgcctgtagtcccaactactcgggaggctgaggcaggagaatggcgtgaacctggggggcggagcttgcagtgagccgagatcgcaccactgcactccagcctgggcgacagaacaagactccatctaaaaaaaaaaaaaaaaagaaagattgggagattaacaaaaagagttacagtggttcaggtgagaggtgacctgaaagaagaatattatggtcaggatagagggaacaggtgggccctagcaatgcctgtggagttagataactggtaggatggggacattgcatatgactggaggttgcagtgggggaaggttaatgggaaggtcaaaggcgaactggaatcactgagagttttcttatatgtcagtctctgtacctactacctggtgacactgagccatcttgactaactccagcttacctcatttctgccactctgcttctacctatgaagtatgatgtttattctacacgtcatgctttttctctttcacctttaaagtcttttaaaattaatctttcacttttagaggcacataccatctgactcagcaattaatacagcatttctagaaatttatcttacatatgacctcatacaggtatgcaggtaatcctagagtacctcggcctctatgaaatcctcacacatgcctcctacctcagtaacacttggaaagagaataattatctattgctaccattgttctgttgtggccatgggtcttgtccccctccactggttctggtattaactgcccacctttttgcctaaactgcagtggactagagacatttgtacaggagctatgtcttttctcaggtttcttcttttgaacatttgttccttatggcagtctttctctacccatttgtgaatattatgaacggttaatagtaatacttttttactttgtatttttaaagatatttaggtaattaagtatatagtagtgggcatctctacttggctacacattaaaatcacctcagaagctttataaaattctaatccctggtctcaccctcagagactctgagacaatttgtcttgggggaggtgtggacatcaacatttaaaaagctgcacaatgaatttcatgtgcactcaagcttgaggaccaggaatactataagtttttctgtactgatcatgactgtggtcactttaaatttatcgtaacggccgggcgcggtggctcacgcctgtcatcccagcactttgggaggccgaggtaggaggattatctgaggtcgggagtttgagaccagcctgaccaacatggagaaaccctatctctactaaaaatacaaaattagctgggcgtggtggtgggtgcctgtaatcccagctgttcgggaggctgaggcaggagaattgcttgaacccgggtggcgggggttgcggtgagccaagattgtatcattgcactccagcctggccaacaaaagcgaaactccgtttcaaaaaaaaaaaaaaaaaatttatcgtaatgacttcagtgattcctttgggttttataagtttacaatggtgttatattttttaaaaagtatatataacatctgcctttattgtatttgtgtctctccttcatttttatgttgctttttgttggaaggaacttctgatactgtgttaatagtgatgataaaatgcttattttgcgcttatttttaatgactgcatagtttgttttttcccttgaagtataattgacatttggttcaataaataggtactcaatcagggtaagaaaatatacctttattattagttttagaattttaaaattaagaataggtgttagattttaacaaatgaatgtttttatttctgttgacacaaataaaaattttaaaaatctgtttctaggttctatttactattcttttaaatttttgagcgtaagttcggagtgagctttgtgtgctttgtgtatagttttctctctttccgtttcttttagccagttttagggtcagattagtagaataattagataacctatatcttgatccatttttggcatgatttctataacatgaatcatttgttcctggagactgaaagaattgactactttttaggggtataattatttgatttttttttttttttttttgagatggagtttcactcttgttgcccaggctggagtgcagtggcgtgatcttggctcactgcagccactgcctcctgggttcaagtgattctcccatctcagcctcccaagtagctgagattacaggcatgtgccaccatgcccggctaactttttttttttttttttttttttgtatttttggtagagacggggtttctccatgttggtcaggctggtcttgaactcctgacctcgtgatccacccgcctcggcctcccacagtgctgggatttctgccccaaaatgcctcataattttttttttgtattttagtggagatggggtttcaccatgttgccgaggctggtcacgaactcctgagctcaggcaatctgcccgtctcggcctcccaaagtgctaggattactggtgtgagccaccgcgcctggcctagttatttgatttttaaaagatgttggtctggttaggtattttatttttgccagtgttagaattttacatttttgattaaaaactcatctatttagttttatccaaatttattaacacacatattctcttacaattttattgcttctttttgtgtcctgtttttccaattttatgtttcctttttttgcacttgccagtagtatcaattttagtctattcacagcaacttttagttgaaatataaaactttaaaaaatacaaaaggatgtagtgaaaagtcagtttcccattcattgttattccttggccaaatagctcccctctcttaggcagcagctcctgtcagtttcttatgaatccttcaaaagttttttggttttcaatttcaaaatatctaatttatttcttttttaaaaaaaaatcctcagccgggagtggtggctcatgcctgtaatcctagaactttgggaggctgagacaggcagattgcctgagctcaggagttcgtgaccagcctcagcaacatggtgaaaccccgtctctagtaaaatacaaaacaaaaattagccgggcatggtggcatacacgtgtagtcccagctactctggaggctgaggcaggagaattgcttgaacccgggaggcagaggttgcagtgagccgagatcacgccactgcactgcagcctgggcaacagagcgagactccatctcaaaaaaaaaaaaaaaaattcctctaatgcttctgtttgtttctcaagattattagttgtgtatttagtttttatttttatttttcggtagcacagaaagcaatactgctctctattcttttttcgtggtctataatttcttatgtaatgattttgttacattttccaacttcattatcgttatttcatagcctatcttgcaaacagaatgttgtcggattttgtctgtttaacttatctttgaaggttctatatcttatatgggaatttatactctttaatttattattgctattgtattatgttttctgtatattgtatgtttctttgtttttgtatttgttgtttcttctccattatgtcttctgtattacagaacattctttgctttctttagcttttaaacaaattttaaaggtgaacaatctttcaaatctcttagtgctaaacatatttttctgaatttatttactaaaatcaaagcaaaagcaagaacttgccttttcttccatataaggaaatttaatttgccccttttttggcatcttctcttcctattccttatctaccctatctctccaatttttttttcaccccttaatgtttgttctgtgaagtgtcttaattcttctgagcctcagcctggtactcataagtattttgctattttttgattcagttagttaacaaccactgaggtctcactctgagccaacagatcctgagctgggtgcaggagatacaaaagtaaaggcaattctgtccctgccttcaaggttgatgaggtggcatgatgtgcaaatcagccaacaatggcaaaagatgtgatgtgtcaggtgtactggatacagagagagagagaaagagagagggagtggtgtttggtgagtcagtgcaggcaccctgggagctaaatgttactgtatgtaccagcagggctttgtgagaaagaggataaagtgagagggcaaaagtctgaaggtgcacaggtacatcaccctgttcttgggatagtggctggagatgatggagatgaggctggacaagggatgttggggccagattctgaagcaccttgaatgttgggcgacaagtttcagtttgtatcctgtggtctgtaccagagggtttaaagcaagggagtgccatgttctagttcattttttaggaagataattcttgctgtcatgtgaagcacagcctgcagggagggaaatcagttaagcagctgtggcagttgtccagataagaggtgagaacaacttgagcaaggagatagcagtgatgatggagaagaggagatatgaggaatttcggggcagaatctaaaattaccaatgcctgccatggtggagattgggaattagggcatgcctcagaggagtttttgtttgttagttttagggaaggtggtgatagatggtggaactactgaccaacttggggagtggcataaagggtgtggattgggtgcagagactaatttgcagagaagcaggggaaagtttattttaggacttgttgaatgtctaggaaaacatatctaggagcagttggaaatattgatcagaaactcagatgagatgttggggctggagataaaggtgtgagactcacttgtaccaaggaggatatcaaagccataagaagagagataaaatccctcaagtacagcatgtacagaaattaaaaggccttaggattggctgttggcaaagatcagtctttatgttcaggaaattgaacatattgagcactgtaatacatgtccagcatggggtggctagagctttttcagatggctggcttagtcttcacaacaggcccaaatgccacatccatgctagagaaagaagtagaggagatacagaaaagtggtgtggaagaggtgttttccttcaggggcagtggccagcaatgccagcatgctcagttcccacacaacctaagtcagctccctctggagtcaggaggcaaggaaatgcagtttgactaccactctaggaaacagtttggtagatgaatgatgaggccacttggtctgggggtggcatcatttttgtttgtttacagatgacagcttgaggtattctgatttgctgagcttctttgaggttttatatcttagattgtctcatttctagacttctgttatttaaaaaaataaaaaataactctactagattccccttcatgtaatctatttgttaacttgtttacttggagttttttttctctcttccttctcacattgttttcagatgtttccaggtcatgtcccagggatcctctttgctaatgatgtgtgagaccctgggagtgccttcttgtttcttctttcaggtctttccatgctgaaagtagtttccttctgtcatttgaatcttttgttcaattcagtttcctccagaactctaattcatagattgtatctttcctgtagatgacaatttgcctgtgcattcttaggcaacaggattgtgtagtgctaagagcatgggcccggaaccagactgcctgagtttaactcctggctctaccagctactagctgagtaaccttgggcaagttattagcttcttttgtgcctcaattttctcatctgtaaactggaggcaaaattagaatctactaccaagggttgttgtgaaggttaaatgaactaccacttgtagtgcttagaaagaaaggtgtccagtgtgtgttccaccattgttagttgcttgtgttgccattgttgttactgttctagggaaaaatggtgcgagagataacctcttcctcattgtcatttggaccacacaaatagtgatagatttcaggctgttggagccttacttgatgaactagaagtaggcaaatcttgggaattgggttgtattccctcaagtttttaaggagttcaacaaagaacaattttaaccttggtccagaagtgacatctggagttcaagtgtccactatgtgacctcatctaccccatggcattgttcaagtgatgtctcttaaaaacagtttgtaaaagttttatttctaccttacaaaaagctcttccaaaaatttctatttttgctcttgtagttgtccaatcatctcatctgtagataacatatttaacttcctatgcaatatatatgcctaccttatttcagctgtcttgctgcattggccagaacttcaaaactatttaagatggtaaaagtggcctgtcttttattgccttttttttttttcacatttggcttagagagatgttttatatcatctttctttacctatatgccttttgttcttagtatttttattagaaatgagtattagcaaattacattattgtatccatggagagtttcattaggtttttctcatttaactctttgattttgtgtcatgtgtatcttgaactatcattccattctgggcaaaattcttatcagtttggttattcttttatcattaaattatttctgccagtcattaaacattttaaaatctatattcattcagagttgttgcctatgaagagggttttaaaaatcttattggggtttttaaagttgtactctttgtaaaaagttcaaataatataatagttacagactaaataaataataaaattcacccgataatcctattctcccagagtcattgatgttgggtttattgtgaaactttccagatttttttctatgcatttacatatatataggtttcatgccctccctaattcttttctttttctcttctttctccctccctctccatccctctctcccttcatcttaccaaaaatggagtcatgcaaagtcctgaaatgttttcatttaatagtatatcatgggagtctttctatgtccattcacatgtatctacttcattctttgtagggtattccatagtgtggagtcatcataatttagccagttccctgttggtggatgtttaaattattcccaattttttactagcactacatgaaatgtttttggtacatgtttgtatgtgcaagtattttataggctagattaccagaaacagaattgtggatcaaaggtgataaatagaataggggttcttaacctagtctgtgagtccctatagttgtatgcaaaatgtcgtgtgtacaatatattgtgcattttctgagaatgagagtctatagatcagatttacaaagaagtctttggcctcccaaaaagaaagaattacctgcacacaaaattaggcaacttgcccaaagtccatggtggaactgtgatttaagctcatggtatctgactccattggtattaaaagaggaaaaaaggttcatatggaatatacatcaaattatctatagtgctaatctctgaaggtggggttatgagagctccacaattatatttttttaaacaatgaaaatgtggtttttttttaataagcagaagaaaagtaaaattcactgaacaaacaaaagtaatcagagttgcttgtgtggcagaaatagttaggggaaatcatatcaactaatctcttggaaattttaagcagagtgagcaggtttgtgaatgagggagccagtagtccttcaggaaagctttgaaagaatttgcatcatctcaaactacctcaacgtgttaattaactataaagaaagaggtcataaattggtagtggaaaaacccagcagaaaccaccttaaccaagaggtcaagaccaacaccaccagcaataagacatatcaacatcatgagccccatgatatgatgtattaagaacacaacatcatttctgtggtatttttgccaagaatgcataacctcagagtaatcatgagaaaacatcaggcaaacccgaatcaagggacagtcaacaaaataactgtttaatactcttaaaagttgtcaagaacgtgaatgataaggaaagaacaaggaactgtcacaggctgcaggagactaaggataaataacaactaaatacagcggggattctgaataggattctggaacagtaaagggacatcggtagaaaaaaccggtacgacttgaataaggtctttggtttagttaatagtattaatattaaagttctggttctggtaaatatacaatggttatgtaagatgctaacactggggaagctggggccaggatatatggaaactctgtacgatttttgcaacttttctgtaactctaaaattagctcaaaatgattttttaaaagaaatcttggctaggtgcagtggctcactcctgtaatcccagcactttgggaggccgaggcgggtggatcacctgaggtcaggagtttgagaccagcctggccaacttggtgaaacctcatctctactaaaaatacaaaaattatctgggcatggtggcgggtgcctgtaaacccagctactcaggtggctgagacaggagaatcacttgaacctgggaggtggaggttgcagtgagctgtgccactgtaccccagcctggctgacaagagcaaaactccgtctcaaaaaaaaaaagggttgggcgtggtggctaacacctgtaatcccagcactttgggaggccaaggtgggcagatcacaaggtcaggagttcgagaccagcctggctagcatggtgaaaccccgtctctactaaaaatacgaaaacttagccaggcatggtggcgtgtgcctgtagtcccagctactaaggaggctgaggcaggagaattgcttgaagctggcaggcggaggttgcagtgagctgagatcacgccactgcactgcagcctgggcaacagagtgagactctgtctcaaaaaaaaaaaaaaaaagaaagaaaagaaaacaaatcctgacaagatcttattttctatctcacttttaagagtcattgtggagttagagaatgaatttggacctgagtagaaactggattaagaatatgaaagaaagcttagggttaaatccccttctataagtgggtaaaatatgaatgatgactgtccacagtgctgcctataggctcattttccaatatgtttaatttcctagacctttttaaagggtacagtagtggaaagctacgatgagagattttcatgaacattttatgaggctatgatagcagaaaattagtcaatgcaagatactgcacttactggaaaaaagaaattccaaaccagctttatagagaatcacaggtcccaagataccacttagtagccttaagttctctgaagatgttgcctcagtgtttgctgctgaggccaagatggcctgaaaattggtgcacatccatgtgaaggtgaccacacaatcttctggaggcatttgtagttgaaggtccttcctttgtcattaggaagcagccaacctgaagcactatacacagaaaaatcttaaaagctagaggtttatgcatgttctcacttataagtgggagctaaacaatgggtacagatggacatatagagtggagtaataggcattggaggctccaaaaggtgggagggggctgagggatgaaatactacctattgggtacaatgtacactatttagatgatgtggacgctaaaagtccagattcaccactacctaaatctattttaaaaatggcaaaagctaagggttttataacatgtttagatgaagaatggtgcaaagggacagcagacgggaagtctgcatggagtctaggaggagttggagtgtgggactctgagtacacctggctctgtccgtgaagggaaatgccatattggcctggggcagacattctgattgctgcaaggctgggcatgctagatacacaggttgaaaacctccgaaggggctctaaatttgttccttatgcagcaacctgattagtgattctgtttcctagatgctttgatattaagataggacagctctgggtaaattacgggaatagtgaggctcctagaaagctataccccttctaaaaatgaggggaaaaaatctaatttgtctccatcgagtttagttggtattaagtcagttctaccctcacctaattaagaactgaatagtctcttaatgaatataaaaaaattctcaatttacaaagctggagactagtcttattctgtcagtgggtatttctcagcaacagttatatgccaggcactgtattacaccctaaaaacatagcagtaagcaagacagtcatggtccctgtcctcatggagctcacagacaaggagattgttcctccgagcctaaatcagccagcacacctacctcactcaaaggtgcctctgctaaaaaggcttggtttacaccaaaataagtttgctttttatttttcccttgaagttaaatgtaaaaataaattgttactattttaatttccaacagtgttgaaaaatgttttcattaatactttatatatttaatttacataattttgaagtagcatttggtgcctttaatcacaaaacctgcccctgtcctagccacttctttcaggctgtgatgttgaaaacactttggtaaggcttagtgagtttgctcagtgcctacagaaatcagaaatgtgtttaccaaggcatagtaatctctgaggcccagcatggccagctggcagtggccaaagggagccaactcttctctgctgcatggacacctctcccttcctgaatttaaattcttgagtcagattccaagttgtaacctcaaagtagtgaaacaactagagtggcactaactcactcgattctaccacagtgttagtagcctcttccctggcccttcctctagaggctctgggacgtattatttagtagatatgtccttgttggtaaaatggttatggttatgaattctttgtttctctatataaagagtgcagtggataaatgatgagtagtatttatttcttagaaaaatcaaggaaaagttactggttgatataattaatttgtaagacttagctctacgaacctggtggagtgtaagaatagttgatcctttgccgggcgtggtagctcacgcctgtaatcccagcactttgggaggctgaggcaggtggatcacgaggtcaggagatcgagaccattctggttaacatggtgaaaccctgtctctgctaaaaatacaaaaaattagctgggcatggtggcgggcgcctgtagtcccagctactcaggaggctgaggcaagagaatggcgtgaacccaggaggcggagcttgcagtgagccgagatggcgccactgcactccagcctgggcgacagtgcgagactccatgtcaaaaaaaatatatatatatcattttttcaaaatccttttgacctttccaggcatgaatcttccaaaccaccctgacctaccttttattaaactctagtagggtggctataccatgtcctttaacacgctttttcttccccttttctgacttcaagtcccagttcatcaatgccactctccccttgaagtcttctttggtcttcctcactattatcagtctccctcgggtatcgcctgcccattgtagtacctttcctgtagcacacattcattataggctgctttgtgatccctctgttgacgttgctttcttgtctcctgcgttatcaactccttgaggggtcagggacttaggcattcatcattatgtcctctgagtatccagcatagtgaattcgctaacatcaattgagtgtttacactgtttcagctactggctaagccatatatgcatatatagcaaaataatataagcaatataattgcatttgtcataaccctatgagagtgacatgtattattcctattttacagatgaggaaactgagacacagcttaagaattttgcccaaagctacaaaggtaataagtggtagagttggcatttgaagccaagcagtcaggagtcagggcttctagtcattacttgatactggaataatctgctgtgatgcccatgctccttattgtatgctataatgacataataacagctagcacttctcaaacaccaactgtgtggcaggcactgagctaagtgctacatgtttattatctcactgaatcctcacaaaaatcctgtgaggcacttgtaattattattccatagatgaggaaactgagatgcagaggagctggggttaagcaacttgtaccaggcaatgctagagtgtgtgcctagtacgtgttgatgggtgaataagcaaatagatgaataacaatagggataggatttgagaagggaactaacaagtatttttatttttatttttgcagtgtccccctcatggcattaaagttttcttcctctcttccttccctccttccagtagagacagggtcttgcgatgttgcccaggctggtctcacattcctgggctcaagcaatccttctgccttagcctcccaaagtgctgggattacaggcatgagccattgcgcctggctgagaactaacaagtattgagtaccttccattttttttggtaggaatttttttccaacattttattatgaaaaatttcaaacatactgcaaaattgaaagattattaccatgaacaaccatatacccactaccagttttcagccatcagtattttactgattttgctttccctctatctagtcatctgtcatagtattttcgatgcattcccccctcactatttcagcatgttttatcgctaagtagaggtaattatttgtttataggttttttctttggaagtaagatgtgtgcattttattgtagttaaatcttaactgtatatggacctggttttgacaaatggatacacctataaaacccagacacctagaaggatattatcattacccagaaagtttcctcatgtcccttcccagtcagtgcccacccctactccccagaggaatatctactatttttatattgtatattcatatggcatcctgttctaccagaatttaaagtgactcactctggtccataaaatacaagaagaaaacataaatgagaagtagatggaaaaaagaaaccaaggtaggaatattaaatggaaccaggagaccacctggaacttttataagtgatacattattcagtcctcacaaaagatatacataattatttccattttatagacaaagaggctacaaagctatgcagctaataagtaatagggacacttttactccaagtccatacttttttttttttttttactgtagtcccaaaaaccaagacaacaggtaaaataaaagcttattttaactgtgaatgtggtctcaaataatatacgctaaagtatttgcaaaattgtgtttcctcttcttgttggtactttgaccatgagagatggcaagggtgggggcactaaaatagtcctgcagtccttacaaatttccttaaggtcaaggttggctttggtttatcctgtgtggccctagagatgggattccatgtcctcagttatagaaaaagacaacttttccaggactggtgataagagtgagaagtcttgaaatgtcctgtcgactgttaattaggactatagcaacatcaacaaggaggcatcttacatataacagactcctggccagagttttcagttttgactttaatggggttcgtttgttgtgttgaggaagagaaaagataacattttataaaagaattataaacctctaataggggaccttagaaatctgccttctatattctgtgttgtctcctttataataatatattgtatatataagtaatgggtgaggaagaactgaagattactttagaatttcttacttaaaatgccagaaaagggattgggcatgttatatggtaggaaggctgtcacaagactcctggataaagttagagagaaactgaaaaataagatgggcatgttacagttagacttacttggcagtataaaatgaagactttcctcttctgggctgtggccaccagcatcgcgggatgacacctgggtttggctctgttgggccataggggactaagacgtactcacatggtctcaggtgatggattaagaaaacacaggaactagctcagtggcgaggcctaagaagacctagagcaatgactctggaaaccactagaagtgaggcaggcatccagtagtcctgctctactgtctgtactgtcttctctctagcccctgtcccctatccctctgctccctaacttctcatttcccactcccagcccctcctccctggatcccatacccaaagtctgaaaagaggacatttcctggtctttcaggccttctgccctgtgcctctggtcttttggagggtaaggcaggtatagacagccaactcaccagtagaaagatccacattaatggtggctagcaatgataaagactatttcctcctccctaggcagcaatacagttatcttgaatagactgctttatttggaaaaaacaacattttttaagttataaaagccattctttcttattgtagataatctgaaaaacataggaaagaataatgaagataattgagattcccttagtgatatcttgatatcattccttttaggtattaatttagaaattgcttacatacagtgtaaagccatgttatatatatatatatattttgtatctcacttttaggatatttatgtatttatttatcatgtcttatccaaatatttttctgtatcaaaaatgataagcataatgtaaaataagcattgctattctatctattctatagacagtactctacttttagcttaactattttgttgaatttgaagtgagtttttgtgaacagcatatagttgggttgtatttttattctactctgccagtctttgccttttagttggtgtatttagatcatttatctttaagctaattattgacatattagagctttaatctgccatttattatttactgtttcttttcttgtctttctctgggttacttgaacattttgagaggtttttatcttgactttctaatagtttttttagtgtatttctttgtattattttcttagcagttgctctgagtattacagtatacctatgtgacttactgtagtctactatgatcagtattttaccactttgagtgaaatgtggaaacctgatttccattcaggtccctttaccttcccccttttaatttttaatttttttaagacacagagtcttgctatgttgcccagggtagaagtgaacttctagactcaagcaatattcctgctttagcctcccaaatagctgggactacaggaggataatctatatatatatatatctccccatatttctgccttttctgttgttttctgttcccttttgatgcttcagaattcttttaatcatttcctttctgtttgaaaaacttcctttaaccataaaaatgttgtgccacttccttctggcctccatggttttattttttaattttatttgttattattttttatttttagtagagacggggtttcaccatgttggccaagctggtctcaaactcctaacctcaaatgatctgcctgccttggcctcccaaagtcataggattacaggcgtgagccagtgtgcccggccaggcctccatggttttagataagaaacctgttgtcgcttgatattcccttataggtagtatgttgtttttctctgctttcaagagttattctttgtctttaatttacagaaatataattaagatgtgtcttagtgtggatttctttgagtttatcctatttgggatatgttcaccttctgaatctaggtttatgtccttcagcaaatttggggaattttcagtcattatctttttgaatactctttcagcccttctttttattctctcctgtgactctgataatatgaatattggatcttttgctattgtttcataagtgttggaggttctgtctgttttcagtccatcttcatggttttgccatgttgcccaggttggtctcgaactcctggcctcaaatgattaaaccatctcagcctcccaaagtactgggattacagacatgagctaccacgcctggccaacaggtgattttttaaaatctacttcggacattttgtctattaagagagtctgggtcctatttaaatcttccattttagcaggcggtcacagtgtttagatgcagcatgtgagctgggatttactcttgtggttccaacgatgatttacttttcagagcctttgcagtactcttttggtccacttggtttatctggtgctgccacggctcccactagtccctgttggtgctgtctgatgggggtaaggagtttccccaggccatgctgcctgatatctaggtagaggagggagtctccatcctgctgggatgcagcttgcttcctgggggccctgtagttggggggaaaagtgtttccccagactgctttattgttagtggggtcctgagctatcccccttgttggtgcttccagctggcttggtattgtcggcagaactcccattcaatcctctgctgccctctgttgctaggttgggggttgggaaacaccctcggccaccttcttctattgaatgggggtgtggtcataagatgtgctgctatgttgttcctccaatcctgggtccctaagtaattcaccttcctttttctttcagacttctcctttggttgccttttgtgttattttcaggatttacagttgtgcttacaaggaggtggggagagaaatgggtttagaccatcttgtctgaacggtgacagggttctatttaaccattcatcttttggatgctaagattgttttaaatggtgagtagattagactttgtattggagaactgggggaaggaggcctcccaacgaccttgatatctgaaaggctttcttactccacagactgatgggcctgggcctggttggccgcccagtgcaggctattactcatctgccttccgcttgcttggctggtgatgtcagttcttcgtgtctgctttaaaggcaggcttttcttgttcttatgctcactgaataatgcagtagtttgttatacttttagcatgattaaaacagaggaactgtcacttttgtagggtcttttcttgacctatccttttggtcaatgttgtttcccttttggcaagggaattttgcaatttattttaaattcagtcatgcaaattgtatttaattgtgacttaactatgagatttttttttttatgtgaacaattctgtttcagggctgcaaaacaatgaccaagtttttcttatattagtgtgaagaaagtttttaacattttccatttgtgaatgaggaatttgaggtcatctcagttcttccaaagtaaatgtacctttaaaaaaatcagagtgagaaatcctatatagtggaagtcatgggtaattttgtatagtttacaagaatagttttgcacaaataatttcaggttaaaattgcatactatttatccccacccatttcctttattggctgtgacacacaggaattacgcccattgcttgactaacctttctgaccttttgttacttggctataaattgacttgggtcttttgcaaaaacactgtcaggggggaaaaatctttttgttagaacccagccaattcctgcttcagtggagaacagtttgttctcctgaagaaatgagccagttcagtgaacagaaaaacatagccataaactggcatcgtcaaacactgcaaaagcgattgcccacattcattccacagaggagggagctttataaaagaatgaggttttggagagagaaatacagttttgagcaccatgggctttaggtcaatgtaattgactcgttagagtgagctgtaaccacataaaaaaattttcttttcctgagctctggcagccaccaacattttaacattttaaacaggaatattgtggaattctcctgctgcctgctttcagtcctcttgactgtgttgtatagcatgtatcctctgcatttcatttgatgttcccatgagattggaagctgcctgtgttcagcaatgcaaacatttcccaagtaactgctctgtgcaaagctgagtgttgttatacttttagcagagaagacattaataatggtcagtgaattacaaaaaaaaaaccggagaaactggagaaatcgttgtatgacaggcacaggtgcaaagtagtagaaaaatgtacaagacacagttctggacagactgtaccacagaagtagaggcatttgagagaggtttgaagtctgttgaagaatttgccaaatggatgagaagagtattctcgtcaaagagaggagtatatgtaaagctgaagagtgatgacccagcatggggtttcaggtactataagtagatttacgcttgggtgtaaagtataaggagggaaacgagtagcagacagtgaaactggagaggcgcagggacctgataccatcggtctcaaatgccacctgaaacagttaggaatttatactgtaggccatgggaggctctgtaagagcttgaagcaggggaatggcctaggcagagttgaggtaggaagatgtgggtttgtaaggaactgttcagaaagggtgggttggaccagactaagacaggatcatgataccaggctgaagtgggcagactttgtcctgcagggaatcactgaagacaatgatatgtgctctagaaaggcaaatatggttgtgattcaggggagcatacagggagggcagggtgcaggcagtgtagattgctgaagttactgcagaggtttacaagccacaggagaaggatggtgctgcaaaaccttactcagggtgcaagttggtcactggggagtggaggggaagaggaaggaggcaaaaagcctgaacatgctacttaattctcctgttaaagacacttaacaggcacttaatgcctgttaaagatacttccacacagactatcttgtttaatttttatagtgggccctatcttgtctatattcagatgatttccattgtgcaaaagagaactgaggtttgggaggttcaatactttgcccaagacccaaatgacctacactaggaagtagctgagtccagattagaacccaggttcatccaactctgaacacagtgacatgccacccttgactagtacttgctataactgagctgcccagtattaagcaagtctttcttttttgaaacaggttctccctctgtcacccaggctggagtgcggtggcatgatcttggctcactgcagcctcgacctcctgggttcaggcaatcctcctgtctcagccccgccaagtagctggaactgcaggcatgaggcgcacgccacaatgcccatctaatttttgtatttttgtagagacaaggttttgccatgttgtccaggctggtctcaaactcctaggctcaagcgatctgccagccttagcctcccatagtgccaggattacaggcatgagccaccatgcccagccatatacatactctttataagagttcatgtctataaatcatagtactgctaatatttagatattagttttttttgtttgtttgtttgtttgtttggtttttttttttcagatggagtcttgctctgtccctcaggctgtagtgcagtggcacagtctcggctcactgcaacctccacctcctgggttcgagtgattctcctgctttggccttccgagtagctgggattacaggcatgtgccacgacgcctggctaatttttgtatttttagtagagatggggtttcctcatgttggccaggctggtcttaaactcctgacctcaagtgttccacctgcctcagcctcccaaagtgctgggattacaggtgtgagccactgcgcctggcctaggtattagtattaatgctaatacaattagtatttcaaaagcctggatttttttcttcttaacctattaccctatgaaaatatcagctatatcattttatttgttaaagtctcaccattttagaagaattggtttaggggaaagcccaaccaaattggcaaaaagtatgagtgagtgagtatgcttaaataaatgtaattttaaaatgttcaaggtgtgtctgtatgtgtgtgtaacaattcacattagaataacagactatggctttcagaaattagagaaccttttaggactgacatgaacttaatgtaaattttagtaaatgtgtgctttaataggtctcagaaaacataccttttagtattatatctgaagaagaggcttactaagcaaaaatcatcttcagtgaagtcccaggacgaatgaatgattctctttatgcagcattcattctactgtcatgaggtcatggagtctgtgtttagggcctaggaaaggagatgcaaaagaaccagaaacaaaactggcctactctatatcaaaaatatattcctggttaatggatcagctcctagttagataccaaggggaagtactgttccatttgatattggagacttgaggttccagcattgaaggctgtaattatggaatgttgcaagctgtctcttcagcatctcacattttcaccctttccttgcttgctgcttctcaaagtggaaccagaaataatgagtgttttcaaggtagaaaagtgcaggaaatgtgggtaaagtatctcaatcttaagattactgtattattatctttgtggcatcactgttagaaattgctaggtttttaagaaaaaattaagatctaatgtaactgagctgtggagctgtagcacatttccctgcccaaacagttggaattatatatagcacaggaaaagaaagacagccctgctttcctctagtggctgctgagcataggagcagagcaggagaggcagttatgtaactgggtgtgctcattagttgtgctgtaaattcacacagctgggcttccatgggtcctttgttcacctcagcgttaactcttgctcccttctttgtatcactggggcctgtgcctggcacataaggaaatactagagtcacagaactcaaagcacagcacctgacacagattagagcccctctgctctaatgttgcagagcaaacagacaagcaggcagctacagcttgcatgaggcaagaggctgtgggtgctgaagtgtgaggaggcacagcatggaggagtctgccaaacaagcccctggccacgctgggagtcccctcagtctgtgaagatgcctctgaacctcactttccttctctatagaaaggagcttgttataaccacttcatatataggtattacatgatgctgtgaaaattgaaggtggtgactcatgcaatgtgccttgcccagaattgacactcagtgggcattttgtaaacatttacttgtaggccccttccctttcctcaacccccatccccagcctcagctttaccttgttttctttttactgggaaacatggtcctttttgtgaacactgtcaatagatatcttttgaacctcagaattctctcatctctactcccttcttttctttccttcctccctccctgaagtaagtatcccaactccttttgcttttcctgggccaaaacccttccaagggtgagaggtgagggaataggagatggccgagaaggtaaggatggcactgcagtcacagacacaacacacatcagtatttctccttatccagttcctctccaatcctcccaaatgggcgtgggaattccaggttcattatgactattctattagcattccccctggttgtcttctctttctttgatttactgaaaggagaaagagagtaagggtttttctgttccaagctgcgtgggtctagaatccatcctctccacttataaatgtcctactcccaatcagggtcctactggacattcatcaaagggccctcatcatgggatcttatttgcctccatttgtctttttttaaatatgtgttttttaaaaaacagatacagggccttactctattgcctaggctagacttgaactcctgggctcaagtgatcctgctggctcagcctcccaaagtggtaggattacaggcgtgagctactgtgcctgaccctccgtttgctttaaggtagtcagagtccatacctgagggagttgctgagaggacttgagtcacacatctgtccctctttcctatctggttcatggcttcctgttcttgctctgcacctccccagcctccgcatttagccaatccccagtttctggcacatcttcaccaaaggcactggttctcaactagggataactgtgtcccctaggggatatttggcagtgtctggagactttttggttgtcatgacctggggacagtgtgctctactgggatctagtgggcatctagtcagggatgttactaaatatcctgcaatttacaggacagccccccagcacataggattatctagccctaaatgtcaataaaaagattgagaaaccctgatgtaagaggtggtccacgaatcccttagtgtttgcctgcttccaactctgtgtttaagagcttctgttaacctcaaaagcatctcctccccagtggatggcttcacatctcttaagttttccttcatcctcactccagtcagagttgatcctcgtcatagggtttctaaactgcttgtgtccattcattgcagcacttaccacatttgccttctaatagcccccttcaacatgatatgttctttctcctttgagagtagagtaagagcttgattatgaggatgaccattgaaatcccatgtattgttattataataataatattataaggccccaaacctcagcactacgggagtcagtggcacatagtggagtcagcccagaacatagtgtcaggagattcagtctggtatccaactataattgtccagctctgtgacaaaagatataactttcctgagctttatttagcttccacataggtaagacagaaataatatccatttcctaagactgtttgagtcagtgagatgttagcatagaacctggtccatagtggtcattcaaatatggattgaatcgggaaaatgaagccaaggttccagatgtgaccctgataataattggctcatggggaagaatggaactgtttcttattaccttgatagcggcaatcttaattccaggcagccacgtcaggtaattacacttcttgagaatgaagagaagccctactgatgctgggctggtagcacatcctattcactgtggaattactagaaagtgttggtgctttctcctaatttcatggaagcaaagggaaatcccatatgcctctgactccccattattttatagaggaagtatttctccctctcttggagcactgggaacctagaagcataccctgaaggttgggaggtctgccccgacctgggtacccagaagtctgctgctttgtaaagggactgctgaggcatgagagggacaccacatccacttagacccacgacttcctggtacatggagacaagcacagaggaagtggtattacatttttttagacattataagacatttagctttttccaccaagctaaaaggttagtgacagttgatcctgtgggcaaagacaattgccatatgctcttagggatagggttataaaaatcacttaattattaaacaatggaagtactatctagtatttggccagaggatttcaaacttcctccatatatggccttatgtctagaacagaatagaagtctgtccacatcagggaaagagctgattccatccttggagataactttgaaaggtcttaaggcctgtcaaaacgtcattggttttccattctgtcagtggctaaagacatagtacactagtagatcatgggtcagaggccagcagacagattgtgtttgatcagttaggcatcagtgttcacagggttcacaaagctaacagctgtgtatgtggctcctcctcaccctatttgcattctttgatttctcctaagccactttactccatatctcaggacttagctcttcactgtaaatatactctttctactcctcacccttaatggatgtttgtgttttcttgtcagccagatgtgctgtggttaagaatctaggctttggaattgggagtacctggctttgaatccttgctgttgcctgttgcttgtgtgactgagtcaaatgacttagccattcaagccttggtttcccaatttggaaaatcaagttgatatttagctcatagggttattgtgaggatcaaattaaatgagaaaataaatgtaaagcacagtgcctgacatcctataattttatccagttgatggtagtagtagttgttacacttcttgagggcagagacaactatagttttgaactcttcctccttgtaccctgtctcttagagctgagcatctagtagcactcaaatattttaaaatttgaaataatgacaggtgcacacatgtacacacacacacatgcacactcagaggataatctgataatgacagtaatttaaaacactctagaggtcatgattttaaagtgcttgagcttacttttataaatatgatacataaggggtctaattcatggattggaagaataaatattgttaaaatgttcatactacccaaagcaatctacagagtcaatgcaatctctatcaaaatatgaatgacattcttcacagaaatagagaaaacaattcaaaaatttttattggaaccacaaacaacccagaataaccaaagctatccagagcaaaaagaacaaaactggaagaatcacattacctaacttcaaattatacacagagttatagtaaccaaaacagcatgatattggcataaaaacagacacatagacccatgaaacagaagtgggcaaagatttcttgagtaatacctggacaagcacaggcaaccaaagcaaaaatgaacaaatggaatcacatcaagttaaaaagcttctgcacagcaaggggaacaattaacaaagtgaagggacaacccacaatatgggagaaaatatttgcaaactacctttctgacaaaggattaataatcagaatatataaagagctcaaacaactcgataggaaaaaaatctaataatcccattaaaaatgggcaagggatttgaatagacatttctcagaagacatacaaatggcaaacgggcataggaaaaagtgctcagcatcatttatcagagaaatgcaaatcaaaactacaaggacatatcacctcaccccagttaaaatgacctttatccaaaaggcaggcaataagtaacaaatgctggtgaggatatggagaaaagggacaccttgtacactgttgctgggaatgtaatttcccactgtggagaacagtttggaggttcctctaaaaactaaaaatagagctatcatacaatccagccatcccactgctgggtatatacccccaaaaaggaaattagtatatcgaagagatatctgcatacttatgtttattgtagcactattcacaatagccaagatttggaaggcaacctatgtgcccatcaacagatgaatggataaagaaaactgtagtacatatacacaatgaagtactattcaacgatacaaaagaatgagatcttgtcatttgcaacaacatggatagaactggaggtcattatgttaagtgaaataagccaggagcagaaagacaaactttgcatgttctcagttatttgttggagctaaaaattaaaagaattgaacttatcgagatacagagtagaaggatggttaccagaggctgggaagggtagtagggtgagtgacgggggggaaatagggatggttcgtgggtacaaaaaaattgaataagacctagtatttgccagcacaacagggtgactattgtagaaaataatcgtacatttacaaataacagtataattcaaaggataaatacttgaggcgatgaattcctcatttaccctgatgtgattattatgcgtcacatgcctgtaccaaaatatctcatgtaacccataaatatatatacctaccatgtacctacaaaaataaacattaaaaaaggggttctaagatatgtgagttactactctttgcagtaagttcgatgatttgaagggaaagcatctgagctatatcatctcagccctctgccaaagtaacttcactggattatgatatgatttactgtcccatgctctgccttctggaggatccatgtaggaatggcctgttgaccagcctggccaacatggcaaaaccccccatctctactaaaaaaatacaaaaattagcctggcatggtggcatgcacatgcagtcccagctacttggaaggctgaggcaggagaatcgcttaaacctgggaggcagaggttgcagtgagccaagatggcgccactgccctccagcctgggcaacagagcaagagactgtctcaaaaaaaaaaaaggaatggcctattgagtgtgactgcatctttccaaactaagcctcctgctttacctattttctcttaaacacagttccaagacattcttctccttgggtttcccttcaaaagaatttatctctgtataagaataaacatttgtctttgttaaacgataaaaatagtgtcacttaaaatacatttccatattttcccttgatactgggaatcacagggtcaaattcagtgccaggtgaagggtggagggcattctaattgttccccttctcacaatgtctcttctccctccctccccagtcccttccataggaaacagggaatgtttgtttctgtcttctggtaggagaaggattggtcccacccccagctccagggatggatcttgattgtttaagcccagtcaggtaaaccccacacctgttgcacagtgattaacccagtggcagtcatgccaagaggtttgttcatggctgggcatgtgacctgtgcaggccaccagcatgcttgctgaggactttgggaagaaggctcttcagtcttctgatagacctccccaagacggccctctctctgtgtccttctggatgtttgggacatgaagcttggggctgctggagttaccttgctgtcacgagggaagctacccctaggatgtggttgacgaagtagaaagaaagaaaataggcccttattggccaggcacggtggctcacgcctgtaatcccagcactttgggaggccgaggcgggcggatcacgaggtcaggagaccgagagcatcctggctaacatggtgaaaccccgtttctactaaaaaatacaaaaaaaaaaaattagcggggcatggtggtgggcgcctatagccccagctactcgggaggctgaggcaggagaatggcgtgaacccaggaggcggagcttgcagtgagccgagatcatgccactgcactccagcctgggcgacagagcaagactccgtctcccaaaaaaaaaaaaaaaaaaaaaaaaaagagagagaaaataggcccttgttttcatcatagagcaactgactcaaactcaacctgaagccgctgaactttccatttgcatgtgccagcaaaccacctttattatgtaagccctttcaaattaggtttcttacttgcatcttagaatccaaatggtgcttaatagatacatttccttgtattttgtgtgttttagtgattctaacccatggaccaagaccctgccttggagattggggaacaggtgttggaagggctctattttggcaaagaatggattatttatgtgagcatatttccgcaaagtaaggaaatgtcttgcctatatatgtattaatatttttcaaatttatcttgttttgatgaaatataaatttagataaaaatactaaaaatactgaatttgtaggtttttatcctgcatttttcacaatgagcagatgttagaagcatcatgtaaatttgtccaaaaagatgttgttttttgcagaaatttttgacttgaggaagaagctcttgcttagatagatgtttccaccctctgtccctccttcttttccttccttcttctcttctccagccttcactccctgctgccttcctttttttccctcttagtctctgttattaccctgttttccttctgttgagtcttgttactcaaactctgttagaaatagttgagatataaattctaattaattttatttggatgcctatgttaagcttcatttaacttttcagatcctgcatctatgagttcgacataaatgcaaacaaataatgggtattgagtgctttaatagcaagggacccaaactgaagttcattccccatgcaacaaattgggtgttggatgggaatgcttataatgattgaccccggtttttggtagtaagcaagcaactgcaagtgaactgtaactgatgtatttaatgagtgctcactgtgtgcacattgccattagtgtagctgagtggtgcagcactgaacccttacctcaaagatcttatagttcattggagagaagagacatgtacaccagatactgtgtaagccagggctgtgttttataagggaatatgtaagttgacatctggaacctctttcttagaattatcctaccagaagagccctctagaaccttgtgtttaataaatattgatcaccgccattataaaatatgctgtttgttaataaaacatattttctttattttattttatttttttaattatactttaagttttagggtacatgtgcacaacgtgcaggtttgttacatatacatgtgccatgttggtgtgctgcacccattagctcttcatttaacattaagtatatctcctaatgctatccctccccactcctcctaccccacaacaggccctggtgagtgatgttccccttcctgtgtctgtgtgttctcattgttcaattcccacctatgagtgagaacatgcggtgtttggttttttgtccttgcgatagtttgctgagaatgatggtttccagcttcatctatgtccttacaaaggacatgaactcatcattttttatggctgcatagtattccatggtgtatatgtgccacattttcttaatccagtctatctttgttggacatttgggttggttccaagtctttgttattgtgaatagtgccgcaataaacatacatgtgcatgtgtctttatagcagcatgttttataatcctttgggtatatacccagtaatgggatggctgggtcaaatggcatttctagttctagatccctgaggaatcgccacactgacttccacaatggttgaactagtttacagtccccccaacagtgtaaaagtgttcctatttttccagatcctctctagcacctgttgtttcctgactttttaatgattgccattctaactggtgtgagatggtatctcattgtggttttgatttgcattgctctgatagccagtgatgatgagcattttttcatgtgtcttttggctgcataaatgtcttcttttgagaagtgtctgttcatatcctttgcccacttgttgatggggttgtttttttcttgtaaatttgtttgagttctttgtggattctggatattagccctttgtcagatgggtagattgcaaaaattttctcccattctgtaggttgcctgttcactctgatggtagtttcttttgctttgtagaagctcttcaattagatcccatttgtcaattttggcttttgttgccattgcttttggtgttttagacatgaagtccttgcccatgcctatgtcctgaatggtattgcctaggttttcttctagggtttttatggttttacgtctaacatttaagtctttaatccatcttgaattaatttttgtataaggtgtaaggaagggatccagtttcagctttctacatatggctagcccgttttcccagcaccgtttattaaatagggaatccttcccccatttcttgtttttgtcaggtttgtcaaagatcagatggttgtagatatgtggcattatttctgagggctctgttctgttccattggtctacatctctgttttggtaccagtaccatgctgttttggttactgtagccttgtagtatagtttgaagtcaggtagcatgatgcctccagctttgttcttttggcttagattgacttggcaatgcgggctcttttttggttccatatgacctttaaagtagttttttccaattctgtgaagaaagtcattggtagcttgatggggttggcattgaatctgtaaattaccttggacagtatggccattatcacgatattgattcttcctacccatgagcatggaatgttcttccatttgtttgtatcctcttttatttcattgagcagtggtctgtagttctccttgaagaggtccttcacatcccttgttagttggattcctaggtattttattctctttgaagcaattgtgaatgggagttcactcatgatttggctctctgtttgtctgttattggtgtatcggaatgcttgtgatttttgcacattgattttgtatgctgagactttgctgaagttgcttatcagcttaaggagattttgggctgagatgatggggttttctagatatacaatcatgtcatctgcaaacagggacaatttgacttcctcttttcctaattgaataccctttatttccttctcctgcctgattgccctggccagaacttccaacactatgttgaataggagtggtgagagagggcattcctgtcttgtgccagttttcaaagggaatgcttccagtttttgccattcagtatgatattggctgtgggtttgtcatagatagctcttactattttgagatacgtcccatcaatacctaatttattgagagtttttagcattaagggctgttgaattttgtcaaaggccttttctgcatctattgagataatcatgtggtttttgtctttggttctgtttatatgatggattacatttattgatttgcatatgttgaaccagccttgcatcctaggtatgaagccaacttggtcatggtagataagctttttgatgtgctgctggattcggtttgccagtattttattgaggatttttgcatcgatgttcatcagggatattggtctaaaattctctttttttattgtgtctctgccaggctttagtatcaggataataaaacatgttttctattctacctttttcttggccatgttttttagctatacacagccggtttttttgtttgtttgttttgttgttgttgtttgccatagaaccaacattttggcactaccccccactcccagccatgtgtgcacatacacacacacacaccgagtttgctgcaagtacagcattacaataattcaaaattataactgtctctcatggaaaagaggctgcctgctggtttggcatggggataagtgaactagctgaactatactcatttcctactaaacaatgtatagctgaatgcaagtgagagagacttacaaggacaaccttgaactatctgccagtttgttcaaaacaaaaccaaagaaacttaccaactcttgtatttcatgtcagcagtgacaaaggcttactgagctccccagtaggtgcctggccctgcatgctgcttctagaatgccagcaggaaggcctggccgagcagccagctggctgtggagcccttattctaagactatgctgccactttcttgtgacactggagtcaaaagcaaaaaggggcttgcagccagtaaccaaagggctgtattcaagcagtgacctatttttacactgtaatcgggttgggtttccctttttccctcgcgaggcagtaatctcaaattcttctgagtgctcaagaagccagttccctgttacctttttggcttagttgtttttcactttgacataggtcactcttaacttgaggacaggaatatctgtcccttttccctgatttgagggtaggagttggtttatgtgtataaaatggagagataggaaaacatgaaccaaggtaaggaggatagatggcttctgaggaggaacaaaaccaggtgaactagatagacaaaggtatttgggatcataggtccaaggttctgccctttcaaaccctaatcacacatatgaactaattacttagcttagtcatcaaattttgcttgtgcttcatatgtgctgagtgtcagaggcgtagtaataaaaaggtagaactcttgcctcagcccacagttttgtgggggaggaatcttgtacccacaattgcaatgcagtgccaccagtgcaacagggaagttgggcccgagtgaggctgttagatgttgctggggagggggcaccaagaagggtatcagaggaattcctcctaagcttcttagtcagaccctttgctactccagcctgtctcgcttccatcagatcagtgcctagtctgtactgcgttttttgtttgcttgtttgttgccatttaggtctgtgctatgtacaatctgcaagggtgagttcttcaggtgggattttcatgtctcttcaaggagacctttgggactggaggacagtgtgccacatggctccattcttcaaaaggtgacatgtcttgggactttatgcctaggatgatacatattcctgtcttgtctgcctggacaacttcttttcatcctttaagacttgtttttagcataagtcctgctctcacaggatgtaagttctgttctgatgtcctgatagttcttgtccggtctctccattgcctttttcctctgttcttggcatgtagagccttgagcttcaactcatgcttcagctgatctatttacacccgtatctatccatgttcccctactgcactgtgaatctcagacacagggcatatgttttattcacctaggacataccagttgcttagcaatggtgagtcacatgaaggaagtatgtgtgtcatgtgaatgaagttcccatctggcaacaagatggctaaagatactgagagggctgcaaaagattcttgattgggtctcaaactttttgagctcattgaatgtcttttgtacttaaaaggatattaggaaggttttgcagcataaagcctaggaggatgtaaaaagtggccggctgggatttggcagacagagatcagtaaagaagggtgtatacaccacaacatagcagggagaatgtctaagggaacacccccatttaggtgttgcttaacttttatatgtaatgtactcctgaacacagggcaaaattcacattatctggcagatgttatcatgtctcagcattgcatggtcatgtgccagctagttgtatcagagtctgaattcagcattcaaaaggtgattgggaagaatccaagtttgctataggcagaagttgaggttgcttgtgtaacaggcttcctggtacctcctggtaacagggagaaatgcatcgcaggtgcttgataaagatggatgtagcgattaaacgaaccctaagaccagccttgtgtaagtttctcctgactctgtcatggtttggagcttacattttgaaaaatactgatacatatcaagaattttccagccgggcgtggtggctcatgcctgtaatcccagcactttgggaggccgaggcggggggatcacgaggtcaggagatcgagactatcctggctaacacggtgaaaccccgtctctactaaaaatacaaaaaattagccgggcgaggtggtgggcgcctgtagtcccccgcgggaggctgaggcaggagaatggcgtgaacccgggaggcggagcttgcaatgagccgagattgcgccactgcactccagcctgggcgacagcgagactccgtctcaaaaaaaaaagaagaattttcctagattagaagacagctatgtacaccagagggtgctgtgtttcaattttcatatctctttcttttccactcctgtggttgtatgctacgtgattcatttgaggactagccagttgagaatttgccctcaacaaaggactgttgaagacctgaacacaccctacccacttgctgctttcccagcataacagatgagttcagacatggctacaccacacactccccaggtctgctttgctgtatactagttcttaaccattgagttctttgtttaaaactagaccttttttttttttttatgctgcagcgtaagtccattttcaatattctttctctggtgaaaatggagaccatctggtcatcattctctgtgtaataacaatgattgaagatggttattaagtcacccttcggccttttctcttgcctaggcaaaattgtcttcgtttctgtggccattacccataaatctcattttccaaccctttaatcatcttggtggcttcctttgaaaacaacttcaaaggctgtttcactgcctctattttggtggggtctgggctgtcagcgtctaatggtacggaatgtggttgttttaaccatctagtttccatagctagtttccacatctccaggccaatcactatcattaaccattaggaggtgctttaccatcttttcactgtgatatactttataaatattattgattaatgtgttgctttgactgaatacaaattttagcttgtgaataattttagctgttggctgatagaattttacacccttgtttatggcatttgaggttcttttctaagctatttgattctaagtgaatatgttatctcttattagaggatatgttaattttcctgcattttattcatttattaacttaacatctctgattgcctaccatgtgtcaggctctgtactaaggattgaggacccaaagatgaacaaaacatggggcctaattcaaagatttcacaatctggagagaaagtcagccacatacaaaaaaattataaggtagaatgtgctataaaaaatgatttaggtacagtggaagtttagaaaggcttcactaaagatgtcgtatttgaattgggtctgagcatgaattagtcttcaggtgagggagggggttaaagaaaactctaatgaaggaactctagtatgtgtgaaggcaaggaggctggtgtgtttaggttgcagcaaaccaagtacaaccaggcttggacttgagtgactggaaagacaggaagatgccatgctgagaaaaactgcccatgccaagctgagaaatgttcagcagaaacataaggtgagctgcatatgtcatttaaaatgttctaggagccacatttttaaaaaatcaaaattaacaagtcaaaaaataaaaagcaatggggggagattaaatgcatattactaagtgaaagaagccaatccaaaaaggctacatacctgtatgattccaactatatgacattctgaaaaaggcaaaactatagagacagtaaatgatcagtggttgccaggagttagggaggagggagggatgaacaggcagagcacagaagatttttagagcagtagaactattttgtatgatattataatattgtagatacatatcattataaatttgtccaaacccatagaatgtacaccaagagtgaactctaatgtaaactgtggactttgggtgataatgatgtgtcagtgtagattgatcagttgtaacaaatgtaccattctggtggggaatgttgataatggagtaggctatgcatgtgtggggcagtgggtatatgggaaatatctataccttctggtcagttttgctgtgaacttgatctaaaaaatagcctactaagaaacacaagtcaaattaattttaataatacattttatttaacccaatttatcagaaatactaatattttaacatgtaattgatataaaagttattaactagatattttactttttttggtactgagtctttgaaatctggtctgtattttacatttacagtacatctcaattcacattagccacatttcagatactcagtacatacatgagtacctatggctagtggctgctgtgttggacagggcaggtcttgaaacctggacttgcctgactcagaagcctcaattctcagccacagtgatatcctgctccctaagtactataatgataaacacaagaggagaggagctttcagatgatcatctaatcccatgacgttagctgttgctctccacactgcccggtggctccagtctgaagcatctaggcagtgctgtccaacagaaatacaatgagagccaatacgtgataagtgtcctatgggccacattgaaacagtaaaaaaaaaaaatctaagaatatatttaacccaatatatgcaaaatattatttcaacatctatttaatattaaaaattgttaatgaaggcatatagaccaatggagtagaatggagagaccagaaacaaatcctcacacataaggtcaaatgattttttacaaggatgccaagacctttcaatgggaataggacagtcttttcaacaaatggtgctgagaaaactggctatctaatggaaaataatagagttggatccttaccttacaccatatatataaaagttaactcaaaatgaatcgaagacctaaacaaaagatctaaaactataaaatgcttagaagaagacagaggagaaaagcttcatgacacttgcaaaccatatatctaataaaggggtaatatctagaacatatagagaatttctacaacccaacaaaaacagcaaaaaaccccagacaacctgattaaaatggtcaaaggacttgaatagacatttattcaaagaagatacacaaatgaataagcacattaaaaatactcaacgttaatataattaggcaatacaaatcaaaaccacagtgagatacagcctcacacccattaggatggcaactctgaagaaaaaaaaagaaaataacagatattgccatgaatgtggagaactcttgggaactcagtgcactgttggtgggaatgtaaaatggtgcagctgttatggaaaacagtatggcaattcctcaagaaattaaaaatagaatcaccatgtgattaagcaattccacttctgggtagttacccagaagagttgatagtagggactcaaagagattgtatgtccatgttcatagcaacattattcataataggcaaaaggtagaagcaacccaagtgttcattgatagatggataaaatgttgtatatacatacagggggatattattcagcctttaaaaggaagtaaatcctgacatataatatggatgaaacttgaggatattatgctaagttaaattgatcagttataaaaaggcaaatactatatgagtccacttatgtaaaatacctagagtagccaaatctacagagacagaaagcagaatggtagttgtcaggagtcaggggtgggcaggaaatgggagttattgtttaatgggtgtaaggtttcagttttataaggcaaagagttctggaggcagatggtgatgatggttgtacaacaatgtgactgtgttaatacttaatgctactgaactctccacctaaaaatgattaagatggtaaattttatgttatgtgtattttaccacaatttctaaaagtccctctaccaagaaaagatgttaagtgcttccgagaccattaacatttcatgtgggaaaagagaaaagagagatgtgaataaaggaaactaggaaaaaaataagtatgcttggaaatctggatgtatggtgcagtggactgaatgtatctcctaaaattcacgtgttgaaattttaatccctaatgtgattgtcttaggaggtgaggcatttggagggtaattaggtcactgggatagagctctcatgaatggaactagtggccttataaaagagaccccagacactccctggtcccttctgccatgtgaggacagtgggaagttgtctgtctatgaggaagtaggccctcaccagacactgaatatgccagcaccttcatcttggacttcctggcctcaagaactgtgagaaatacatttctgttgtttataagccatccagtctatgatgtttttgttatagcaccccgaacggactaagacaaatggtgagaggtgaaatgaagatttaggaagtagacctaggctatattttttatttgcttgtttcgttttttggaagggtgagtgccagggtcaacggagccagaaatttatgcatgtagttttttaaaacctgcagggatcaatggcagttggaagtaatggatttggaacttggtagataggtcagggctggcaagggtgatttggaaatctcttgggtagaggagattgcaaagtcctgggcatgagtttgctccctttggagaggttatagaggtgtgggtcttaacttcctttgggtcctgagtggtttgagacttgaaggagtaggaaagagccacttgactgatgaccttggtgcaagtggtttgggcagaaggagaggaaggaatggggcctgcaatgcaccaaagattgatgagcaaggaagttgaataagtgggacagaggcagtctggcatgggggagggggaagatgggagaggccagttaggggatcttttctatttttatgagatttaagtggtgtctcaagtaataccactatgatatacttggactagaaattttcttgtccaagtgtgtcatagaaacaaccaataacaaataaccagccaatatgtaataacaaaccaatatgtaacattaaagcagtccttttgtttaaaaacagataaatagaacttttaccaaattcataatggcagacacattacatcagttcttagatgtatccattctcagaatatatgacatcaagagaagctcttagaaacttctgatttaggctcctgaagtctcatggaaaggaaataaatatgctaactatcttgcagcggaagttaactcttccccagtactctcctgagtgtatcactggtgagtgtgggttcatgcacactcactcacatattgcaggaggaaggctgagatgcgaatagggagatatatgtacttcattcctgataaatagttgttggagttttatattttgcaccatcacagccactctcattttcaggatttatgattgactttattgcgttttagattagagaaggctcaggtactgagcactattcctctcctttccttttgcttcaccttgatgctctaaggtttctcaaagacagaacaagtatcttcagaagcctcccaatgcatcttccatttggctgtcaacatctctgttctgctgccccccaccccaggacaataatgtgaaaatgaagagctctgggaaaatacagaactttattgagcaaatccagttggtcccattagttgggcagcataagattggaaggggatttgcagagaaatatcctggctgtaatgataaggctgatcaacccagtgaataggacttaatcttacctgtcaagggaaactgatacttcctgatgaaatattaacagcattcaaaacagtactcataaaggaaacattttagaaactgtcctgggccgactaaggtagagccatagccctctattgttccagggggcttagaccctgagtacctgcagcttcattctgctcagacctggggcagtacccttctctggatgaggaacctagagttcttccaacagaaagggataggaaaggtataatagcttccttcccttttggacaagtaaaataaattttaaatttgacctgttgaattcacttgaaaatagaggaaccaggaggttatcagaaaggactagggagtgagcttgagaggaagataatttgatgacaggatcaaaaaaggtaaagacgaattgatgactcctgtgatttctgctgctctgccagcatcataggattgtggagagcttaaacaagaaaaagtgtatacccaaaagaataaaaaataagatcccaaagagatatttgcacacccatattcactgcagcattattcacaataaccaagagggggaagcaacctaaatgtccatcagtggatgaatggataaataaaatatgatatatacatatcatggaatattacttagccttaaaatgaaaggaaattcttttgtttttgaaatagagtattgccctgtcacccaggctggagttcagtggcgcgatctcagtttactgcaacctccacctcccgcgttcatgccattcgccagcacgcccggctaattttttgtatttttagtagagatggggtttcaccatgttagccaaaatggtttcgatctcctgacctcatgatccacccgcctcggcctcccaaagtgctgggattacaggtgtgagccaccgcgcccagcccaagataagtactttttttagctagctaggtttctggtagtattagtagtggtagtaggatgatgaaaacagcttgcttttcattctcttctagttgggctacatcttgaaatataacttcatttatatgaggtaactaaagtagtcaaactcttagaaagtagtatggtagttgccaggggctgggggaagagagtaaggggaatagttatttgatgggtatagtatttgcatcttttgcaagattaaaaagttctgggcatctgttggtcaacaatgtgaatgtgcttaacactaccttactgtacacttaaaaatggttaagacagtctgggtgcggtggttcacgcctgtaatcccagcactttgggaggccaaggcaggctgatcacctgaggtcaggagttcgagaccagcctggccaacatggcgaaaccctgtctctactaaaagtacaaaaattagccctgcgtggtggtaggtgcctataatcccagctactcaggaggctgaggtaggagaatcgcttgaacctgggaggcggagattgcagtgagtcaagatcacgccactgtactccaacctgagcgacaagagtgagactccatctcaaaagaaaaaaacaaatggttaagacaatgaattttatgttatgtgttttttatcacaattttttaaaaagaaagaaaggtaggctgggtaaaacagctgatgtacctctagctgttacagttaattgtcatccttcagtggccagcctctgagtgggatgtggtggtaattagaacagtagcagtagctgcagtaactatgatttattgagtgtttcctgtatatcagacagcatgctaaatcattttgtgtacttcctatcaattcaccgaatgtcatgtcaggtctatgaggtaggtattaatagctcctcattttaccaatgaggaaatggattgtgaggacttaagtcatttgcccaggaatacacagtccacagtgttagggctctgtctgatgttagagtcttaactccattatcagctaccgtttattcacccattcactcactgaaaacgattattatgtgccagacattgtgctatatgctacggaaacagtggatataggccctgaccttacttacagagcttacagcctagccaaagtgaaagacaataagcaggaaaagaatcagatgaagatccagacaaattttgataaatgttatgaaagaaacaattaggatgctgtgatagagaataattcagcttggatttgggggagcccccaaagacatttagataggatgttcagagaaagtctaacattcctttcttaagaaggtagatttcaaagaggcaaaggggaagatagctcagaagtcctctgttggaattataaatgagtgtctgaaaacgtgtatccaaatggccttgtgatgaaagaatcctaatcctccttaattctagcagtgtttccttgtcccactgggtcacttcacctcaaagtcctcctctgtgagggggagaatagaacttgtatctagctcagtttttggttgtattagtcatggtaataggatgatgaaaacacagcttccatttaattctcttctggttgggctacatcttgaatgctttgttcagttctaattgccacattttgtgagaaatgcagacaaattagaatgtatagagagaatgtgcaatgaattcaggacacttagctgcagaagtaaatactaaaagaggaaatgatcttcaactgtgtgaaaagctgatatatagaaaagagagttgatgcgtcatgtagtaaaaagagttgatttatgtccaaaagacaaatctaaaagctgggaaccaggtccaactaagaaaggggctttgtaataaattgtcataaatgataattagctcccacatttgggagatactcagttggagactggataacagattgctgcaggattttttaattaggaaagaagttggactgcatatattgtcccactcctccattttgggtattttttttgttttgcttgttcttttatttatttattttttgttttgtatattggatatctctaagttatttttgaactatggctttatggccagaggcaaatgcaatatataatatatagttttaagtgaagtgctcacatgcacccctacagaagttacaccaaaagctcatctgtagctattagaagtttgaaatgtaaaggagcactacttggtatttgacccagttacatactctgtaaggacctctactctgacgccattagcttctcactttctcacttgttatttgtaacaacccatgtattttgggaaatatgctaacattttttccacttatgtatttattcaatttttaactttttgttttgaatacatagcacattaacattgttcagaatttaaaaggggctacagggaaaagcttccctcaaacacatctccctcttcccctcgccaggggcaaacactattattagtttctcacatatttttctcgaggtatttctagcgtataatttttattctgtgctttgctttttaaaaaacttaacatatatcaagatagcttgaaggttaatccatagcagcataaaaagcacctcccttgttctttttcacaagtgtgttactccattgtataagtgtgccataattgatttgattatctcctgttgatgagtgattaggttatttccagtcctttgccattaccatgctgatagtagattaccttatacatgtatgacttaccattgtgcaaagtatatcagcaggctgccttcctagaggcagaatctggtgagtcagggaatgagcttttataattttgttcttgttaaatacttcttaatagaagtcttaccaattttcactccagcaagcagtgtatgagagtgcctatttctgcaaacccttgccaactcaggatattattatccaatgtttcaagcctttccaaagtaagtgaaagaaaaataatcagagtaattttaatttgtatttctcttactgtgagtgaaattgagcattttttcttgtgtgtaagatcttgctggactttgtagtgaggccattgaagaaaatcatcaatacagactaagcctggaagaggtaaaaggaacatcttatccacagtggtcagccagagagaatttttctttctttctttcttttttttttttttttaacaaatgttcttgagaaattcaagtgagctcaccagcctgcaagctattcagcctgtaaactatctggcccacactggaaaatttcaattaaaacaaaacaaatgtaatctcagaagtaaaaccacatccagaacaatttcttttttactgtttagttttaaatttaataaagtaatttacttagtacttggaacaacatttaggatgcaagtacatttaaagtaacatgtttaactttgaaaggcgctgtctcacacctcagagagtgcaatttctaactacttggctcttataataccctagatttggtcccagcctccccccaacccccatttctgtagtttctctgtagatttgagcagcttttggcaaagaccagagtcttttcattgggaacattggcactacacagcctctttgctcattagcagtctgacccattaatttcctacaacacttgtgaccaaaccagttcaatccagtttttcccctggaaaaggaccttctagttttagcagcacagatttgctttgcttttttcacaaagcttcccaggtttaaacctatcttggttgatggcaacactatccttctagttgcttagatcaaaaatcttggagtcatccttgattcccgtggctacaatgttcacatcctcctatccattcctttaggaagtcttttcggctttactttcaaaacatatccagaatccagccacttcttcttacctccatctctaccatcctggtccatgctgctgtcatctcctgcctagattgatgtctgacaagtttccctacttctccactgtgttttcctacagtctgttctcaacatagccagcagagccatgctgaaggacacgtgtcggatgacgccaaccttctgctcaaagccctctcttggcactgcccatttcagagagactcagatcatggcagtggacctgcatggatcccctccctgccccctaccacagcctctttgaccttgtctcatactactgtctctctactaccgccgcccagctctgctggcctccttgctgttctttgaacatgtcaggcacattctcacctcaaggtctttgcaccagctgatgcctgtgcctggagtgtgcttcctcacttacccagatggctcacttccacacctctgagtattggctccagtgtcacattctcagtgagttctcttctgaccactgtatatctaaattgcagtctcacccctgccatgctccacatttcttcagcctttcactgctatgcttttcttccactttttgctctgacacataatttcattttcttattttatttattatctctctcccccaaactagaatgtaaattccaggaaggcagagatttctatctatttttttttgtcttccccatattctggcatgtctggcatagaaaaggcatttagtaaacatttgttaaatgaattgactatcttttctctgcaaacttgttcctcaaattctgccaaacctaaattgaaacaagcaggtattgtattttggtacaagtcctggtgctgtggattaaatccaagagcattgatccatatttttcaggggaatctcacattataaataatgtggcatcgtttgggtaaaaacttttgtgaaagattaaatatgacatgagtaagtttaaggaaggtgataaatacgctcagactacatctggagaattagatttagatttagatgccactgttgagaaggctatagacaaataagagcacattcagagaagaacagtggagagtggtgtggagtctctgtcccagtcacacaaagtacaggaactgaggattattggtttaggggaaaagaagacttttagggaacatgattctttttttccaaaaaatcacgtttttccaattgaaaaatgtgtcggctgggcacagtggctatgcctgtaatcccagcactttgggaggctaaggcgggtgggtcacttgagtccaggagttcaagatcagcctgggcaacatggcgaaacctcatctctacaaaaaaaaaatagctgggcatggtggcacgcatctgtaatactggctacttgggaggctgaagcgggaggatcacttgagtctgggaggtcgaggctgcagagagccgtgattgtaccactgcactccagcctgggtgatagagtaagactctgcctcaaaacaaaacaaaacaaaaacaaaacaaaacaaaaaaaaccaaaaaaaactgtatcatatagaaagtcaaatatcttgtttgtatacctagaatcacctcctattcctgcaacctgatccatcacaagcagatccagcttttgtggaacttgaacattagtaaaggggaccctcctaagaaaaaaatctaagaataaaattataaagatataaagttagatagaggctttggaaggtgcctgtgcaagtgaagtgagggtccccaaagcttcggctgtagtagcttcataggaaatctaccacattcagatttgtacaatagcaaaactgaatcctttctagctctccaatcatgccatgttttctcctccctctacggtttttgtataaagtgttccctttgtctagaacactcttttctcaacttatctacttggcagtatttattcatccttcgagctctaatccaaaagcaacctcctctatgaggccttaccccaagttccccggaagacagaggtgggtagaaagtcttttcctatgctccacagaactttgtgcatgcttccactacaacactcagcttattgtctgattggtgttgatcattttgttgatgactttgttgatcattttgctgatgattttgtttgtctgtcttcagactctgtatcagtgaggatgggctgcagtaacaagctactccaaaaacctcagtagcttaaagtgacaaaggttatttcttgttcatactgcatgtacatggcaggtcagctattgttcttcttttaggactcaggctgatagagtagccgccatctggaacataaccagttgcaggccagagaataaatagtgaggcaaagcctatactttctcataaaacttttcccctggaggtgacacatttgttcacgtttcattggtttcacctaacttcaggtaggcagggaaattcaatgcatccagtggagggcaaggcccagagccctggtggatagcttaataaccacaacagactgttagcttcttgagttatagggctagctagcatcttttcaaaaatccttgtatacccagtgcctagcacatagtaagtcctcaactctatttgagagaaaaaacaaatttagcaaataaaacttataggaaggttttgttgtttttggtgcttactacaaggaaccatttcaaacatctttctagtgtcaataagtgccaagctccctatctttggagatcttcaggtataggccatcctaaccacctggtagtggtacttaaggtaaaattcatgcaaaggtgagtggttagaatatatgatctctaaagtctctttaattctgaggcctttgtatttatatcacaatcaccttctgagcttgagaaagaacaaattaatgtttactttagaggtgataatatctgactagagtgggctatttctgttggtgattagacaaaaataagagttgagggggaaggccaggtgcggtggctgacgcttgtaatcccagcactttgggaggcggaggcgtgtggatcacgaggtcaggagatcgagaccatgctcgctaacacggtgaaaacccgtctctaataaaaatacaaaaaattagctgggcgtggtggcagacacatgtagtcccagctacttgggaggctgaggcaggagagtggcgtgaacccgggaggtggagcttgcagtgagccgagatcgcgccactgcactccagcctaggcgacagagcgagactccgtctcaaaaaaaaaaaaaaaaaaaaaaaccagcactgtttgagggggaaaaacaagtagagagctctagccttgagcccttggctgatggtgattactaaatgcagaaattattgtgacccttaagtaaccagagggcaaattgaggccagctctgggcttgacattgctttgacatttgaggatttagacttgagttctttgtaacttttttgttttcagcagaaatctgacaattgcaaccagcacatccacttactggactgccaaggtcctgcccacacacattcctgaggaaggacagttttccacatgttctttttgttatagagtcctactgacttaccgtggtctaatcaccaagcctcatgttaaaagagttctctattaatacataagagtaagcaatacagaccctcttctgacggtataaaagtgttataaatactaaggatcataataactgtcaagcctttttaccatttatttatttatttatttatttatttagagacagggtcttgctctgttgcccaggctaaagtgcagtagcataatcccaactcactgcagctacgacctcccaggcttaagcagtcatccgcctcagcttcccaattagctgtgactacaagcatgcgtgtcaccatgccagctattttttaaattttttgtagagacggagtctccttatgttgcccaggctgttctcaaactcctgggctcaggcaatcctgtctccttggcctcccaaagtgctgggattgcaggtatgagccactggtccagcctcttttttcatttttaggagacagggtcttgctctgttgcccacattactggaatgcaatgacggaaccatagctctcacttcagcctcaaactcctgggctcatgagatcctcccatctcagcctcccaagtagctaggactacattgtcaagcctttttaaagaacaaaacaaaacactagaatagttcaggttgtaaaatcttcgaaccctctgtaagaaaaaaatgtcaaaatagttacaggtagtggatgtattgtttagttggtattcagaatgaatatagtctaaaagagaacactgaatttagaatcagaatatctggctctgccaaaaatatgtcgtgtgtgactggtcatatcacctcccctttcttgctcgatagctcctcaatactacaatgagggaaggccaataataaccaattcaggagactatgaggatggattgagaaggatatggaagtgctttgcaagctttcgtggactttgatgatgaaattgaagtgaattctgttttcttttcggtcatggaaacttcccagcaagccaactgatttacttaggattggcttgggcagcagtagggtgggtggctgcatctgatttttgtttccaaggtcagcattttccaaaggaagggaagagagaaacatttaaaacagaatgttttttaaaaatataaatttaagcttcatttatgatacaagatttctttttaaaatatgtctcgagcttttaatttttttttaattatgaaaatgtcaaatgtacataagagcatatatatgagccatatatatcccaacccaacttgaacaattataagttcatggtcaaatttatttcatgtatttctacccatccctcatttttttctagggggttgggtttttcctcccagtaaatcctatataacaaattattttacccataaatattcgagtgtgcatcaccaactgattaagacttttgtttgtaacataactgaaataccattatcatacatagcaacattaacagtaattctttaatgtcatttactgcctcctgtggtagatgggctccaaaaaatggagatgaaaccccagtttcatctatgacaggtaaagaatagcccattttcttaatatatggagaacacttgacatcccataggaaaatggacaaaagataattttatacaaaatcgtcaatgacatgtgaaaagatattcagccttgctcataaagaaatgtagattccaaatactagtaattagtgttttatatatcaaattaacaaagactgaaaatagcaagaatatgcagtgatagtgagtgcatcctcagttctttggtggtaacagcgaaaatcagtacagtttacttgaaagacaattttgtattttgctaacaatattttaaatgctactgcaattttacttgtaagaaattcagtatttcagaaattctcaaatgtataaaaatatgtgcagggatggtcaccgagtcattgtaatagttaaaaacctggagaaatgcaaatgtctcttatcaggagaatggttaaataaactatgatgcatccataacctagaatgctgaagttgtttaaaagactgaggtaaactagagatggtgacatggaaagatattgaaattaaataattgtgagacgaaaactcagggtcaaaataggatgtaaaaatacaattccatttttggttttttaaaagaattaattatagtaagctatgcctaggaaacatgcctgaaatcatatatactgcactgttaacaatggtttatctctgggggtgaataggaaggattttcacttttctttctttccgagagagaaatttccacttagagcataatttgaaacaaagtaaaaaggataaatttcaaagtaagtctttgttgctagcactaaatagtggaatgctacctatgaatttttattttggaatgggttgaggtttatttatggtctgttatacatcacgagtaacttttaaatgtgtttcatggtgtagaatgtgaagtcaattactatagaatactcaagactatattcatgtctgtcagatcaacctcatagtagtcacattctttacatcttttttctttgtccacttgatctttagaatattatcttaaaatctcccactatagttatgtttctgtaattctgtcaacttctaccattatttcctttttttttttttttggacagtctcgctctgtcgcccaggctggagtgcagtggcgccatctctgctcactgcaagctccgcctcctgggttcactccattctcctgcctcagcctcctgagtggctgggactacaggcgcccgccataatgcccagctaatttttttgtattttttttttttttttttttttagtagagacgtggtttcaccgtgttagccaggatggtctcgatctcctgaccttgtgatccaccctccttggcctcccaaagtgctgggattacaggcgtgagccaccgcgcctggcctatttccgtttttaatgataaatactgggtgatatgttcaagagggctgcaggctgactatcataacgcttggaagagtctgtcaagagttactttctaagtatttgaattccttcattgaattcttactgttcttccaattcattcctcagaattttttaaagttcctaattcagtctataatttaaagataaacactttaagatttttatctaaaaaactcacatatgtatactgcagtgctgaaatatagtggctattaactatagctttgctaatttagtgaattgagcaattaccaattcccaaagacagatttttaaaaaaagttatgcacttttgtttttatttttccatttatttatttttatttttatttgtatttatttattttttgagacggagccttactctgtgtcccaggctggagtgcagtggtgcgatcttggctcactgcaatctctgcctcctgggttcaagtgattctcctgcctcagcttcccgatagctgggattatagccacacatcaccacacctggctaatttattgtgtttttagtagagacggggtttcaccatgttgttggccaggctggtctcaaactcctgacctcaagtgatccactcgtttcggccttccaagtgctgggattataggtgtgagccactgctctggccccatttaaagatccatttacaaggcagaaggtttcaagatggggcatgtaaaggattgtacaaaaatgacaaaatgcaaacatcacctggcctttccttctgaatctcttttggccgcaccttacatttctatcagctcacttcactagggcttgacttagacaatagcatgtttccacatggtagtgcctcatttatcagacatgctccatgagtgtcttttggatgaatgattttctagataattagaactttgctgtttaagcaccatttttaacccctttaaaaatacataacaaataaacccaagcttacctaaatgggtaatgttgctaaaaacagccaccttagtaagcatccaggtggtggggatatgggtgttcactgtcaatctctttcaactttgccatttgtttgaactttttcttaataaatgctggaggaaaatattacttcaagaggtctgtagcccttattgcaacaatctggaggtttctcagagagctcactgtgtggagtggttgaagttgcaggctctggagcgagactgcttgggttcttattcagcttctgtcgtctcccagttgtgtgcgctccaggcagtcactgcacttttctgagccttgtccttcttgtctgtaaaatgagaataattatagtgccttttcttgggtttattatgagtgaaatgaggggatgtgtataaaagcacttccaacaatatgaaacactcagtaaacactggctgtggctgccactgctgccactactgcttttttgtaattgcttatagtcaatggtccatctacccagaacatggttagcagtggtacccttcttagtcatttattcgaatgataatttagggctaatttgagacttaatttttctttttttaagagacaaggtcatgctctgtcatcctggctggagtgcagtggcatgatccttgcttactgtaactctgaactcttgggctcaggtgatcctcccacctcagcctcctgagtagctgagactacaggcacacaccattgttcctgactaattttttacaatttctatgttgcccaggctaatcccgaactcctggcctcaaatgatcttcctaccttggcttcccaaagtgctgggattacagacgtgagctgctgtgcctggccaagacttaattttgaatgacattgggactattgccaaaaatcaaatccatcttcatgttgtccacttctcagccttagtaagtaaaataccaggaacactatataccttttcctcagtgaatcccagtccccattacaaatagcagttctggccctgtgcctggagtgcttgtgttgtgttgctagggctctgcagttagcttctcctgagttctgctgcctggccttctggtgtgctcatgctctttttcctttgtgttgttgctacttccaggtagtaggtctgcatctctcttccctctcctctggcaaacctgatgttcacaggcactgccattcagcttctctagggccacagtaaatattaccaaggtgagtcaggaagtagcacagaactgtgtcacctatattgaaaccttagaaatgtaaatgctgaccctcttctatagaactgagtgctataatttactgtcctctacctttcttggtttcgatgtccttcctgaggtttttatcatattcagagttgtgcagccatccccactatctaatttcagaacaattttcattgcctggtgactcattagcagccactcccccttctcccctactctcagtccctggcaaccactaatctactatctgcctctatggatttgccttttctggatatttcatataaatgggaatcatacagtatgtgacatttgtgtctgacttctttcacttagcatcaggatcatccatgttgcagcatgcatcagaacttcattccttttcatggctgaagaattcatcgtatggatatatcatattttacttacccattcaccagctgatagatgtttgggttgtttccaccttttggccattatttgaataatgctgctgtgaacatttgtgtacatattttggggtggacatgtttttatttatactgtgtatatacttaggaattaaattgctggtgttttgttttttttgttttgttttgtttttggttttttttttttgagacacagtttagctcttgttgcccaggctggagtacaatggcatgatcttggctcactgcaacctccgcctcccaggttcaagcaattctcctgcctcagcctcctgagtagctgggattacagtcatgcaccaacatgcctggctaatttagcatttttagtagagatggggtttctccatgttggtcaggctgatcttgaactcctgacctctggtgatccgcccgccttggcctcccaaagtgctaggattacaggtgtgagccactgcgcccggccaaattgctggatcttatggcaactctatatttaacattttgtttgccaaacagttttccaaagtggctataccattttacattttcatcagcaatacgtgagggctccagtttctctgcatcctcatctatacttgttatctgtcgctgtaattacagccatcttggtgggtgtgaagtggtatctcattgtggttttgatttgtgttttcctaataactaatgatgttgagcagttttttatgtgctttactggccatttgtatatcttctttggagaagtgtctattcaaatcctttacccgtttaaaaattatctttctatggttgagttgtaagttatttatataatctggatatactttaccagatagatgatttgcaaaccttttctttctgtggattgtctatcttttcactttcttgatggtgacctttgaagaatgcaagtttttaattttgatgacatccaatttatctgttttttcttttgtcgtttgtgctttcagatattctacttgatgtcttccataacttgtctgaaaatctgatttgctcactgggtccataactgtattatttttagtttccctgatttgggatcataaagcacttgatttaaaatgtttgccaatgatatatacaaaggagcttagaaatgttgatgctctttgagatggtaagcccattcctgtgcacttaacctcaggaaataatttgatagaagaaaaacatcctgtatgcccagagatgtttgtttcactgtcacccatgagattggcatgcttttcaacagcaggggtggataagtcaaattcattgtggtacattattaggtagctattaaatgttaaacttatgaagcttgtgtaacaaaaaggtttataacgtaatgtttggtgaaaaaagcacaaatgtgtgctcattgtgataaaaatatgaataaaatatctggactaaatgagaaggtataccaaattatagacattaaatttatttaaattacattttatctttataattaaaaattaagtaaaaaagtgtgcatgccagttcaaattggtgggggaaggggtgagaagttgttagagtgggtttatgtttaccctcaccttcaaagttttaaaaattattttcatcataaaatagccgtgtttatttactgagaatttgaatagagatattttaattttctttacatctttgtatcaaatccaaatactgataacttgattttagtattagaattactattgttttagtcattagagcattatgatttgctaaaacgaaaagtaataatgatgattatcattctatattagtaatagggctcacagaatcccttttctcatggcatcctgtgaaacaattattattattatttctttttgagttatcaactgtttaatttcggtcttttatatataaaaccattggttttgttttcaggttagttttctgccttagctgttttctttcttagcattttaaaagtgtgaagtcaatctattttattaaaagttcaatacatctaaattcacaggtaagggatgttatgtaatgtctggatagtgtaatgattatttgtttctggtttcctcttctttcttctttcctttcttttaaaaaaatacttaaaagcatatgtgaagattacttataattcttttttaaattatactttaagttttagggtacatgtgcacaacatgcaggtttgttacataggtatacatgtgccatgttggtgtgctgcactcgttaacttgtcatttacattaggtatatctcctaatgctgtccctctccccaccccacgacaggccgtggtgtgtgatgttccccaccctgtgtccaagtattctcattgttcagttcccacctatgagtgagaacatgtggtgtttggttttctgtccttgtgatagtttgctcagaatgatggtttctagcttcatccatgtccctacaaaggacatgaactcatcattttttatggctgcatagtattccatggtgtatatgtgccacattttcttaatccagtctatcattgatggacatttgggttggttccaagtctttgctattgtgaatagtgccgcaataaacatacgtgtgcatgtgtctttatagcagcatgatttataatcctttgggtatatgcccagtaatgggatggctgggtcaaatggtatttctagttctagatccttgacgaatggccacactgtcttccacaatggttgaactagtttacagtcccaccaacagtgtaaaagtgttcctatttctccacatcctctccagcacctgttgtttcctgacattttaatggtcgccattctaactggtgtgagatggtatctcattgtgattttgatttgcatttctctgatggccagtgatgatgagcattttttcatgtgtcttttggctgcataaatgtcttcttttgagaagtgtctgttcatatcctttgtgcacttgttgatggggttctttgatgtttttcttgtaaatttgtttaagtgctttgtagattctggatattagccctttgtcagatgggtagattgcaaaaattttctcccattctgtaggttgcctgttcactctgatggtggtttctttcgctttgcagaagctctttagtttaattagatcccatttgtcaattttgtcttttgttgccattgcttttggtgttttagacatgaagtccttgcccatgcctatgtcctgaatggtattgcctaggttttctcctagggtttttatggttttaggtctaacatttaagtctttaatccatctcgaattaatttttgtataaggtgtaaggaagggatccagtttcagctttctgcatatggctagccagttttcccagcaccatttattaaatagggaatcctttccccatttcttgtttttgtcaagtttgtcaaagatcacatggttgtagatgtgtggtattatttccgagggctctgttctgttccattggtctacatctctgttttggtaccagtaccatgctgttttggttactgtagccttgtagtatagtatagtttgaagtcaagtagcatgatgcctccaagtttgttcttttgacttaggatagtcttggcaatgtgggctctttttttgttccatatgacctttaaagtagttttttccaattctgtgaagaaagtcattggtagcttgatggggatggcattgaatctataaattaccttgggcagtatggccattttcacaatattgattcttcctatccatgagcatggaatgttcttccatttgtttgtgtcctcttatttcgttgagcactggtttgtagttctccttgaagaggtccttcacatcccttgtaagttggattcctaggtattttattctctttgaagcaatcgtgaatgggagttcactcatgatttggctctctgtttgtctgttattggtgtattggaatgcttgtgatttttgcacattgattttgtatcctgagactttgctgaagttgcttatcagcttaaggagattttaggctgagacgatggggttttctaaatatacaatcatgtcatctgcaaacagggacaatttgacttgctcttttcctaatcgaataacctttatttctttctcctgcctgattgccctggccagaacttccaacactatgttaataggagtggtgagagagggcatccctgtcttgtgccagttttcaaagggaatgcttccagtttttgcccattcagtatgatattggctgtgggtttgtcataaatagctcttattattttgagatacgtcccatcaatacctaatttattgagagtttttagcatgaagggctgttgaattttgtcaaaggccttttctgcatctattgagataatcatgtggtttttgtctttggttctgtttatatgatggattacatttattgatttgcatatgttgaaccagccttgcatcccaggtatgaagccaacttggtcgtggtagataagctttttgatgtgctgctggattcgatttgccagtattttattgaggatttttgcatcgatgttcatcagggatattggtctaaaattctctttttttgttgtgtctctgccaggctttggtatcaggacgatgttggcctcataaaatgaattagggaggattccctctttttctgtggattggaatagtttcagaaggaatagtaccagctcctctttgtacctgtggtagattcagctgtggatctgtctggtcctggacttcttttggttggtaggctattgattattgccttaatttcagaacctgttattggtgtattcagggattcaacttcttcctggtttagtcttgggagggtgtatgtgtccaggaatttatccatttcttctagattttctagtttatttgcgtagaggtatttatagtattctctaatggtagtttgtatttctatgggatcggtggtgatatcccctttattgtttgttattgtgtctatttgattcttctctcttttcttctttattagtcttgctagctgtctatcaattttgatgttttcaaaaaaccagctcctggattcattgattttttgaagggttttttgtgtctctatctccttcagttctgctctgatcttagttatttcttgccttctgctagcttttgaatgtgtttgttcttgcttctctagttcttttaattgtgatgttagggtgtcaattttagatatttcctgctttctcttgtgggcatttagtgctataaatttccctctacacactgctttaaatgtgtcccagagattctggtatgttgtgtctttgttctcattggtttcaaagaacatctttctttgtgccttcatttcgttatgtacccagtagtcattcaggagcaggatgttcagtttccatgtagttgagcggttttgagtgagtttcttaatcctgagttctagtttgattgcactgtggtctgagagacagtttattataatttctgttcttttacatttgctgaggagtgctttacttccaactatgtggtcaattttggagtaagtgtgctgtggtgctgagacaaatgtatattctgttcatttggggtggagagttctgtagatgtcagttaggtctgcttggtgcatttagcccatttacatttaaggttaatattgttatgtgtgaatttgatcctgtcattatgatgttagctggttattttgctcgttagttgatgcagtttctttctagcattgatggtctttacaatttggcatgttttttgcagtggctggtaccagttgttcctttccatgtttagtgcttccttcaggagctcttgtaaggcaggcctggtggtgacaaaatctctcagcatttgtttgtctgtaaaggattttatttctccttcacttatgaagcttagtttggctggatatgaaattctggattgaaagttcttttctttaagaatgttgaatatcggcccccacttctcttctggcttgtagagtttctgccgagagatccgctgttattctgatgggcttccctttgtgggtaacccgacctttctctctggctgcccttaacattttttccttcatttcaactttggtgaatctgacaattaatgtgttttggagttgctcttctcgaggagtatctttatgttgttctctgtatttctgaattttaatgttggcctgccttgctaggttggggaagttctcctggataatatcctgaagagtgttttccaacttggttccattctccctgtcattttcaggtacaccaatcagacgtagatttgttcttttcacatagtcccatatttcttggaggctttgttcgtttcttttttctcttttctctctaaacttctcgcttcatttcattaatttgatcttcaatcactgatactctttcttccacttgatcaaatcggctactgaagcttgtgcatgcgtcatgtagttctcatgccatggttttcagctctatcaggtcatttaaggtcttctctacactgttcattctagttagctattcatctaatcttttttcaaggtttttagcttctttgtgatggcttcgagcatcctcctttagctcagagaagtttgttattactgatcgtctgaagccctcttctctcaactcatcaaagccattctccatccagctttattccattgcaggtgaggagctgcgttcctttggaggagaagaggcactctgatttttagaattttcagcttttctgctctggtttctccccatctttgtggttttatctacctttggtctttgatgatggtggcgtccagatggggttttggtgtggatgtcctttctgtttgttagttttccttctaacagtcaggaccctcagatgcaggtctgttggagttttctggaggtccactccagaccctgtttgcctgggtatcaccaatggaggctgcagaacagcaaatactgcagaacggcagatgttgctgtctgatcctccctctggaagcttcatctcagaggggcacccagctgtatgaggtgtcagtcggcccctactgggaggtgcctcccagttaggctactcaggggtcagggacccacttggggaggcagtccaactgttctcagatctcaaggtgagaccaccctttgagtggtcgtacacagaaaatgtatagcttgctgggccacaaactggttctgtggattccctgaccctctgacctttggtttcatctcagtaacagtggtccgggatacataacagccagtaactgtaaggtgatcgcttttctgtggcctggaataagtgcggcaggcaaggaaaggctacagaggcctggctcttacagcagccggtcttcctagccacccccgcccaccccaccccttccgttcacacactgcagctaacttggtccctgggcctggcttgggacagacagaggcgtcatcttgttctcatatgcgggaaggctatgaaaagaaaaccgcgtgttggtccaaaatgtaaacaagaattacactaggatcttttgttctcactctgacatggtcagaattaatttggaggtccaaaaagagggcgttttgttttttaatctgaattacttaatgcagggatatgtagggggtggtggggaagaaacaaaaatacgttgcttaagtctatcagttggtattggaccatccccaggtcattcttcagggtccagtttttgtcattagggggttcctaacttagacttcatatccaagttgctgattaaacttactgtgaaaagacctagatggtagaaggcaagcagtggaatgtgtctgggtatccgagaaatatacagaaagcacttaagagaacttaatcatttttttctccctttccttagattgaatagggaaaacctgctttctgcaaacaactgaaaaagctgcatttagaaactgtttctttggccctcatcgagaagctggaacttgtattgttaggccccttatgggacaagctctcaactgctgatcacccagtgattgtcaccatggccagcaagaggaaatccaccacaccatgcatgatcccagtgaagactgtggtgttgcaagatgccagcatggaggcccagcccgctgagaccttgcctgaaggaccccagcaggatctgcccccagaagcatctgctgccagcagtgaggcagcacagaaccccagcagtactgatggctctacactggccaatgggcatcggagcactttagatggctatttatattcctgtaaatactgcgatttcagatcccatgacatgacccaatttgtgggacatatgaactcagagcacacagactttaataaagacccaacctttgtatgcagtgggtgcagttttctggcaaaaacccctgaggggctttccttgcacaatgccacatgtcactccggggaagccagctttgtgtggaacgtggccaagccagacaatcatgtggttgtggagcagagcatccctgagagcaccagcactcctgacctagcgggtgagcccagtgctgaaggggctgatggacaggcagaaatcatcattaccaaaactccaatcatgaagataatgaaaggcaaagctgaagccaaaaaaattcatacactcaaggagaatgtccctagccagcctgtgggtgaggccttaccaaagctgtcgactggagaaatggaggtgagagagggggaccattccttcatcaatggggcagttccagtcagccaggcatctgccagctctgcaaaaaacccccatgccgccaacgggcccctgataggaacagtgccagttttgccagctggcatagcacagttcctctccctccagcagcagcccccagtgcatgcccaacaccatgtccaccagccactgcccacggccaaggcccttcccaaagtgatgatccccctgagcagcattccaacgtacaatgcagccatggactctaacagcttcctgaagaactccttccacaagttcccctaccccaccaaagccgagctctgctatttgactgtggtgaccaagtatccagaagaacagctcaagatctggttcacagcccaaaggctgaagcaggggatcagctggtcccctgaggagattgaggatgcccggaaaaagatgttcaatacagtcatccagtctgtgcctcagcccacaattacggttctaaataccccactcgtcgccagtgctggcaatgtccagcatctcatccaggccgctcttccaggtcacgttgtggggcagccagagggtacaggagggggacttctggtcactcagccattgatggccaatgggttgcaagcaacaagttcccctctccccctcacggtgacatccgtccccaagcagccaggtgtggcacccattaacactgtgtgttcaaatacaacgtcagctgtgaaggtggtcaatgcggcccagtcgctcctcacggcctgccccagcataacctcccaagccttccttgatgctagcatctacaaaaataagaaatctcatgaacagctgtcagctctgaaagggagcttctgtcggaaccagttcccagggcagagcgaagttgaacatctcacaaaagtgacgggcctcagtaccagagaggtgcggaaatggttcagtgatcgtagataccactgccggaacttgaagggctccagagcgatgatacctggagatcacagttccatcatcattgactctgtgccagaggtgtccttctccccatcgtccaaggtccctgaggtaacctgcattccgacaacagccacactagcaacccacccttctgccaaacgacaatcttggcaccagactcctgacttcacaccaaccaaatacaaggagagagcccctgagcagctcagagccctggagagcagttttgcacaaaaccctcttcctcttgatgaggaactggaccgcctgagaagtgaaaccaaaatgacccgacgagaaattgatagctggttttcagagagacggaaaaaagtgaatgctgaggagaccaagaaggctgaggagaatgcctctcaggaggaagaggaggctgctgaggatgagggtggagaagaggatttggccagtgagctaagggtctctggtgaaaatggctctctggaaatgcccagcagccatatcttggcagagcgcaaagtcagccccattaaaatcaacctgaagaacctgagggtcactgaagccaatggcaggaacgagattccagggctgggtgcctgtgaccctgaggatgatgagtcaaacaaactggcagagcagctcccaggcaaagtgagctgcaaaaagactgcccagcagcggcacttgctgcggcagctctttgtccagacacagtggccaagcaaccaggactatgactccatcatggcccagacgggtctgccacggccagaggtggtgcgctggtttggagatagcaggtacgcactgaagaacggccaactcaaatggtacgaagactataagcgaggcaacttcccaccagggctactggtcattgcccctggcaaccgggagctcctgcaggactattacatgacacacaagatgctgtatgaagaggacctgcagaacctctgtgacaagacccagatgagctcccagcaggtcaagcagtggtttgctgagaaaatgggggaggagaccagagccgtggcagacacaggcagtgaggaccagggccctggtactggtgagctcacagcagttcacaaagggatgggtgacacctattcagaggtgtctgagaacagtgagtcgtgggagccccgtgtccctgaggccagctcagagccctttgacacatcgagtccccaggctggacgtcagctcggtaaggagtccacaggggccatggctatcctgtgtgggtaaggggaggaggcacttatggttgggcactgaatttactgcacaggggcatctgctgtctctaaggctgcctggcagcagcattaaccgcctggctgcttcagaggacaactagcagcagaagccataggaatataatatgataaacggttgagagctgttttttgtttcatgtgtttttaaaaacctgcgcaggggaaggaacatggtgaccctaaaggggtccaagcttttctagccatttcttagcaataggagaacaggtcaaaacatcctctgagtcgggcagatccacagccactgggtaggagacagcaacaggacatgagttgaaattcagctcaaattgatgaaaaggaaagagagcctttaattgtccttagatacataatgtgcttttttctgatgatgaaagtcttgtgtttctctggttatgcctgatgtagaagaaatgtttagtataatggaaaatcaccttccttctttgacatacatggaatcaaaagcttgaattttgttcctcagtttctctggattgtactcgaaagcaaaatgtatcatagaagattatttttatttaagacatagttttgaagccacagacaagtcatgttattacgtgttgattttctaggttcctggtcactgagttcccagcctctcccttccctccttaccctttgacatttgtgttctcattagagaccccatcagagggcagccagaagctcaggtgagagccaggagggcggagtattgtagaagctgaagggattgggggttccaaaatggcagcattgctagctgagttggcaatgtgggagggggtacaggagacactatttgtggtgttgggcaatgtgatggttccgtggtgactttggcatgagctgcctcagtgtggggccttgtgtttggtacctcatccccagggccaaccatagtggcctatccctcagaaatcccacagaatttcctggatggtgttgcattgtttccatacaatagccaaccattgttgtttgtttattttggcctggcaaatcccagctcctccaccccagttgctttctacttaggatgtcttaaaaaggacaaaattctttttctttctctgaatattttaaattcatttgaacacaacagtttgaaacatagttatgctattgtttctttactgaattaaggaaaaagagacttcctttttggcccataatttggtgggttgggggcggggagtaccatgtcatccatctgtttagcatttgcagaaagcctgttcttctcatattaacatactaaggcaaaatccagttccacaaagcccacagtgagagcaaacacctggtggagcccaaagccctggtcagcacttagggtaggagtacaagggccactggctcccttacagcctcctccaactccagccatgttttcaatacggcaacaacaaaacactcccctcctttggggcccacagctcacagcctgctttataaagtagctgatggcacaccctggagtcagaacaacaggtttttatggctagtttaacttttttataatgcagagcaggtagtctctcctacaagtctttgtccaagtttgtaagttggtccttatattatacccagctctgtgcttcttgtaatataccagtaggccagggtgtcatgctcaagagagatgaggatgtttgaacaagttgattacgaaagctgacatggagaatgatgttatggaagatggcagtagcagcaccaggaatcttttcctccaccaaagcagttgagctggcagtaattgtctcaagcaactgttttgggactcagaagtctagttgaacacttgcaacatccagggaagagcttgatggagaggcttacaaattttgatggtttttttttgtttcagcatccgcaagctctgcagcaggcaactgtggaaaatgttcctggtgcagactgttggtgccagggtaggcaataacaactttgtcctccaaaagtcaagtttttgtggccaggtgtggtggctcacacctgtaatcccagcactttgggaggctgaggtgtggatcacttgaggtcaggagtttgaggccagcctggccaacatggtaaaaccctgtctctattaaaaatacaaaaattagccaggcatgttggtgagtgcctgtaatcccagctatttgggaggctgaggcaggagaatcacttgaacctgggaggcagaagttgcagtgagccaagatgacaccactgcgttccagcctgggcaacagagtgaggctccattgcaaaaaaaaaaaaaaaagagttttttgatttctgattactgcatttaatcactgagggggccagtgcagaggctgatcattgtctcaatgcccttgggcagagggagctttctagccacaaggggatttaaagagacagtacctatttttttttttctttattcctccttttggcaagccagatatttaaggaaatcttaggtcactggttaaccacagagatatcacaacagaaacttcactgaccccatactgcaaagaatacacacttcacaaaaatagttggaaaagtcacaaatagttggctccagccctcaataagcaaaaatcagcaatctctgaggcatgacagaattagattctcagttaccacaatgtaatactcataatgtccagttctcaacaaaaaattacaaaacataaaaagaaatagaaaaccatggtccattcacaggaaaaaaaattgacaggcaccatccttgaggaagtccagacattggaattattacccaaagacattaaatcaactatcttaagtatgttcagcgagctaaaggaaaacatggacgaagaactaaaggaaatcaggaaaaccatgcatgaacaaaatgagaatatcaataaagagatagaaattataaaaaggaaccaaacaaattctagagctaaaaagtataatccctgaaatggaaaacccactagagggattcaacaaagatttgggcatgcaaaagaagagaacagtgaatttgaagagaaaataattgaaattatccaaaggagaagaaagaaaaaaaatatttaggaaaaaaaacctgagagagctgtgagacatcatcaagcatactaatgtactcatatattcatatagttattatattcattagtatattcatactcatatactcatataggaatcgcagaaaaagaaaagggacagaaagaatatttaaagaaataatgatagaaaatttcccaaatctgatgaaagacatgaatctacacatccaaaaagctcaataaaatccaagcaggatgaactcagatccacaccaagacatgttatattaggattgtcaaaacctgaagacaggattttgaaagcagcaagagagaagcaactcgtcacacagaatttttgacaagattaacagccgattcctcatcaaaaatcttggaagcccaaaggcagtgagatgacatatctaaagtcgtgaaaaaaagaaaaaaaaaaaacctctaaaccaagatttctgtatatggcaaaactattcttcaaaaatgaaagagaaatccagacatttccaaataaaattgaaggagatcattattagtagacatgccctaccagaaatgctaaagggagtccttcatgctgaaatgaaaggatactgaacagaaacttgaagccataagaaaaaataggccaggtgccgtggctcacacctgtaatcccagcactttgggaggccgaggcgggtggatcacgaggtcaggagtttgagaccagcctggccaacatggtgaaaacccatctctacaaaaaatacaaaacttagctgggcctggtggtgctaatcccagctacttgggaggctgaggcaggagaatcgcttgaacctgggaggcagagcttgcagtgagccgagatcgcaccactgtactccagcctgggtggggcagagcaagactccatcacaaaaaaaaaaaaaaaaaaaaagagcactagttaagataactttagaggtaaatataagagccagtactattgtacttttggtttataactttttctctttgtgctttataatttaaaagacaaattcattaaaaaattataaatctatattaatgggcatagaatgtaagatgtaatctgtctaaatagtaaaactaacaaattagtgcattgtaaaaacagaatcaaaacagtacattgtgaacaatcaaataaatacaaaaggaggtagtaatggaattgaggaatcaaaaacatataagacatattaaaaacaaatagccaaatggcagaagtaaatccttgatctgtaatcacattaaatgtaaagggattaagctcttctattaaaaacaaagattggcagattggagttaaacaaatagtgtttatatgctgtcttaagagactcatgttagatataaggacacaaggaggttgaaagtaaaaggatagaaaaagatacacctagaaaatagtaaccatatgacagctgaggtggctatattatcaccagacaaaataatctgttttttctggagaaaaaaaatatatatattttaaatatatacaattatatataaaatatatttaaaatatatacaattatatataaaatatatattttaaatatatacaattatatataaaatatatatgtattttaaatatatacaattatatataaaatatatatgtattttaaatatatacaattatatataaaatatatatgtattttaaatatatacaattatatataaaatatatgtataacatgttatatatatataatttagaattagccagcaagactcagccaagatgatcccagttttgttggcaacctcagaagcattgtaatcaggagccagttgaacatacgccttcttctctccatcagccctgatcaatgtgttgactttgaccacatcagtgtcatagagctgcttcacagcctgacctggtactttttggcttttaacatccacagtgaacacaggtgtattgttgtcttctatctaattcacatcagactcagtggtcactggttattgggaacttgatgatggcatagtggtcaagcttatttctcctggtagtgctcttctgaggatattgaggctgtcttcagagtcataatgtcttgggccacaggaaggtgggtgatgtgtgaatcttttttttttttttcttggtggctgtgtggatgcctttcagcactgccttcttggccttcaaagccttcactttgggatcagctttaggagagtcaagagcttccttcttcacctccagtgtcctcttttgaaaaaggcacacaaaataaatgttaaatcaagaaaggttacaagagacaaggatattatattgataaaatatttatatatataaatatatatatttttatatatattatatataatatatattatatataatatttatataatatataatatataatatatatttataatatataatatatatttatataaatatatattatatataatatttatataatatataatatatatttataatatataatatatatttatataaatatatattatatataatatatatttataatatataaatatatattatatataaatatattatatataatatatatatttatataaatatatattatatataatatataatatatataaatatatatttatgttatataaatatatatatttataagatatatatttatatatgaaataaaaatatatttattataaatatatatttatttttatatatttatttatatatattatatatatatatacccctaacagagctccaaaacatatgaaacagaaatgacagaattaaagggagaaagacaaaaatagttggagactttaatattccatgtccgataatggatatagaaaccagacagaagatcaatcaggaaatagaggatttcaacaacactctaagcaaattagaccaaatagacataagcagaataccacccaacaacagcagaatacacagtcttctcaaattcacatggaatactctccaggataaaccgtatgttaagccatgaaacaagtgttaatacatttttaaaaactgagattatacagagtacattccagttacagtggaatgaaactagacattgaaaataaaaaagtggaaatacacaaataggtggaaattaacacactatttaaaaactaatgggtcaaagaaatcataagggaaagtaaaaaataccttgagacaaatgaaaacacagcataccagaacttatgacacatagtgaaagcaatcctaagaggtaaatctgtagctgtaaatgcatacattaaaagagaacttacgctgggcgcagtggcttatgcctgtaatccccacactttgggaggctaaggtgggtggatcacctgaggtcaggagttcgagaccagcctggccaacatagtgaaaccctgtctctactaaaaatacaaaaattaggtggacatggtggcaggcacctgtaatcccagctacttgggaggctgaggcaggagaataatttgaacccaggaggcagaggttgcagtgaactgagaccgcaccattgcactccagcctgggcaacaagagcgaaactccttctcaaaaaataaaaaatctcagtcgagcatggtggcttgcatctataatcccagtgctttgggaggccaaggcaggaggatcacttgaggccaggagtttgagacctgcctgggtaacaaagtgggatcctgtctctacaaaaaagtaaaaaataagccaggtgtggtggcatgttcctgtagtgccagctactcaggtgtctggggtgggaggattgtttaccaggagtttgaggttatagtgagctatacttgcaccactgcattccagcctgggtgacagcgtaagaccccatgtcttaaaaaaactttttttaagatctcaaatcagtaaactaaatgtacactttaaagaactagaaaagagcaaatgaaacccaaagttaccagaaggaaggaaataaaggttagagcagatatagagaatcaatgaaaccaaaagttggttcttgaaaaaacaaaattgacaaacctttaaataagaatgaaagagaagacttaaattactaacatcagaaaggaaagaggggatgttacattttcacatgaatataagatattttcacatgaatatgatattataagagactactattaacagttatgtgccaataaattgggtaacctagatgaaattcctagaaacccgcactctcccaaaatcaactgacaaataaataaaaaaccaaaatatatcaataactggtaagaagattgttatcagaaacattccaacagtgacaagtctaggacccctggtgaattcttccaaatattgaaagaagaattaacacaccagttctcctcaaactcctccaaaaaaattgaagaggagtaaacacttcttaactcatgaggtcaccattaccctgacaccagagcaagacaagggcactacaagaaaagaaatctacagactaatatctcttatgaatatagatacaaaaatccccaacaaaatagcaagccaaattcagcagcatactaaaaggattatacctcatgagcaagagggatctatccctgcaatgcaaggattgcctggcacatgaatatcaatgtaattcaccacattacaagaataaagagaataaaacacatcatcctaattcaagcagaaagagcatctaacaagtcaacttgctttcatgacaataaacactcagtaactaggaatatgacaatatgatgaagaccatatatgaaaagcccacaattaacatcatactcaacaatggggaaagaccgaaaacttttcccctgagatcaggaataaaataaagatgcccagttttgccacatctattcaaaacagcattggaagttctagccagagcagttaggcaaaaaaaataaataaaaggatccaagttcgaaaggaagaagtaaaattatctttgttcacagatgacatgatcatatatgtagaaacttgaggccagttgtggtagctcacgcctgtaatcccagcactttgagaggccaaggcaggtggatcacaaggtcaagagatcgagaccaccctggccaacatgatgaaaccccgtctctactaaaaatacaaaattagctgggcatggtggcatgtgcctttagtctcagggttagggctgaggcaggagaatcacttgagcctggcaggcagagcttgcagtgagccgagatcatgccactgcactccagcctggtgacagagcgagactccttctcaaaaaaaaaaaacaaaaacaacaacaacaacaaaaaaaaaacttgaatccacacacacacaaaaatagttaagagctaataaatgaacttggcaaagctgcaggatataaaaacaaaaaaaatcatttgtatttagctgggcacagtgacataactgtagtcccactacttgggaggctgaggcaggaattcaaggaggccagcctgggcaacatagtgagaccctatctgtctaaaaaaattggtcgtatttttatacacttgcaatgaacaatctgaaaagaaaattttaaaaatggtatcatttacaagggcatcaaaaagaaaaagtgcttaggaatacatttaaccaaggaggccaaagaagtgtatcttgaaaacaacaaaatgttgctgaaaaacattaaagataacctaaataaatagaaagatatcccatgttcatggattgatattaagatgtagacgtgacccaaagcaaactacagagtcaatgtaaaatctatcaaaagcatagtcgcatttttacagaaataagaaaatccaggaagacccaaccaaaatggctgactagaggcattttgtactcgcctcttccattaagaacaaaaatagagagtagataatcacactttgaatagattatccaagacagaacactggaattcacggaaaagagacaggaaacaaagtaaggaaggaaaaagaagcaaggcagcctgttcagctgggattggctgggaactgagagagaccccccagcatggggaaaaggtaagtgagagaccctcagtggtccacatttccaccatgaaaggattctgcagttctagccacgggagagctcctcagcccttgcagtccctgaaacttaacataggaggtgccaggagattgttcaatggaactgctccagaacggagctcgcactgggtcccccacacttcctgagaacaaaacagctacagcaagatgccatttaaagcccaccccccaaaagactgtacactgtcctggagtccctgagtgccagggctgaggtgtaagagaactgcagactgttttccccagagctgaggcataagtgactgggttactgcagctggggctgaagcactacaaggcatgtgctcctgttgttgtggctgaggtacaactatggtgccagctaccatagcaggggctgaggcacaagtgccactggagctgagtgaggtgtgagtggcacatgcattccccactggccagcaaccctgtgctctccaatggaaggtagtagtacagcactgccactccctatccaagcattctgaaggtggcctagggattgccctgcacctgcccaccttggttggcacctgcacacatcatagggagcctgaagatgagactgcccagcctggctttacaccaccacctccgtggccagagcacacagtctaggggctgggggattgtccagcctagtccaccaccattggcacttgaatactcctcttgggtacctgaggttggggcttacccacttggccactactacctgtatgtaccacttgtgggcctgcagaatgggccgcccagcctgttgcagccactgccaacacaagcacatatcacttgggacccagagggtcatttcaacactgtcactgccatctcccatgccacgccagctgcccaggggcctgagaacctgatcacatgcctgggaactgctgccactactgacatctgagtaagccacccgaaagcccaagaatcagcctgcttgaacccactaacactggtgccattgtatgctcctctgaggtccaaagacaggcatgctctgtccactgctgctaccactggtgcctggagaatggcccacctggcattccagtccttagcaaaattttaccatagcttccactagtaactactcagccactgaggaaatcacagataccactgatgctatttatagccaaagaaatcatacagagactacactactgcacataccaagaatcaaagccaaagtgtcctacccaaacaacaccatagatacgtctaggaaaaagtcctcccttacaaatgcaaatgcaaaaaattagaagaaacaactgttacaccagatgtgcagatatcaacataaggacacaaacatgaaaaagcaaggaaatatgacacctcagaaggaacacaataaatttcctgcaatagattccaataaaaaataaactcacaaaatcccagaaaaagaattcaaattattgagtgtaaggaagctcaatgagatgtaagagaatgtgaaaaagaaaaacaatttgggaaatgaatgataattttatcaaagagatatatgtcataaaaaagcaaatgctggaatagaagacttcatgaaacaaagtacagaatacaattgaaagcttcaacaatatattagatcaagcagaaaaaaaagtcttagagctagaacacaggtcttttgacataactcagaaataaaaaagaataaaaaatgagcaaagcctttgtgacatatgggacacaataaagcaactacatatctaaattattgggatcccagagggttaagagaaaatgaaagagtgagaaaacctatttaatgaaataatattaataggtgaaaacttcccaaatctcacaagagatttagacatctagatataggaggccctgatagcctctaaatggatacagtgcaaaaaggtattctctatggcacattatagtcagactctctaaagtcagataattctaaggacagcaagagaaatgtgtgtaagcaactataaaggaagccccatcagactaacagtggatttcagcagaaaccttacagatcaggagaaaatgagataatatgttgacagggctgaaggggaaaaaaagtaagccaaggatactatgtctagcaaaattatccttcataaatgaaggagaaataaagtatttccaagacaggcaaaagctgagagaattgatcaccactagactggccctacaagaaatgctcacaagagtcctaaacatggaagtgaaaacatgacatttaacactatgtaaaacacacaaaagtataaaactcactggcaaagcaaacacacagatgaggaaaagactcaaatgctaccactacagaaaactaccagagtacaatgccaaacaaaagaaaaaggaaaaaaatatataaaacaactagaaaacaacagtataacaataacaaaacctcacatatcaataatccttggctgggcatggtggctcatgcctgtaattccagcactttgggaggtcaaggtgggcagatcacctgaggtcaggagcttgagaccagcctggccaacatggtgaaaccctatctctaaaaatacaaaattagccaggcatggtggcacatgcctgtaatcctagctactcaggaggctgaggcaggagaattgcttgaacccaggaagcagaggttgcagtgagccgagattgcacccctgtgcttccacctgggctacaagattgcacccctgtgcttccgcctgggctacaagagcgaaactctgtctcaaaaaattataatgcaaggatggtttaacatacaccattcagttaatgcaatacatcacatcaacagaatgaagagcaaaaatcgtgtggtcatctcaataaacagaaaaagcatttgataaaattcaacattgcttcatgataaaaaaaaaacactcagaaaactgcatagaaagaagatagtaaaggccataaataaacccacagctagcatcatactgaatggggaaaagctgaaaatccttcttctgaaaactggaacatgacaaggatgcccactttcaccgctcctattcagcatagtactggaagttctagccagagaaatcaggcaagagaaagaaaaggcatccaaattggaaaagagaaaaattgtccctttttgcagatgacatgatctgatacttagaaaaaccaaaaatgctccaccaaaactcttaaagctggtaagcaaattcagcacagtggcaggatataaagttaacgtacaaaaatcagagtttctatacaccaataataaaatagctgaaaaagaaatcaagaaggtaatctgatttacaatagctaccaaaaataaaaaaagatacttacgaataaatttaatcaaggaagtgaaagatctctgcaaggaaaactgtaaaacactgatgaaagaaactgaagaggacacaaatggaaagacatcccaagcttatggattggaaaaattaatattaaaatggccacactgtccaaagcaatctacagattcaatgcaattgctatcaaaataccaatgtgattttttcacaggagtagaaaaaaaccctaaaatttgtacagaaccacgaaagagctaaaatagtcaaagcaatcctaagcaaaaagaacaaagctgtaggcatcacattacctgacttcaaaatatatcacaaggctatagtaaccaaaacaacatggtattggtataaaaatagacccacagaccaaaggaaaagaaaatagaacccagaaataaagccacatatttacagccagctgattttcaacaaaggtgccaagaacatgcaatgaggaaaggacaccctcttcaataaatgatgctgggaaaattagatatccataagcaaaagaataaaactggacctgtatctctcaccatatacaaaagttaagacagattaaagatttaaatataagaccttgaattatgaaactactagaagaaaacagtgcagaacacttcaggacattggtctgagcaacgattttatggctaagacctcaaaaacacaactaaaacaaaaatagacaaagggaactatattaaaaatcttctgcatagcaaaggaaataatcagcacagagacaatatgttgagtgggagaaaatatttgcaaaactattcatccaacaaaggactaatatctagaatatataaggaattcaacaaaaaatcatattaaaaagtgggcaaaaggtggggcacagaggctaacacctataatcccaacactttgggaggccgaggtaggtggatcacttgagcccaggagtttgagaccagcctgggcaacatggtgaaaccccatctctacaaaaattagtcgggtgtagtggcacatacctgtagtcccagctactcaggaggctgaagtggggggatcagttgagcccaggaggttgagactgcagtgagccgtggttgtgccactgcattccagagcctgggttacagagcgagatcctgtgtccaaaaaaaaaaaaaaaaggtgggggtgggtggggggacaaaagacatgaatagacaattcacaaaagaagacatacacatggccaataggtatattaaagaacactcaacatcacaaatcaaaagggaaatacaaatcaaaaccacaatgagatgtcattttatcccagttagaatggctattattaaaaagacaaaaaataatagaactggaggtcattatgttcattggaatatcccaggcacagaaagacaaatacacgttcttactcatatgtggcagctaaaaatcttgatttcatggagatagagaatagaatgatagatagcacaggttgggaagggtgtgagagtagaagggggaaatgaaaagaggttggtaaatgggtatagacttatagtagatagaagaaacaaagtctaatgttaaatagcagactagtgtgactatggttagcaacaacatattgtatatttcaaagtagctagaatagaggacttgaaatattaccaacacacagaaataataaatactaaggtgatggataccctaaatatgctgacttgatcattacacattctgtgcatgtaaaaaatattcacatgtaccccataaatatgtaaactatcaattataaaagaataatccatcctaaagtttatatagaatctcaggggaccccaaatagacaaactgagaaaaaacaaagttgaaggagtcacactcacttgatttcaaattgtactacaaagctacagtaatcaaaacagtgtggtactggcataaggagagacatacaaaaccaatggaataaaataaaaagcccagaaatccccacgtaatggtcaattgatttttgacaggggtgcaaagaccattcaatgggaaaagacagtcttttcaccaaaaggtgctgggaaactggatatatacatgcaaaagtatgaaattatactcttaccttgtactatatacagaaatttacttaaaatagatcaaagaactaaaaaaagctaaagctataaaatacttagaagaaaatagaatccttccagatttttgattaggcaattattactttttttttttttttttttttttgagacaggttcttgctctgttgctggagtgcagtggtacaatcaaacctactgcagtttcaaactcctgggctcaagcagtcatcccaccttagcctcctgagtagctaggattacaagtgtgcacacctggctaattttattattactattttgtgtgtgggtgtgtgtgtagacaggatcttgctatgttgcccaggctggtcttgaactcctgacttcaagcattcctccccaacctcccaaagtgctgagattacaggtgcaagccaccccatctggccaggcaatgatttcttatgtatgacactcaaagcataggcaacaaaagaaaataataatttggattacgtcaaaatctaaaacttttgtgtttcaaagaacactgttaaaagaatgaaagaacccacagaatgggagaaaagagctgaaaatcatacatctgataagagatttatattcagaatatgtatagaactcctaaaactgaacaacaaaaccaattcaaaaacgggcaaatgatttagacatttctcataggaaaatatacaaatggccaataagtacatgaaaagacgaacctttggcattagggaaatgcaaatcaaaaccacagcgtgataccacttcacacttaagatggctgttacaaacacacacccagagaaaacaacgtgttgggaggatgtggagaaactggatcccttgtgcattgctggtgggaatataaaatggtacagctccttgggaaacgactttgtggttcttcaagaaggtgaatatagaatattaccatgtgatccagcaatttcactcctaggtatacgccccaaggactgaaaacagggactcacatatgcatgtacatcagtgttcttagtggcattattcacagtagccaaaaggcggaaacaagtacttaccaccagataaataaagaaaatgtgtgtgtacatacagtaagatattattcagccaaaaaaggaataaaattctgatatatcctacaacatggatggaccttgaaaacatttttgctaagtgagatgtcaagacacaaaaagacaaatattgtaccattcaacttacatgaggtatctaaaataggcaaaggcatagcgatagaaggtaaaatagaggttaccagggcctaaggggtggaggacatggggagttgttgtttaatggatatataatttctgtttaggatgatgaaaaattgctggaaatagagtgatggttttataacattgtaaatgtacttaatgctactgaattgtacacttaaaattgtcgtaatggtgaattttatgttatttatattttaccatggtttttttcttaaagtcaacatggaaatgtgatgagtggatttgaatgacaagcattggctcccctcagctactaaatccaacacaaagtgacatgttgctgtcctttgtgggacagagcaggaatggcagggggtggccattgccattggcattgttctcttctgtctgagacaggtaactgtgggtacaggaagggccaatctgtttatctgtacctggtttctcatggctttctcagccagctgcaattaaggaccatttctttatgaatcacagatgatgaacctctctgatatcagccttactttgactttgatgttagggttgcaagttacaaatgaagtgaagacatcagtagaatacatatcagaactagacccagctgctattatattggaacagtatgttctggagagcctggaaggagagggcaggatgaagcattttaggacaggactccagagacggtggtggcggaagcctggggagctagggggatttagtgggcctggagaggccaaaccactgctcctgctgctaggcctagggtttagcagggtctctcagagagtctgatggccttacaaggttgagccagcatcctgtccttaacccacattccctcaggctggagggtgggggagtgggtggcagaaggccattcattgctcatggaattaagaggtcctcaaagccagtgatgccaccctggtatagcaaggaccaggctgcctggggggcaggtggtggcagctgccgtagagtgacaggcatgtgttttcttctcagaaacagactgaatttgatctgattaatgtgaaggactggccagtctgggaaaccgcctgccacgtggaagagccaaacccgactctctgctgccacatgccgttcccatgcccggctgctgggcacctgggagagcttccagaatcctcgcagacagcccagagcctgccgctaccctcggcctgcccaccaccaagcaagcagcaagcaagatggggttctcatcagttcttcctcccacaatgtaggacctttcctttaccttccaatggataaaatagttcagagttcatagtcatattcatagacacagaatcaagcttttaacatatacatccacctctatatgttaaataaaacatcagattatcaacactgtcattacgtagaaactttggttagccaagcagtgcattgtcagttacgtcatctctaaaaatgacctgtgtctgttctctggggattgctgggtcacaggtgcccctcaccttccacagtcaggcagggaagttataggcacaaagctacgtctggaacccctttgtgccccctttgtgttcctcaaggaagcagtacctttgaagagatctctgctgcattaagtgatgaccggctacgtttcatgtcaggcttgctttgccttgtgggctactcagtgcagaacctgctgtaaccctcagttcaaaaaatggactggcaatgtgattagcgttggatgctttaccattctctttagttgttaccgtaattctgctttttcatgggagtttgaatcatggaccataacttttcagttatcagatcaactaaagaaacatttgttgttaagcctaatgtgctgacctatgtgcctgcattttttttttaatctagacatgtttggagtgagagaaagatggaaaaaagacatggggtagggacgtaagtggaaatctatagccacagcctgaagctttgaccactgcggttttcagagccctttctccacactcatttcagagcctcctatggtttgggaaggaataacacactggcccattagtaagggtgaaggctggagggatttgttgacttcttggaattatcagaggtagggtggtctttagcacaaagacttgcatgcagagatccctggcagaacacccagagtgcccgtggctcccaccccagggtctggccggtgtgctggatgcatgcccaagggtgctgggcatcactggtccttgtgaggatgcttttaaagttttatatttatgtccccaaacttggaaacaagaactctactttagcctaaccctcatgtccttttttgaattgagaaaattacaggaaatggtgcctttgaaaattagaaaacttgcttacagagctgttctaaatggtaaatcctcaatttccccaagaccggttgctctgagagtagctggtaaagaggggcgaactaaagacctgtccacctgtagctccgctcatttcttagaaaccacctgcttcccagagtgccaagccacaagtaccaggcttcgtgggcacagacacctcctgggctgggcagagtgacagtgctagaagaccccagagagagggcaagggctttgggcaagaagcactggtggtgttttagggaccgtccttctcccctacccagggaactggacctggcagggcaccgtgctcatgtggctccaaggacaagcatggcggtggccccttctgccttccaggagaggtcttgcttttgaaaccaaaatcatgttcttctaaagtgtcatcttctgccctccctgtcccaatagggaccacatcttatttgtctcaaacagggacttgtgagtacttggcaagttttgcagcctatttttgtattcttaatttggggagtaaagatgtttggtctcaaaaacctttgaggaattgccaagaatggcgagtgattgctttccttcagagaacagacacttggaatttctccttttagtgtttatatacgtgcagattaatttatatatatatatatacacacacacatatacagtataaatactcatttgattctcgtaaaacgcgcatctggcgtgtgcagttgagaaacttggtggcacatgggtgttgggggagtagcctgtgttggagggacaccagtgcactaggcagctggggcggcccaggctgaagccatctccgggtgtctgagaaaccacccagtgcctcacctccagatcctgctggcatcacctccagagccctgcatgcactggctgaagagttggtctgtggagaggattttcttggttacttgtattcacggttaatttacaacccaaacagcaaaacacagttggtggacaagttcatgcaggacctacagtgacccagccatgggcactagctcatctttcaggtggaaaagtacagtgctgcctgccctggtatgtttttcttatagatgttagccctgcccaacagccagggctacactacaaaaggcaagaatgcccatgtaaggagcccagcagtctggacagatccttcttcctctgctgttggatgagagtgagtgagtatgctctggaccttatccttgaaagatgatcaaaagcgatgatgagggaggcagtcatcacgcaggtgcttaaagggacattgtaggaggtactcaagggtttgggggcaaaaccctgaatccagccagtcgtgcacagagacacacccacactagcccagtggcagtgggggatgtgggatggcagcagccaggtatgtagccctgtcacaggacagctcactgtggttttgcacactgcctaagggttaaattgtgttgttgccttcagtagaaggcatttgtgggctgcagagttgagagttgggtgaggttagtctctcctgaagaaaaagcctataaaaagtggctaatcttatcccttttctctgtatgcagttggactcgtcagagatagtaaaatcatcttttagtgtttttttgttgctgatgtcttgtacccatttgttttttacatggggttgtagatcgagttctcaaaggtgaaaccagatgatcattctgataaaggaaatttaaatttgatacatatgctttgtatattttgattacttgttttcgtttttgactataaaggagcttttttattttgggaggggaggagtgtcatttttgagaatcttgggttcctgaaaaagaacgccctagttggatggcttgccagggccttggggtttggtagtgattgtacaacttaaagctcctttctcttggctgagtgacaggtggctgttcaggtggaccaaagcaccttgacacaaggactccacactgtgctctctagtagcacaaggaggaagttggacagaacattgggtagtgccttgcgggctcacacatgtactagtggtctcatctccagctagccttgggaggccgtcccaccaggaaatctctctattccgtagcctgagatgtgcccttgtgggttttatcctgctcagtcagtggcctaggggcaggtcctgtgttctctccctctctctcctggctctgggacatctgtccctggctgcctttcatggaggaaggacactggcctttctggttggatgctgtgtggatgctctctgcttgagcctcgtggtctcttgtctctttttggaccaatatcctcagattggtgcagctttttcagttcagatatcacaccccaagtggataaaggcaacttgcaggagaggagagccagccaagaagaaaattttaaaaccaaacctcgtttaggattttcctaaagtcatcttctcttttttcttgctcagagtttacctgggagatttcaccagtttgactcaccatttgcagatgtgcttttgtattaaatttaaattttcacatatcacatccattctcaaggtagttatatgctggagaagaaaaatcctctagacacatgaaggcccacatagtcaagtcttccagggcaaagccagcagcccacccaggtcaggtagccagcagggctcagttcccctcactccagacacggaccctcctcttcagggtctcttgacccagcttccttctctccttttacctgagagcacagacctctctcagccagcctgcccagaccacggggggctactcccatgtagtttggggagcacttgatctcagaaaagctccattgtctgagcaaatgggcagttgtggagctcaagcctttctcctgtgctcaagtcccttccccaagcaaggcttcaacctcatctacccaccatgtagttttctctggccatttaagtggggcggcagggacatggttgggccatgccacaccagggctggtgaggcaaccagttttgattttgacagagtggctggaggaaaagtggcaatcaaggtgctgcttggtttgctctgagtgcaaatggaaccaacaggtttctgctgcaatctgtgtgttcccagtgccaggtcacaccaggaggggtggggcagggctaaccaagtggtctctgaactcaccgagcgtctgcacttggttgtgaagttaatgggagtacagagagcgtctggccttggagaggggttgagagcctcctttttggttcttcattcctgagctcttgcctgcccacaaatctgacctctttgaatggggacgcagtccttcaacagagaagtttctatggcaaagaagtttctatttagctctagatccagcagagtcatccattctaactgccctgaagtctagagcaggggagggaacccagaggctggggatgagactaggcagaccctggttaccatatggacaaggacaggggaaagcacccccttcctcaatttctgaaagttctatctttgggttcgcaggactttgaggatgataaagaacatataggtactagcttgttgttgctggtccaaagcttccacagccctgagaatttggctttcgtggctgctctggcagctgagcgaagggaggaaggcagccgctctggtggggactctaggcaccttccctgctgtccacttggataggcggtgagccccagggtactgagaggagcctgagcatttacctgccattagtgcctcttccttcaggagactggcttgaaacgtgtgttcatgtgcgcgtgcacacacacacatgagcacctgtatgtgttaatgaatagtttttcttggttaatgctttttaacttctgttcctttccgtaagtggatgattcaaaattaacgtgacttggctgggcgcagtggctcacacctgtaatcccagcactttgggaggccaagggaggcggatcacctgaggtcaggagttcgagaccagcctgatcggcatggtgaaaccccgtttctactaaaaatacaaaaattagccgggcgtggtggtgcgcgcctgtaatcccagctactcaggaggctgaggaaggagaatcacttgaacccgggaggtggaggttgcagtgagctgagatcgtgccactgcactccagcctgggcgacagagcgaaactccgtctcaaaaaaaaaaaaaaaacttaatgtgactggagttaaaagtgaaatgtcaggttgtttagtcactgaatagagagctacaagtgcttggtctttcccaagaatcaaacctgagtagaaatacatttaaaagaaaaatctacatggtacctatgaatcctgtaatttgtttagggagatcttgtcactcatccctggttcctgcccatactgtttggtctcgttcttgcagtttgcttggaacagggccagagccccacatgagattgtcagcaggagtgaggagcgccagtccctactcctcagcagggacccagcacagcaatccggttgttctcggttagactgggtcggggccaggggagaagcagtcacccctgtgtagagggttcccgctgtgcttctgagcagttgctttgttcagaagtgttaggagggtcagattgtgccataattgttattaaagagaaaacacgcccaccttcctttctcccctgctggccattgttcattgagttttactgagggcagcctttgtggaagtcagggaggttgccaaaggcctgtagatgcctcctgacaaggtcttgattcctggttttctagcacccatttgcattttggtcttcagcacaaagccttgttccctgtggccggacttctgggcaataagactggggagtgactgttgagcagtctgctgtcaggagagatggctgaaaaggtgatcatcttggtgctaaacaagtaagaggcaactgccctgtttttgtttgttttgaggcacaatgaaactttagccaaactctgcaagagggtcccatctcctgccatggccaggtgtgagagaccaaaccgagaaaacagcatactctatcacttaagccttgggtagaatgggaattctttaccctgggtaaacgttttaacaaaaaaatggaacttaacttcggtttggactgtggtcgtgctgaggcaggagtggggttgccctcttggggctgaatctccaggcctcacgaggtcccctgtggggatgctgctatttctaagatgcaaattgcacatttcctagattttgtatctgtggatttggataagggaggggaacacggacaaattgcttgtacaatttgaaatgggcctcaatggtacttcaaaccttttgattattcctaaataaaaacataaatatatttcacatctgctgacttattttgtgggggagtcaggaaaaaagccaaaaacatttcacttgttcttgcccacttctgtggatcttaaactccagtggatgagtggggcagtttccctcagctcaccagagaagttccaactcactgtcttctgcattgctgagatcaccacactggcttctacatgagaaaactatgatattttagaaattatgctaaatagacaaaggcaaacagtcaaacctggtatcatctggtgagaggacactggcaagttcttttctgtttcctgtgagagtgctgaaaagcatagcctgtcatttgctggggcggtgtcgggggttagggaatatgcataaggacccaggggctttctggaggaaaaagactaaagccccagcttctaagacccaaagcatttgaattttgttggggtggccctgaaggcctgggacagaaggaaaaagggtcctttgaaatgaaatcacctacagtggagccaggcagtgattctggacaccagaataggagtccagcttatgtcatggggaagcagctgtgtgtgttgaatcccaaaaaccaggtccttggaaactagaccaaactggcatgcaactggcaaagccaatcagctgaatgctgtagtgggtagactcaggcagtgactcacttgggatactatgggtggaattcgcaggagcggccagccaggggggttgctgtggggttcctccaggcagggaacagaatgcctagattaacccctaagcacaagtcccctgggaattactaaagtacccagagaagacaggagttgcagtctgagactgtgcttgatccatttaattaaaatgtgaagaaggcatgatcctttcattcaccgagttagtctggtgggataacctgaacctatttgctttctacccaccctcaacagaactcacatggtgagtgatgggctcaagttgaaagacaagtgagtgtctaggtccttagtgatgttcaagctctcaggtgatgttcaagatgtgcttggtcaggaggcagacccctgccttttctgctcatggccacagatactcaactgaggtcagaaactgctcctgccatcttcccgcagggcagtctttagtcctgtggcgggggcagaatgcccctgaccttgtaggctctactttgtatgtgtacatgtctgctgagccaaagctgttgaaagtgaaaggtctgtcactttgaacccagtctacttgtccctggtctgtcagccagaaggttctactggtgatggcaggagaacaaggagcctgcaagggagcccatctaccttctggtaccactgacttccctctcccggccctgcctgctcttttggtttgtgctgccaaaatcagggtttttcaacccttgttactcatttaaatcaccttgagaggttttgaacaatacctatgctaaggccccgggtaccagtatttttcagaagctccccaagtggtgctaatgtgctgttagggttgagactccacaggtcataaccctgagctgtcgcactgtagggacacggcctgcatgcatgggatggggcaaacaactcctgatgccaaagcattcggccccaagtaagggtcttccccaccaacaaacactctgccttctgggtcaatcaacatttgtcaggtctggaggaatcttgaagtgaaaatgatctttaaatttgcttgagagttggcacgttttccactaggaagaacaatcaaaacatttgcagtgaggcaaaggcaatgtcttacagagcccaagagaggtgagcctcaggtctacaaagctgccttaagaaaggcagagctgtctgttccccaggttgtgttccagaaagacacttgttcagcaaatagagatacgtattgatgaaaactaaaagggtcaacactaacaaacacgccaaggacgtcctaaccaacgtggatgggccctaacagaagggcctacacagtcctcttccttctctgataggaaacctttctctccaggccataaaaacctagagaggaaacatggatcatgagggcccaggtgaattcccacccaccaccttcttgtgtatgggaaaaagccaccctcctctctatgaactgggactgtgaagctgtaaaagaaagtcacacaagaacctgagcactatcgctgtttgatactggctatcatcagttcatgtcatccacggaaccggatctatcttaaattttttgtgtggcgtcatttttgttccatcccagcacagccaactatggaaacagagcttcaggaagagaagggcctttcaactgtgttgaaagggcccagagatttcagctgccaagtcctagaggcaatcagaatggcacctggcagtgttaacgaactgaatgcaacatttttgaaaggagaggtttctgtggaactggaaaggggctctggttgtttccagctcaccaccaaaactggctggccacaaagaacccaggcaggatgtactctgctcagacacaccctcagagggtgggcaggagagagtggacccacaactcctgttagcccagaggaggggttacagctcttgctgcttaacctgagaaatttccagaaatttcctacctgcttctactgcagaataatcatctggcgactgtttctagtgagcatgtcccatgcaacaggctttcctgagcccccgaaagagcatacaagtcaaaggaaaaaggacatgaggatgatttatttggcagtcagatcttaagagggcagcagaactagcaaatggccaaccctgagcccaaatgtgggcagtaggtttgtgtgtgctgaatgctggctatgctatgaggcacctttgcgcccacgggcctggaccccggcctctgtcctcagaggtgagggctgcctttctaaccttcccatctccatccctggatctttttaccagttagaagctgcagcaaggatggcagcttcattcagcacctaactgcctgtaccccacccacccaggagtcaggcaactcctcaatccctttttcattcctcagggaaagcatactgagtcttctttgacttaaaaacaaaaaacctcaccaaaataggctctgctatttcttctcttcccaccctggcccgccccccattcctgacagtgccttacatcacaaactaagtcctcttaacacagcaggcagcccacctgccactctcctctccaaggtttccctacaggggtgaggagcaggaggagtaaataacttagttacaataccattgagacgaaaaataatactgctatttttaacatgatcccctgtatctttcaggctgggtcatgttcccagccatgggcaatgtgcccttgtgctgtgtcctcctcctcaggcagggcagaacccttctccatgcaggccctacattcctctgccctggctccagggccaaactgcaggggcatctagcttctcaccctgcccagctgtggttttaaagctacaggacaatgtaaactttgtttccctggcccagcaaggctcctcctcctcctccactcttaggaatgtcagtagctccttggagtctcctgtgccactggctgaggcagcctctctctcc

SEQ ID NO: 1362 - DNA, 3663 bp, Homo sapiens
ggcccggagtcggttggtgcagctgcgtccccgccgctcagcagtccgcggctccggcgtcgccgccgccgccgcctctgcggggcctgcgccggccgcccgcccggccgcggggagggaggcccgcagcgcgggaagagcggcccggtcgcgggcgccgccaccgccgccgctgccaggactgaaatgcaactgcagaagcaacatgtgaccttttagagatgcttgtgggactgcataaagtgaagagggaaactggaaaaaaacaatgaaattgaatagggaaaacctgctttctgcaaacaactgaaaaagctgcatttagaaactgtttctttggccctcatcgagaagctggaacttgtattgttaggccccttatgggacaagctctcaactgctgatcacccagtgattgtcaccatggccagcaagaggaaatccaccacaccatgcatgatcccagtgaagactgtggtgttgcaagatgccagcatggaggcccagcccgctgagaccttgcctgaaggaccccagcaggatctgcccccagaagcatctgctgccagcagtgaggcagcacagaaccccagcagtactgatggctctacactggccaatgggcatcggagcactttagatggctatttatattcctgtaaatactgcgatttcagatcccatgacatgacccaatttgtgggacatatgaactcagagcacacagactttaataaagacccaacctttgtatgcagtgggtgcagttttctggcaaaaacccctgaggggctttccttgcacaatgccacatgtcactccggggaagccagctttgtgtggaacgtggccaagccagacaatcatgtggttgtggagcagagcatccctgagagcaccagcactcctgacctagcgggtgagcccagtgctgaaggggctgatggacaggcagaaatcatcattaccaaaactccaatcatgaagataatgaaaggcaaagctgaagccaaaaaaattcatacactcaaggagaatgtccctagccagcctgtgggtgaggccttaccaaagctgtcgactggagaaatggaggtgagagagggggaccattccttcatcaatggggcagttccagtcagccaggcatctgccagctctgcaaaaaacccccatgccgccaacgggcccctgataggaacagtgccagttttgccagctggcatagcacagttcctctccctccagcagcagcccccagtgcatgcccaacaccatgtccaccagccactgcccacggccaaggcccttcccaaagtgatgatccccctgagcagcattccaacgtacaatgcagccatggactctaacagcttcctgaagaactccttccacaagttcccctaccccaccaaagccgagctctgctatttgactgtggtgaccaagtatccagaagaacagctcaagatctggttcacagcccaaaggctgaagcaggggatcagctggtcccctgaggagattgaggatgcccggaaaaagatgttcaatacagtcatccagtctgtgcctcagcccacaattacggttctaaataccccactcgtcgccagtgctggcaatgtccagcatctcatccaggccgctcttccaggtcacgttgtggggcagccagagggtacaggagggggacttctggtcactcagccattgatggccaatgggttgcaagcaacaagttcccctctccccctcacggtgacatccgtccccaagcagccaggtgtggcacccattaacactgtgtgttcaaatacaacgtcagctgtgaaggtggtcaatgcggcccagtcgctcctcacggcctgccccagcataacctcccaagccttccttgatgctagcatctacaaaaataagaaatctcatgaacagctgtcagctctgaaagggagcttctgtcggaaccagttcccagggcagagcgaagttgaacatctcacaaaagtgacgggcctcagtaccagagaggtgcggaaatggttcagtgatcgtagataccactgccggaacttgaagggctccagagcgatgatacctggagatcacagttccatcatcattgactctgtgccagaggtgtccttctccccatcgtccaaggtccctgaggtaacctgcattccgacaacagccacactagcaacccacccttctgccaaacgacaatcttggcaccagactcctgacttcacaccaaccaaatacaaggagagagcccctgagcagctcagagccctggagagcagttttgcacaaaaccctcttcctcttgatgaggaactggaccgcctgagaagtgaaaccaaaatgacccgacgagaaattgatagctggttttcagagagacggaaaaaagtgaatgctgaggagaccaagaaggctgaggagaatgcctctcaggaggaagaggaggctgctgaggatgagggtggagaagaggatttggccagtgagctaagggtctctggtgaaaatggctctctggaaatgcccagcagccatatcttggcagagcgcaaagtcagccccattaaaatcaacctgaagaacctgagggtcactgaagccaatggcaggaacgagattccagggctgggtgcctgtgaccctgaggatgatgagtcaaacaaactggcagagcagctcccaggcaaagtgagctgcaaaaagactgcccagcagcggcacttgctgcggcagctctttgtccagacacagtggccaagcaaccaggactatgactccatcatggcccagacgggtctgccacggccagaggtggtgcgctggtttggagatagcaggtacgcactgaagaacggccaactcaaatggtacgaagactataagcgaggcaacttcccaccagggctactggtcattgcccctggcaaccgggagctcctgcaggactattacatgacacacaagatgctgtatgaagaggacctgcagaacctctgtgacaagacccagatgagctcccagcaggtcaagcagtggtttgctgagaaaatgggggaggagaccagagccgtggcagacacaggcagtgaggaccagggccctggtactggtgagctcacagcagttcacaaagggatgggtgacacctattcagaggtgtctgagaacagtgagtcgtgggagccccgtgtccctgaggccagctcagagccctttgacacatcgagtccccaggctggacgtcagctcgaaacagactgaatttgatctgattaatgtgaaggactggccagtctgggaaaccgcctgccacgtggaagagccaaacccgactctctgctgccacatgccgttcccatgcccggctgctgggcacctgggagagcttccagaatcctcgcagacagcccagagcctgccgctaccctcggcctgcccaccaccaagcaagcagcaagcaagatggggttctcatcagttcttcctcccacaatgtaggacctttcctttaccttccaatggataaaatagttcagagttcatagtcatattcatagacacagaatcaagcttttaacatatacatccacctctatatgttaaataaaacatcagattatcaacactgtc

SEQ ID NO: 1363 - protein, 952 aa, Homo sapiens
MASKRKSTTPCMIPVKTVVLQDASMEAQPAETLPEGPQQDLPPEASAASSEAAQNPSSTDGSTLANGHRSTLDGYKCKYCDFRSHDMTQFVGHMNSEHTDFNKDPTFVCSGCSFLAKTPEGLSLHNATCHSGEASFVWNVAKPDNHVVVEQSIPESTSTPDLAGEPSAEGADGQAEIIITKTPIMKIMKGKAEAKKIHTLKENVPSQPVGEALPKLSTGEMEVREGDHSFINGAVPVSQASASSAKNPHAANGPLIGTVPVLPAGIAQFLSLQQQPPVHAQHHVHQPLPTAKALPKVMIPLSSIPTYNAAMDSNSFLKNSFHKFPYPTKAELCYLTVVTKYPEEQLKIWFTAQRLKQGISWSPEEIEDARKKMFNTVIQSVPQPTITVLNTPLVASAGNVQHLIQAALPGHVVGQPEGTGGGLLVTQPLMANGLQATSSPLPLTVTSVPKQPGVAPINTVCSNTTSAVKVVNAAQSLLTACPSITSQAFLDASIYKNKKSHEQLSALKGSFCRNQFPGQSEVEHLTKVTGLSTREVRKWFSDRRYHCRNLKGSRAMIPGDHSSIIIDSVPEVSFSPSSKVPEVTCIPTTATLATHPSAKRQSWHQTPDFTPTKYKERAPEQLRALESSFAQNPLPLDEELDRLRSETKMTRREIDSWFSRKKVNAEETKKAEENASQEEEEAAEDEGGEEDLASELRVSGENGSLEMPSSHILAERKVSPIKINLKNLRVTEANGRNEIPGLGACDPEDDESNKLAEQLPGKVSCKKTAQQRHLLRQLFVQTQWPSNQDYDSIMAQTGLPRPEVVRWFGDSRYALKNGQLKWYEDYKRGNFPPGLLVIAPGNRELLQDYYMTHKMLYEEDLQNLCDKTQMSSQQVKQWFAEKMGEETRAVADTGSEDQGPGTGELTAVHKGMGDTYSEVSENSESWEPRVPEASSEPFDTSSPQAGRQLETD

SEQ ID NO: 1364 - DNA, 54337 bp, Mus musculus
  misc_feature (1)...(54337): n = A, C, G or T/U
gcttgccttaagatgcaggcaggttgcagcagaagagctaatgtgacttctcagatcttccattcataaagttggactggatcaaacctgcactgagcggtcacatgtgtttgcagatagcccagnnnnnnnnnnnnnnnnnnnnaactctccgtgtagaatgtatgcatacatagagtatgtatatgtatgtaccagtagaggccagaaggcattgcttctcttggaatggtatatgtgggcttgtatgagccaccagccattgatgctgggagccagactgagccatctctccagccccttatttttggtttggttttagttttttgttggtgtatgtgatcatgttctttccaccatgggttccgtgtgtctgtgtgtgtgttcgtgtttttccactgtgagttttgaagatcaaatttagattatcaggcttgtgccacaaatgcccttccctgccaagccatttttccctcccagtctcagacagacttgaagcaataaagttctaaaactttaaggtcttaatcttcagtatacactctgtgttcagccgtctttatagtcgtggtactgagtgcccagttgaaatactaccaaactcaacaagcttcacagttggtgcacaaactgttgacgcaagcagtgcacacaggtaactggccgtcttagacatgtgttagacgctgtagaaacgaagcgagaaaatgcactaaggccaggaaagaatactgagtccaaagtgtcactggctttgtgataatgggcgtgtgctatgattctgagaccacactggacttgagtaccagcttagcctaagcagcagtaaggacttcactacaagataggtgtggcaggcagtgtgcctgtaatcccagcacttgggaagtagaggcaagacgatctagaggaaggcatcctggtcatcctctgttatatagccagtacaaggccagcctgggcaagatttaatacaagaaaactccaaggtctcccctgtgtggttctccttcactctgggtcagcttcaggctatcagatattttgaaagctcctagtttctcagaatagcctgttgcgatatgtaggcttccggtgagcttgccttaagatgcaggcaggttgcagcagaagagctaatgtgacttctcagatcttccattcataaagttggactggatcaaacctgcactgagcggtcacatgtgtttgcagatagcccagtaggaggtaacccaaccattgnnnnnnnnnnnnnnnnnnnnnnnnnnnnnnnnnnnnnnnnnnnnnnnnnnnnnnnnnnnnnnnnnnnnnnnnnnnnnnnnnnnnnnnnnnnnnnnnnnnnnnnnnnnnnnnnnnnnnnnnnnnnnnnnnnnnnnnnnnnnnnnnnnnnnnnnnnnnnnnnnnnnnnnnnnnnnnnnnnnnnnnnnnnnnnnnnnnnnnnnnnnnnnnnnnnnnnnnnnnnnnnnnnnnnnnnnnnnnnnnnnnnnnnnnnnnnnnnnnnnnnnnnnnnnnnnnnnnnnnnnnnnnnnnnnnnnnnnnnnnnnnnnnnnnnnnnnnnnnnnnnnnnnnnnnnnnnnnnnnnnnntctctctctctctctctctctctctctctctctctctctctctctctctcatgtgcgtgtgtgtataaatgatttccgatgtctttataaaatctaggagcttaatcccagctcttgagacgcagaggcaggtggatttctgaattcgaggccagcctggtctacaaagtgagttccaggacagctagggctatacagagaaaccctgtctcgaaaaaccaaaaaataaattaataaataaaaagtaaaataaagtaaaatctatgagccacaatgagagaaaatgctcctctttctgaggctgtcttcataattatcataattatctttgaatccattttcttgccaatagcataaatttcttcctcatgatgactgggggaaaaaagtccccctgtgcacaccgcacagttccttagtcctcctctattgctggatgggtaggtgggttccatgaaggagttactgtggacagtgacacacaagcgcctctgtgacatgttgacttacagaaactttggccagatacccaggagtgttcgctgggtcatgaggaagacccagttttagttgtttgagaagcctccatactgtctcctcagtggcgggcctgggtagtcttctctcagtggtgtggaaggggtccctttgtccacgtgcacatcagcatttgctgtcatttgctttgatggctgccgtcttgactgggctgagattggatcttggtgtgctttggattcacatttctctgatggcactggacatttccatgttcgttggccacttgtgttttgtcctctaagaactgtctgtccaggaatccaccaaagagggaactcttggtgacagaaacgacacggcgctctccacagctcttggcttctggggggggtggggggctgcagtaggggagagagagcaagtgactgagaggccgagcgggcccggtcagtccacaaatagagaacacaaattggacatttttcttttattccttatttttatttttactttttttagggggtctcacaaggattgaggggcagactcagaaggactgggaagtgagtgtgatgggggtgcatgatgtgaattcacagagaatcgagaggaatgttgggggcagggagagcagtctgtcccggtctttgatctgggtggtttggctacttgttttgttgttgagttctatatatcaattagataccagtctgccagatgtttagctagcagatatttttttttctccaatgtgtgtgtgtgtgtgtcccttgagacttgcctgtctttgtcgcctgagttctggcatatgtcaccacacccatctcttgtccctttctgagggtcccaaccctcaacctctccagtgctgggattagacaggtgccaccatgcccagcctcctggattttattacagggaatctcaagtgtagaccaaagtcaacagtgtaataaagctatggttgccaggctctgggagagggaagccagctactggggatggggtttctccagggagatgaagttagtttaagttaagggtgatggttttacatctccaaatatgctttttgaatcagggttttgcatcataaaagagtaaatttggggcctggagagatggttccagggttaggaacactgactattcttccagaggatctgagtttgcttctcagaacccacatggttgtaattgcagttccagaggatcctgtgtcctcttctggtgtttttgggcactgcacatacatgatggacagaccaaaaaaaaagtccacatgcaaaataataaaaataaaatcttaaaggtgaattttatggtacttgagttaaatctaaataaagatttgagctagagaaagtacccaaggagctaaagggatctgcaaccctataggtggaacaacattatgaactaaccagtaccccggagctcttgactctagctgcatatgtatcaaaagatggcctagtcggccatcactggaaagagaggcccactggacacgcaaactttatatgccccagtacaggggaacaccagggccaaaaagggggagtgggtgggcaggggagtgggggtgggtggatatgggggacttttggtatagcattggaaatgtaaatgagctaaatacctaataaaaaatgggaaaaaaaagatttgagtgggtagctggggtgggtggtgggtggtggagacagggtctcattctgtagcccagacgagcctgaactcactgtttcacgctgaccttacaccatggccttacagcatgaatcctgcttcagattctcgagtgttcgtattacagctgtgaaccaccatatctgacttggtctctttattcattaaaaaaaaaagtctaaggctagagagatgatggctcagcagttaccaaagcttactattctttcagaggacccaggttggttccttagaacccacatgatggctcatgaccagctgtaattcaagccccaagggacctgacaccctcgtcctgacctccacggtcacgaggctcacatgtggtacacatacacacatgaagacaaaacactcatccatgtaaaataaaataaaataaaatgtaaacgtaaacagtctccaggcagggcgggtgaggtggctcagtggatgaaggctcatgtcaccaagcctgagcacctgagagaaacagctcctgcgtgttgtcctgtcacacacacactatggcatctgtggcaagctgttgcacactacatacacacacacacacacaccatggtgctgcaacaaaacaccatgaccaaaaagcaatgtaaggaggaaaaggtttattcagcttacacttccatattactgttcatcactaaaggaagtcaggacaggaactcacacagggcaggaacatagaagcaagagataatacagaggccatagaggggtgctgcttactggattgctcttcatggcttgttcagcctgcttccttatagaacccatgcccactcgcccaaggatggcaccaccaacaatggaatggaccctccttcatcagtaatcatcactaattaagaaaatgctttgggggctgaagagatggctcagcggttaggagctctgactgctcttccgaaggtcctgagttcaaatcccagcaaccacatggtggctcacagccatccataatgagatctgactcctccttctggagtgtctgaagacaactacagtgtacttacatataataaataaataaatcttttaaaaaaatgctttgggctggcaagatggctcagctggtaagagcactgactgctcttctgaaggtcctgagttcaaatcccagcagccacatggtggctcacaaccacctttaatgagatctgatgccctcttctggcgtgtctgaagacagctacagtgtagttatgtataataataaataaattttgggctggagcgatcagaggttctaaaaataattcaattcccaacaaccacatgaaagatcacaaccatctgtacagctacagtttacccatatacattaaaaaaaaataaatctttttttaaaaaaataaagaaaatgctttatgggtctggagaaatgacttagttgttaagaacactagataatcttttccaaaggacccaggttcaattcccagcacccacatggcagctcaccactgtctgtagcttcagtgccaggcgatgtgacaccctcacacagacaagcaggcagaaccccaatatacataaaataagaataaataatttaaaagttttttttttacaggaaagaaaatgtcttacaacccgatctttctcaattaaggttctcttttaaacaacgagtttctgtatcaagttgacataggactgtgccacacacacactaagcaaagttatatctactctgcaactctgcctagcacatctaccagacagagcttatgatcttttctgtggtcccagggatcaaacccagggtcttgcacaaactaggcacacactctactcatcagccacatcgcaggcccaatcatgaccaacctttttattattattattagatattttctttatatacatttcgaatgctatcccgaaagttccctataccctccctctgccctgctcccctacccacccactcccccttcttggccctggcattcccctgtactagggcatataaagtttgcaataccaaggggcctctcttcccagtgatggccaagtaggccatcttctgttacatatgcagctagagacacgagctctgggggtactggttagttcatattgttgttctacctacagggttgcagatcccttcagctccttgggtactttctctagcttctccattgggggccttgtgttccatcctatagatgactgtgagcatccacttctgtatttgccaggcactggcatagactcatacaagacagctataacaggatcccttcagcaaaatctttctggcatatgcaatagtgtctgggtttggtggctgattatgggataatcatgaccaatcttgattgactcaaacatccacatatttcctgaaagactgaagtaagatctcagatgcagatagataggtagatagatagacagattggtacagagaggtgtgggggggggtacacaatatatatcagacagacagggtctaagcaccatcaatcagcaccaccattacacctgaaaatgtgatgtcacattagcaaggtggtcacatccagccagtgtttgcacttccatacagatgtgtcctaacagaagctccaggggacccctttgtcatctatttccccggatgaattcagttcctcgtaagtaaagcacctatcacagtccagctactttttgagactgcgcttgatgctcagagaaacagctgccacatggcacaccaagcctgaaggctggcccagtcccaggtgactggtaggtaagcctagacctggccctgtggccctaaccaaaccataatgcgctggagtcccagcttcagtgtgtggcagcccgtcacatggtacaaatgtcagccaacaggacacagcctgccaccactatcctcctctctgctgagcattgcagagagcatgggagaccctggcagggaggactggctgccccatcactgtgaacccacagcgggacctgggggtttgaggtcactggttacccacaagctcctctctgtcctggtttcacagcttttccaggtgttaaaacaaacaacaccacaagaaagggggcggagatgggggcgggggcaggggacgaaaggagcaaaatcaagagttctgtggctagagagcattgctctagtagtgtggagagctgggcttctgatattgaagtcttatttcttcgacagtttcatgcatattcacataatgtattttgagcacacacaccccgtacacacacttatataaatatagaatctttttaaaaaatgatttccgagtattgtgtgcattttgagtgccgggaaatcctcggtggcttacaggctcacatgcagaacgggtttaaggaagcaacttcaggtgagttctgtggaggccgtgcatgaccgtgaagatgcgtgcccggtcactcttgcattcactcggatgacatctgaccaaacactcacctctgatctcttcctcctgtttccctaataagtgatggcatttgggcatggaccttgggttttggtagttttctggatatgtgtttgttagggatgttattcactctcaggaattttctcagatccccacatccatttttgcctttagaaattagtataagtaacaaatgcttttttgttgagttctgccttatttaaagcatcaacattggcagaggcttgggctataggtcagttggcagaggcttgggctataggtcagttggcagagtgcttgggctataggtcagttggcagagtgcttgggctatgggtcagttggcagaggcttgggctataggtcagttggcagagtgcttgcttgccatgctccaggtccttggtctgatacccagcaccacatacatgggtatggtgcctataatctcaacacttgggaggtgaaggccgaaggatcagaagttcaaggccatccttaactacatagaaaatgtgaggccagcctgggctacatgagactctatttcaaaacaaaggaagggctgctgggagtggtggtgcacacctttagttccagcactccagaggcagaggcaggaggatctctgcaagtgagtctaacctggtctacaaagtgagtttcaggtcagccagtaatattacacacagaaactctgtctcaaagaaagaaaaaaaaaaaaacaaaaacaagaaataagaaataaagaaagggaagaaagaaggaaggaaggaggaaagaaggaaggaagcaggcatgaggggatcacttcagtaaatatctggacttaaggtcagtggcatagcagctgaaaagatgctcaacaccgtctgtaactgcagttccagagactctgacgccttcgtcaggcatctgtggacattgcctgcacatttacagacatatgggcaaaacaccacacacgtttttttaaaaactggatgactgatggagagtggcctgctaccagggatgcctggctcggtgagcgagagcacgccttctgatctgtccctgtgcagagcagtgggctgaagctcttatgattcacaactcctctctgcagctacagcgtttcctaaaatggagctcgcactgcctctgatctgacgcaccccacccttttcagaatgtgtctctcttgtgaaaagccttctggaaattactacttcttccctgtggactttggcagggagcatgtggctgacagctacttctatttgctaagacagattcacaccgtagtccagactggcctagaactctgaggtggcccagaacagccttaaagtcgcagctgttctcctgtctcagcactgtagatgtgggggtgggagcatgcccggttctacatttgtctagagcctgttcatcctgtctagtcattgtcaccccctttcgctactgtcgcctgcagattgctgatcactggttccttaaagaccatttaaaatagagacagcattttatctgtttgcttgttttgattgcatttattttatctggggagggaagtatgcacacgagtggcagtatgcatgcagaggtcagaaagacagcttgcaggagtcctcttctcccaccgtgtaattccaataactccaacaagttttcagcttagcagctgacagcttcacccactgaaccatctcactggttcaattttttttaatttactttttttttccactttgagttcggggctggccccaaacttactttgtaagtcaggctatcattaaactcactgagattagccagcctctgctttctgggagtgctggtatcaaaggagagtgccaccgtggtctggctatggcatgctttttaaatctcacacctgggaggcaaaaataggtgggtcttggtgagtttaaggccagcctggtctacagatcgaatcccaggggagctgggaggagctgcttagaagaggggacccttatgctgaaatgaaatgaagcctaagctagttttgggtttttgttttgttttcttatttgtttgtttggtttttttggggttgtttgtttgtttgtttgtttttggttttggttttgtttgtttttttggtttttttttttttgtactccgtggctcctctctggatattgggtctgagttgagggaaactttaaacttgggaagtcgtgaggactccacttcatgagttcagagcactcgcttgacacaaagagccaagtgtggggcagtatctggtgctctcagcagcgcccgctaaaatataaccacggagaattggagtgaaggtgtagaaaacgtggggttcagagcagggcagtttactcctgttaccccagctgtcacaccgcaggggacaggaaggaagacatgctgaccctcagcggaagtccagcagctttgcttcatcatggaaatgtgttgcctcgctgggtgggaattgttccattagtcttcaagggacaagaatgcggtgtgatcctacgctgggctgctcaaagtaggaacttcaccttgtaaagcagaagggtgggttttttttttttttttttttctccttcttcttcttttgtggtttcacacagcaaaggagtgtcagcctccacttaccatgaagtgggacagcaggcatggaggcgtgggtgtggcctgaagctctggccccgcctcccccgttcctttcatttgactctctttacttgaaagaatcatctcgactgtttccatgtgttggcaaacagttccatagaatccagctcctgggaaccagccagcagcatgcagtgatattgcatcattggtccctggaaccagatatatcagcggcagaactccgaggaccctgctcacatcacagccatgagaggcaccagcatcagagagggtgcgcccaaggtgagtgactgattggggctgagtgcatgagagcaacagttgactcaactgtttttatctttgggtctctaatgaacacgaagggtaggttattagtggcaggcaggtttggaatgagaaagctttgctctttaccagttgttggtttcaagatgactggaaatgatggggtgaaatcggcaggaggcagacagcccaagcccccactgtgtgtctcttcaccactcagcaaacttcttaaacattctctctttctctgcatcctgaaggtgcttagtgtggctctcaaggattctgactggcttggggcactcacttctcttgaatagagagagcttagaccttggctctactcttgctaagtccaataaggacacccatgaactgccttcgtgttcctttgggcgctggggactggaactctggtacaaactgcaagtctgggccaggaaccaagagacggtcctatagcatatgtatagcatggcacactgctaacccaagaagggcactggagcctgagatgtgacgatggtacttgcaatacaggcataaggacctgaattcagtacccagtacccacataaaacaaaaaacaaaaaacaaaaacaaaaaaaacaggcatgaaagcgtgtacctgtaaccccagagacggcaaggaggtgacagcaaggtccctgtagttctctggccagcatccctaagacaagcaactccaactccacacacacacacacacacacacacacacacacacacacacacacacacacaaataaagtgggtgggtgatggagaaggacattgtgacatcaacttttgggtttcacacacccatactgtatgcgggggcttggggagaaggaggagagatcacaaggaaagtgaagctcacagtcgttgcttttctgtcccctcctattcttccaaatgtgatagaatggtagatacaaaagagccatgaaacagttgctaaatgggaggctgcttgccagaattaaatgttgcttgtcattgtgatagtaacaagtgttgggcgtgggatccagggctggggtctgtggcgactccttgtttagatgacttgtaaatatctgagttgagaatcttgccccacaaagcgctggggaagtgagtagttgagccagccccactaaatctttcatccaaaggcatccccgcagttccgggcagtctgtctctccggcagtctgtctctccggcatacggcctctgtctgtacatcgactgatgctacagctctgctcactgttgctgttcagcttcgtgaaaataaatagccagccctgcactcctccctcctgggctggggatgttgttccgttggcagagcacttgtctcacaggcacaaaagcccgggttttgtccccagcatgggctacacaggcctgtaacccaagatgatggggaattcaaggcatcctcagccagggccatcaacaacagcaggacatgcttcattcctgtgcgtttgacctgtatccttaccttcacataggtattatgagcccatttgaacgtcagaacagtctccaaaaacacccttgggtctgtttgtccagttcaaggcttcatctcaaggtcacactctttgccaggtcttgtccttaatctggaataacccatttcctatttgtctctcacaactttgtcggctctgtttgttttgtttctgctgagatgcttttaagatctgaaacttggcaccactcatttctgcacgttttatatgtcatagtataatctgtaagcgcatatgtattgtccgggcaatgatgcacagcccgcttgtctgtttggtgcaaggcccaataactaaccgtcactcactgcgtgtgcaccaggtgctccatggagcacccaactagtcctcactcccttagtgtgtggactccgtttgcagccttcccatgagacaggtcttctcagcctcatcttgcatatgaagaaacccccccgacccccatgggcaatcagcggccctgcctaagcagagcaagaagaagacatctggctaccccccccccgccccccactgtggtctcaccatagccatggggtcagtgaactgcatcaacaaagagccatctcatgctggaggggggagggagaggaagaggggcgtggcttggactttcagctccagggaggctggaggcaggggttggggtgtgaggggtgttgctgccacttcaaggccagcttgagccacatagaccctgcctcaagaaacaaacgaaaagccaggcgctgcttctcacttggcagggcccaggtcatgtctgttgtgcctcgccctgtttctaggactctttaaaatacggattctttctgacctcaccgatgccatccagctctggtgctctaatctcagctcatgcaagacacccctttccagtaagatggtgcctgaggggacccctccctgagtagggtccagtcttcatctcccaggccaaggagcctccatctgattattcactccatttttttgagtgtctgtgtggatgtatttctccccttcccttcctgggtctcactagttagcccaggctggcctcaaactcttggagatctatctgcctctacagtgctggaatggaaggtgtgctcatcacgctatgtttggcgagttattttctcacataaatgagcaggagcagtgagtgcggggccttctgggcttgtactgtttagaatgtaatcagcatgtaatagaatacaatcattagtcaacatgtcatgtataatatagtcagcatacagtgtgatatagtcagcactatgccttagattgcactgacacagttgatctgccagttgatttgttaaccaactgccctcgttaatgtggtgcctcactgttctgttttttaagtgacattgtatttttttcatgtgtctgtacatgtctggaggatggaggtgaatgccatggcatgtgtgtagtcaaaggaggacagttttgccagaatcagttctctccttccaccaggtgggtcccagggattgaacttgggacatgagccttggtagcgggagcctttcaccactgagctatttcaccaccttcatctgcttcctaagcaggagcaccgtgtgtgagcaggctattcagggaagcagttctctttttcttcttctttttttattatttttattagatattttcttcattgacatttcaaatgctatccccaaagccctctataccctccccctgccctgctccctaacccacccactcctgcttcctggccctggcattcccctgtactggggcatatgatcttcgcaataccaagggcctctcctcccattgatggctgactacaccatcctctgctacatacgcaactagagacactctggggggtacaggttagttcatattgttgttcctcctatagggttgtagacccctatagctccttgggtactttctctagctccttcattaggggccctgtgttccatccaatagatgactgtgagcatccccttctgtatttgccaggcattgtcatagactcagaagagagagctatgtcagggtactgtcagcaaaagctttctggcacatgcaatagtgtctgggtttggtggttgtatatggcatggatccccgggcgggggcagtctctggatggtcgttccttccatctcagctccaaactttgtctctgtaactccttccatgggtattttgttccccattctaagaaggagcaaagtatcccacactttggtcttccttcttcttgagtttcatgtgttttgcaaattgtatcttggaatattctaagtttctgggctaatatctgcttatcagtgagtgcatatcatgtgtgttcttttgcgattgggttacctcactcaggatgatgccctccagatgcagtcctcttctttggtgcatttaacttcaaagctcttcactaccatccaaggccacttacccacctggatgccaagttcagatttgtcctctagcagttaaacgagctgtgcttttgctcctgctgtggctgcctggttgctttataaaacaagagggaacactttaaattacgtgtgatattagcaataggaaatgttggtgacctcagcatttaacagacccagcagagggaagtcatgtacaccgccctgcaatgagcctgtcatctccttcattggcctactggctggctgacctccgctgaggaagtgctaaaaatggctccgcaggtagaaggtgcttgccaccaagcctgtggatccgagttagatcccaggacatagagggatcctaggacatgcaggacaaaggagaacactgactcctgtgagttgtcctctgagctccacatgtgtgctgtggtgcatgcccatgcatgtgcacaccccccacacacacacacacacacacactaaatacatagacagatggatggacagacagataataagctgcttaaagaagcgctagaaacttgttctaaaggacagaaggagctgccgttgtgcacttggaagttagaggcagggggatcttgtgtttgagaccagcatctgcctcagagaagagcctgtttcaaaggaggaagaaagggaaatcagtagtttattagatatgagtttttattttgacttcttgatgtctttaatgctgtcttgtctgggcagcatagggagcagcctgtgatctcagagctagggaaggagagacaggaggatcaggagttcaaagccagtgtgagctgcatgagatgccgtcttccctatctgcaaagactgctgtgtgctcacgggtctccagaagggcttctcagagcatcgttacaatcttacccaaagtgatgggccctaaattcacctttagaaacatctaccttcggaacatcagggattcccgtctcagaggcagcagccccctctccctctccactctcaagaagtcggagcaaagacttagtatgaaaacagtcttcaaggctcctctctcttctcctatcctgcaacctatcacatgggtccccccccccatcagccccaccttggatctgtgagtctctatctaaccacaccccagatcccccactacctcacgcattcccgtcattttcttgcccatcttgtctttacacagcaggactagacattgtctgggcttgcttggttcatggctggtgtgtttctctctggaaagacattgggggttgcaggggatacaatatgacacgacacacaatgtttgacttgcttacagtgctaaaggtacttccagcagtgcgtgtatacagcaggtactaagtaaatgcctcctgtcatgtgtgaacaggcagttacagagaagcagacacaacccttgcaacacagtcgcaccgcaaagacaggggcagcacttcctagttcttagtcgtcaggtatctgggaacagaggtcaccctgcactctcagctctctagcctgaacaccacttgacctggattcttgagaagtggcccctcctcctgtggtcacattaaaattcgaattgttaagtttaaagtcagggtcacaaggaccttctctctgagtttgccagcatggtcggtccctctatcacctcgtgaggtgaaattgtgcaagcacaggacccaacaagaacacccaagcaagtgtcttcattgtttaccctttcaccccacatggaggctctggattgtaggagttctggcgtgtgaggcctgggctgatactacagttggatcagagcaacagacggtaaatgcacacagtgacttcaggtatagcaaggtgacctgacaggggatggacgcagagagtcaccgtggagatgcagtgccaggcaagggaaagagcatgtgcaaaggccctacatggggactgagtcccaggagtggccacggtaaacaaatggagggactgtctggagaagaggccggggtgggggaggggtcagtggagtaacgagcctcatctgctgtgtcaggacttcagtgtaagaaaggaaactactcacctacatcggggcgggcgggagagcggatgacaccctgtgatagatgtttgaaaacattacttgggttgctatgcaacagaaacggagtgaggaagaactgaagcctagagatgagctagaaaactcaaggccaagggttttcacttccactctggataaaagcatccggtgcccattgtcctagagaggagtgcattttctctgaacttagtgggcagggggaggggctactgttgagggcacgagcaggagacaaggggcccttcattcattcattccatacacaccgagtgttcattccatacataccgagggtggcccttcattcattctatgcacactgagcgagcgcctactgtgtggcaggcactgttctaagtgccacaaaggaacaagtgtccgctcctcctcactatgtgtgtatttatttattcagagccaggctctccccgtggatccctggctggcctggaacttgctgtgtagaccaagcagagcttgagctaggagacaggccagcatctgcctcctgagtactggggctaaaggtgtgcaccaccaaaccagctctctcattatttcattgacagttctcattcacttataaaatctaccactctctcgctgtctgttctcttgttgaataaaggcccttctccttcgcacatcttatttcctatagaagacattttatttaaaagaaagaaagaaagaaagaaagaaagaaagagagagagagagagagaaggaaggaaggaaggaaggaaggaaagaaagaaagaaagaaagaaagaaagaaagaaagaaaaagagaggagagagagaaaggaaggaaggaaggaagaaagaaagaaagaaagaaagaaagaaagaaagaaagaaagaaaggaaggaagaaaggaagaaagaaaggaagaaaggaagaaagaaaggaaggaagaagaggggaggggaggagaggagnnnnnnnnnnnnnnnnnnnnnnnnnnnnnnnnnnnnnnnnnnnnnnnnnnnnnnnnnnnnnnnnnnnnnnnnnnnnnnnnnnnnnnnnnnnnnnnnnnnnnnnnnnnnnnnnnnnnnnnnnnnnnnnnnnnnnnnnnnnnnnnnnnnnnnnnnnnnnnnnnnnnnnnnnnnnnnnnnnnnnnnnnnnnnnnnnnnnnnnnnnnnnnnnnnnnnnnnnnnnnnnnnnnnnnnnnnnnnnnnnnnnnnnnnnnnnnnnnnnnnnnnnnnnnnnnnnnnnnnnnnnnnnnnnnnnnnnnnnnaaaaagaaagagagaaataggaaaagaccacaatcgtggctcttgagacatgggctagcgtcggaaagttcaaaagaaagtgatcacaggctgacggagtcaagagaaatagggaagcggccgtggaaatgcagtgcagtcatcttgagcagtggtgagtaagaggggaaatgacagcggcccagaggggaaatcactcagaaaaggaggaaggtggaggctgctaagaaagctgcctctgaggaggaggccactctccaacatgagttgcaaaaaaggggaactacagtttctttgtttttttgttttttcttactcatgagccatgtactcagcccagagttttgctgtgagctcagcacgttggagcctaggtgtgtgctgtgcctggacagcagctttggctccaagcctcccacaggagcagctgcagccccaagctgctcctgacactcagagagccttcctctgtgggctcacagggggcaaaatgcaaactgttgtgctcttcatttccgttaaattttgactgaaagggtgtgtgtgtgtgtgtgtgtgtgtgtgtgtgtgtgcaccacggcccacgcgaatggagttcagaggacaatttccaggaatcggtcttgccttgtgccacgtaggtcctgaaggttgaatgcaagtcatcaggtttgatggcaggtgcctttctacacagagccctctccctggctcaggagtggtgctggtcatttgcacacgtaactatcggccaggctgcttgtctgcttcttgtagggggacagaagtggagaaggaagcacggggtctctactcccagagatgaggtgcctgccacctggttaatgagaacaaagtattgtgtggaatgtttgccccaggttcagaatttaggctcacctcagctgaaagagacataaaaacccaggccggtcgctaaagtctcatatctctgggctactctcttttcctgtggatgcttcctagggtaagagatcaaaagccactgaaaaaatgactagcaaggaccaggccggtggaatgagccacccgttagcctgggctgagttgatctgtatcgaacccagttaccaggcatgagtgagtgcatgctagcagaagagctgccacagtaaggtccctcacctatgtctctggtaggccagatggcttttaggtgcggcacacaagtagtacttaacatacctttgtaaagtacatataatttacatttcattaatatacttcagggggaaactagctcattaaatctgtacttttgtttttttgtttttttgagaagggggcttctctgtataacagagtcctggctgtcgtggactcactctgtagaccaggctggcctgggactcacagagatccacctgcctctgtctccttaagtgctaggattaaaggtgtgtatcatcacttccacccccagatcccaccaattatcattacacatcaatcacagagtgggggtggcgatgtctgtggaggagcagtgggggggtaagggggggctccacagctctgctccctcctgggtttctcttaggccacagcacggagaatgagtcactccgtgctcactccatggcctgtgaggaagcattcatgggcatggtggcttccaacatgtatgagtctgaggcaggaggattgccaccaaaacgagcacaaggttgggatgtgcttcagagcaggccagttggggctacacagtaagaccatgcctcaaacaatgacaacaaaccctgagcttagaccaggagccccgagtacctgtttctacacacacacacacacacacacacacacacacacacacacacacacacgacagataaaaagaagcttgttccagggagtgggcaagacccatccccactgggaacccagggatcaggttttagggaagaaaatcattctagtagtggttttggaatttttctatggccacagcctcttcctcatagaaggtgctgccttctacaattgtagaagacactgtacatgcgtggcttttccattcgagccagccggaagaaatggccaccagatgggtaggcattccctcccaccatgcagatgtcaccttaagtctgggcttatgccatcagcgatcaggtttcccctttcctcatcaacgcggcctcattgtcgtgtccactggcttcattcccttctttgtcgctggtgcctctggataaggtggccaccatggctgtctgcatccaaaggaagtgcaggaaatgcagggaaggtccatgggaagctgtgcccagacccctccgaagttttggtttctgtccagaaagacaggccagagcaggggctggagagccccatcaggcacacctcctctgcactaaggctctgcagagagtgaggggtcttaaacagtgatctccactggtcttgcctcatgaggaggctgtagggtgactgactgcctctgtgtccatagaggaccgagatgaaggtgaacgaccctcttgtctgatgccctttcctgactgctcccggaagggtaatcatagtttccaaaagaatgataccttggggaagcaggcttggaaacaaaagtagagagtctatattttattttaaagctcctttctgtgtatctgggaaagtgtgtgaacatccagaatcttgggctgaaaaaacgagaattgctacaagcttagagccagcctgggctacacagcaagcaccaggctagcctaggctacctaacaagggcctgggggcaaaaacaaaccaaaaggtgacatattgcccaattttttaaggacttaaatgtcacattgcataaaaagaaatcagggagggagggacccagtagcagcctttcaaatatgtggcaccaggtcactttctgcacactctagagactgtctggaatctccagcttacccccccgacagctgttcttcttcagccttcagctactttgcactgtttccgtaagcacagcagggaccgcagtctctccagtctctagatctaggatgctacaagaagtcacttgatcgctacctcatttaaacatctcaaatccccttgctgatggaattcgggatagagagaagctgtctaggagaggggtgggcagcattactacatagaacatctgggtatggttcgattctgagggcaagttctgggcatgaaacaggaagcctttttgctactctcaatgactctctcggctccctgtaactcatggaattttactttagtgaaaatacagctgtggaaagattctaaggggaaagtgacagttaaaaagtggcttcatggcgggcatatgacttcatgatgggtgaagaaagtgggcacgtgactccattcgatggtgtcatgaatgtcactgtgtcccgtcgtggcagaccttcctgccagctaagccacctcccctgctggatctttgtgcacaggacccagagcaccatgcatctggttgtgggggagggggtggggcagcctccttggttacttagagactcatccacccttccctgacttgcctgagctgggagtctcttccagcgttaaggatttgaatatccgcacatctgcaactgtattctgttgactttagcaggttagggtctcctgtcttctctctgcgccttcactatgagcctgtccttgagcctccggagcgaacagtctcaaaagtctcaaaatccagtggctcttaggggtcgaagcagcagctcagtggtaatgagatcaccaggccagcaggagaacagagttcagatcccctgatccactaaacagccaacccgaatctaaaatcccaggggtaaggggttgagggggcagagacaggaggattcttagggcttgctggctggccagtctagttgcttcagtgagctccacattccatgagagaccctaactcaaaaaaataaggtggagtgtctttggagactctgaggaggatgtctgacctccacgtacatgtgaagactttctgtcccttgctggtaaattacaggcaaatgctgttagataacacctagcagtaggaaaaaggctgtgtggtgtggtgagtttcacagaatcttggtgctgcagcttctcggagcacctgaccatcatgtcctctgtctggatgtctgtcacctcacatcagaagtggcaccccaggagagtgtcactcagactctctgcttcttcctccgggcctccccctccttcccttttcagagagtgtgggtggggagcttagaggtggtcagggggtttttatcttgctcttggaaacttttctttctttttttctaaacataatatactttgttttgttttaaaggatggaaagtgaggattctcagtccagtggctagaaagaccatctgctcagctttggtcattcctagctgagctctgcatccagacaatccagactgtcctcaagcttagcttcctcataaagctgtggagtttggggctggagagatggctcagtggttaagaggcactggctagttcttttccaaaggacccaggttcaaatcccaccacccgtgtggcagttctacaactgtctctaattccagctccagggtatagcacaccctcctacagacatacatggaggcaaaatacccatgtaaataaaatttaaaataaaagatatatagcaggctctgtgggaggcctcctccatgtcccatatatccactgacttcccacgtgcacggtctatgtgttcttttacactttgatttattgttagggtgtgtatttggtgttaggtggtgcatttgtgccatggtttgggtgtggagggcagacagcaactctgtagagtgggttccctcccttgtgttggtttcagggctcaaactagcatcctcaggcttgcacataaagcactgccacccattgagccgtctcactggccagtgttgctttcttatcgtgtgtgtgtgtgtgtgtctgtgtgtctgtgtatcattgtctgtatgtttgtgtctgtgtgttttgcctgtgtatacgtgtgtgtaccacatatgtgcccagtgcccatggaagtcagaggagggtgctggatcccctggtactggagttaccaatgtgagggagccaccacgtgggtgctggggattgaacctgtggacctctggaagagcagccattgctcttaactgctgaaccatctctccagccctgtagtgtattttctttttaagtgtagtttccatgtaaccatccttttgtgggcctcagaagggaagtgagtctttcaccttccctaaaaactaagaattcttgaaaatgagccacagacactgtaaggccggaaggctgcagtgttcagcgtggctgcgtgtcaaaactatagttcagagaggtccaaggccaccctgccctgctggcccttccaccccacagggtctgccacctatgtccctggcttcagcggaagccattgcttgtccccagctgtgaacttgtttattttagaagcaaaggagtttggttggggaaaggggagtttgtgaaagataaaaggagcaggaagcagggttggacagcatcaagctcactgacccctgatgtggaaagaggaaggaaagaaaaagagaagggtccaaaatagctggacactcggggacttctgggatactgccttgggcacaggtgctcacacccagtggttgtggactttcaccttccaagagaagcagggtgagacttttaaacccagccgtgggtgtgaggtaccgctaactgcttccctccttggtgctattgtcttcttattcattattattattattattattattattattattattattactgtgtaaatgtgtgtgatgtatatgatgtatgtgcatgatgtatataatatgtatctgtatgcatgacatatatgatgtgtgtgtgcgtgatatatatgatgtgtgtgtgtgcatgatatatatgatgtatgtgtatgtgtgatgtatatggtgtgtgtgcatgatatatatgatgtgtgtgcatgcatgatgtatatgatatgtgcatgtgtgatgtatatgatgtgtgtatatgtgtgatatataatgtgcatctgtatgcatgatctatataatgtgtacatgcatgatgtatatgatgtgtgcatgcatgtgtgatgtatatggtgtgtgtggatgatgtatatgatgtgtgtgtatgcagatatatatgatgtgtgcatgtgtgatgtatatggtatgtgatgtatacgtgcctatacatgatgtatatgatgtgtgtgtgtatgcagatatatatgatgtgtgcatgtgtgatgtatatggtatgtgatgtacacgtgtctatacatgatgtatatgatgtgtgtgtgtatgcatgatgtatataatatgtgtgtatgcatatggaggtcagaaggcttctgtagtgtcagctctcttcttccacttttgtgtgagctctggggatcaaacataggccaccaggcttgcttggcaagcatcactacctgctgggccatctccacagtctgctacttctctcagtttttccttctctctggcttggtcagccagagagcaaagtgactctttaaagccagcctgtgcatgccacagccaacacctcacccacatgtgtcatagctgctgcacccacagagtgatttcctgcccagaccctacctggcatctctgtgcttcagtgttgcttcagtgctaggctgcagcccaggcttgcaggcaccaggcagcttctgccagagagtcgcaccccagcctatgccattcttaaaccagttcatttgagatttgaactcatttagcaaattcgacttaagctgagggaacagactatggagatgggacaatgacagcccaaggtgatgggcccagatctgagtgaaccccgaggcactgtctctgctgggtgaccttgggtacagaagtccctaaagctcccctgctcagaagtgccccagaacttttagaatgaagctaaccaagcaaacatccagacccctccaggtctgacacttagctttctgcatttttccctgttccataaacaggaaaaattaaaatcaaaggtgcagctgagggactggctcctctcgtgtgggaactgtgcccatccagcctgcagagcagattccggcttaggcacagggaaaacacagatgctgggatggagctgtggttgctgctggtcctgcttagagctagggcaggctactgctgcgcttctcttgctggaggtaggatggtgtggccctgtcagctcccccagcgtgagccccctgcctctgtgaggcccacttccaggggacccagcacttctgcacctttcctgcagccatgggaaagtaggctacacccatttgtggcctccagcagcccattcgccttgaactccacaagtccactttccccagactacaaataatagccgttgcttaaatttttaatcccatttcggggtttcttctccgcctttggtcatttggttcccagataaaagacacacaactcttattatttacaataagccttaaactgcagaagagctgggcagatatctaccctctatgctattaaaatttagttttctattgataaccccaagttattacttctatgttttatctgggctgctcttaactcctactagccaaccctcagggccacattttcatgacttgcctaaccttcttctccctccgtggttctcatcccacccccacccctcactcccatctcccgaaagccccaaatcctaaaccccacctatgtctcttttgcccagctattgggtgttggcatctttatttatgaataggtcacttggatctacatacaaaatcttttgtctctgagaccacgaaggctcgccccccctccccgcccccgcacttaacgttacagtatgcaacaaaagaccaaacctcaataattagccacatcagaaatcagaatcctggcgactgtgtaaggccacacagctgcttgtttcccagcgcctgtgactcctccattcactcaccctcacacccttgcctggggtttcccacatctctcctcctctgctgacaggctcctctcaacaccttccctctgactaagtcctcacccccagatagtcactgtcccaggaaactttccctcagtcctctcctaccacagcttccccacagcaggcatggcttcttaaaatttcccatattgtcttttctgtcccactcaaaaagcctcttgtcttcttctgtgaactcaatgttcacttctgtggaggttgaatagtaacaagccttatgcataagaaagtccattatatagattaggaactgtcatgcttactatggtgcctttagggagctcctggcaggggcacattcatatttgtgtcctggtgagtgagtggatggatataaatggatggatgggtgggtgggtgggtgggtnnnnnnnnnnnnnnnnnnnnnnnnnnnnnnnnnnnnnnnnnnnnnnnnngtgggtgggtgggtgggtagatggctggatggatgaaatatgcatggatggatgggtggatgggtgtggatggatggatgaagaatgggtggatggatggatgaatggatggatgatggatggatgggttgatggtggatggatgaatgaatggatggatggatgatggatggatgggtggatggatgggtagatgaagtatgaatggatgggtgggcaaaggatggcatgaatgggtggatgggtgggtgggtgggtgggtagatgggtggatgaaatatgcatggatggatgaagaatgggtagatgggtgaatgggtggatggatgggtgggtggatgaatggatgatggatggatggatggatggatggatgggtgggtggatgaatggatagatgatgggtagatgatgattggatgatggatggatggttggatgggttgatggatgggtagtggatgactttccagatatctccagctgaatagagtttgcatactgatttttgcaggtgcacaaggtaccccttgccaccagctcactcctgttctttgtccttaaggctataatctgccttacagaaacctattcctctctcctccttttcctgactgttttattgagataagtatgtgcaaatgtggccatggaaacatctatctgagagtgagggcttggtcagatgaagggtgaggaggaggcctgcctgcagaggaagaaacaagtgtgagggtccaggggagggcttgaggatgtgtgagcagggaagtcggagggagggactgaaaggtgagcagtgggcaggagaccagacacttctcccacgttagctgtggtgacacacatctgtagccccagaatgtaggggttagagacaggagcactagaagttcagctatttagggaatgtagaccagtgtacctatacgagatcctgtccaaaccataggacctgtagagatgactcagaggttaagagcactggttggtctcccagaggaccagggtttaattccaagcacccacatggtggctcacagctgtctgtaactccagtttaaggaaatacgaggtcctttcctggtttcctcagataccacgcatatacatggtgcacagctatgcatgcaagtaaaatagccacatatacgaaataacataaaaataaagataagtaaagaataannnnnnnnnnnnnnnnnnnnnnnnnnnnnnnnnnnnnnnnnnnnnnnnnnnnnnnnnnnnnnnnnnnnnnnnnnnnnnnnnnnnnnnnnnnnnnnnnnnnnnnnnnnnnnnnnnnnnnnnnnnnnnnnnnnnnnnnnnnnnnnnnnnnnnnnnnnnnnnnnnnnnnnnnnnnnnnnnnnnnnnnnnnnnnnnnnnnnnnnnnnnnnnnnnnnnnnnnnnnnnnnnnnnnnnnnnnnnnnnnnnnnnnnnnnnnnnnnnnnnnnnnnnnnnnnnnnnnnnnnnnnnnnnnnnnnnnnnnnnnnnnnnnnnnnnnnnnnnnnnnnnnnnnnnnnnnnnnnnnnnnnnnnnnnnnnnnnnnnnnnnnnnnnnnnnnnnnnnnnnnnnnnnnnnnnnnnnnnnnnnnnnnnnnnnnnnnnnnnnnnnnnnnnnnnnnnnnnnnnnnnnnnnnnnnnnnnnnnnnnnnnnnnnnnnnnnnnnnnnnnnnnnnnnnnnnnnnnnnnnnnnnnnnnnnnnnnnnnnnnnnnnnnnnnnnnnnnnnnnnnnnnnnnnnnnnnnnnnnnnnnnnnnnnnnnnnnnnnnnnnnnnnnnnnnnnnnnnnnnnnnnnnnnnnnnnnnnnnnnnnnnnnnnnnnnnnnnnnnnnnnnnnnnnnnnnnnnnnnnnnnnnnnnnnnnnnnnnnnnnnnnnnnnnnnnnnnnnnnnnnnnnnnnnnnncaggatcagcaggcctgagggtggaccgtggggcctcaaagccaccggggggcttagctggtatcctaatgcagttgtgagcaattccagtttttagacagacttagatgtgtgtcacacacacacacacacacacacacacacacacaagtcttatattattcttgctggagaccaagaagggatatgtgagtcaaagatagatggggagcaaccccaagagcccgagggactttgaacaggttattagacctcgctgatcctctattttcttacctgtaaaatgaagatattctgaacatctgaaatattctgggagtttgtgatgtaaaatgtctgagcactcaacttaaaaaccaagtctcatcccatataattcactctgttctgagaattcccatgtggggttcgctcctcttctgctgttgctgttgcagtgtttggtttggtttgaccttttgagaccaggttttctataggccaggatgaccttgaactcccagcttccacctcctaaagcttgaatccattacaggaaccgggccaccttgcctgattccttcttcttgtgtaacaaaccggaattgtctctcttattaaaacttggtgacctacactaggggaatttttgttgcttacccagcagacgtgaagccctaggttccatccccagtacttcaattaattaattaattatctaattaattcatactttgattaattacttggctattaattggttaattattaattagacacttaattagttgttttattaattggggaatcataataattgcctgtttaatgttccaaaggcactctgtgctatttataaagaactactatacagaagggactcattctgtgacacactcacttagaggttacttttgcttttcaagacgtggccaggcggcaggcaggcaggcaggcagtcggaggaaaccaaccaaccgtatctcaggaatgaggcagctgctggtgatccagcacagctgtgggtgccctgaggggcagatgtttcctggcttggatgatcctaaagatccattgctctctggaaatgcccctcctccccagaagaagccacagctgctgggacagtgtgacactcacggggaaccagatagatgctgcacgcttcagtggcaagcctcccttcaaacgcactttgagtagatttcacaagagtggtgaagggtgaaagccagcgtttgcttttcattttcccaaaataaatagttaagttgcaattttcttctttccctccccctcttccttctcnnnnnnnnnnnnnnnnnnnnnnnnnnnnnnnnnnnnnnnnnnnnnnnnnnnnnnnnnnnnnnnnnnnnnnnnnnnnnnnnnnnnnnnnnnnnnnnnnnnnnnnnnnnnnnnnnnnnnnnnnnnnnnnnnnnnnnnnnnnnnnnnnnnnnnnnnnnnnnnnnnnnnnnnnnnnnnnnnnnnnnnnnnnnnnnnnnnnnnnnnnnnnnnnnnnnnnnnnnnnnnnnnnnnnnnnnnnnnnnnnnnnnnnnnnnnnnnnnnnnnnnnnnnnnnnnnnnnnnnnnnnnnnnnnnnnnnnnnnnnnnnnnnnnnnnnnnnnnnnnnnnnnnnnnnnnnnnnnnnnnnnnnnnnnnnnnnnnnnnnnnnnnnnnnnnnnnnnnnnnnnnnnnnnnnnnnnnnnnnnnnnnnnnnnnnnnnnnnnnnnnnnnnnnnnnnnnnnnnnnnnnnnnnnnnnnnnnnnnnnnnnnnnnnnnnnnnnnnnnnnnnnnnnnnnnnnnnnnnnnnnnnnnnnnnnnnnnnnnnnnnnnnnnnnnnnnnnnnnnnnnnnnnnnnnnnnnnnnnnnnnnnnnnnnnnnnnnnnnnnnnnnnnnnnnnnnnnnnnnnnnnnnnnnnnnnnnnnnnnnnnnnnnnnnnnnnnnnnnnnnnnnnnnnnnnnnnnnnnnnnnnnnnnnnnnnnnnnnnnnnnnnnnnnnnnnnnnnnnnnnnnnnnnnnnnnnnnnnnnnnnnnnnnnnnnnnnnnnnnnnnnnnnnnnnnnnnnnnnnnnnnnnnnnnnnnnnnnnnnnnnnnnnnnnnnnnnnnnnnnnnnnnnnnnnnnnnnnnnnnnnnnnnnnnnnnnnnnnnnnnnnnctgctctcgtgggagacagtcagagggatggttgtcctctgtgagttagagacagacatgggaagatcctaaacaggctagaagaaccagtttggtttgcagggtggcatcaaagaacactttttctcaggaagtggcattcgtgaagagtctagaagcgagcgtggaatttcaatgggtgaaaagctgctggtgtgtttgggggtggaggggagagcatgggcaggaccgaaatcctcagccagagagaccatggaaggctggtggggaagtatgggagatagaaaaccacagagggccaggaagcttctgaactccaagagtgcctaggcactgaaggatggttgggggcggggagggggcagggtcagtgccacgtgacagcagcattaggtaaatgtttgctgaccatctggaggaagatgtgttaacatatggaaagggtagtccgagctgcaggagtgccagttctcaataggaaagtccctgtgtttgtggttcaccatgggggccaggggaaatctctgcagccatgctgtgactctgcaggactcatcacctgtctggaccaataaactcttccagacaggtagggtgggcagggaggtgacccacttcccaagatgaatagaagccacccacccactcacagggcagtttggacagtctaagtatttccaagaataggttaagagggaacaaaacacccatagaaggagttacagagacaaagtttggagctgagacgaaaggatggaccatctagagactgccacaccccgggatccatcccataatcagcttccaaacgctaacaccattgcatacgccagcaagattttgctgaaagaaccctgatatagctgtctcttgggaggctatgctggtgcctggcaaacacagaagtggatgctcacagtcagctattggatggaacacagggcccccaatggaggagctagagaaagtatccaaggagctgaaggggtctgcaaccctataggtggaacaacaatatgaactaaccagtacctccagagctcgtatctctagctgcatatgtagcagaagatggcctagtcggccatcattgggaggagaggccccttggtcttgcaaactttatctgcctcagtacaggggaatgccagggccaagaagtgggagtgggtggataggggagtgtgggggggatatggggacttttgggatagcatttgaaatctaaatgaagaaaatacctaattaaaaaaaaaaaagatgcttcaaaagggaacagatatgactcagcaactaggtgggccggctgctctttcagaggacctgaatttggttcctagcacccattggacagctaacacctgtccctgcctcttggatgacccttagacacttcacacacacacacacacgcacacacacacacacacacacacacacgcacgcatgcgcgtgcaaaatgtttttgtaaagctaaaatttaaagtatttttggcaaacacactaaaaaagcatgtcccagacatgctcttcagggaagggacagtgaagacggatgcaaactttgtcacggtgctgtcaccttgtcccctcccacagcagtactcagtatgtgcctaccacaggcgaggcacacactctaccacttattgctattttttagacagggctcactaagtggtccagacagatcttgaactctcaatcctcctgcctcagctttccgagtgctagaactgcaggtgtgagccactagctaagagacatcccttaagcttctcctgtatgcccgtgcccgaggcagatgctagagacagagtaatagataaacaaaatgtatttatttcatgtgcgtgtatataatacatgtgtttgcaaagcacattaataataaataataaataggtaatttaataataggtaattctagtaataataggtaacactactcttctcatttcatccataaggaaatgggctcagacagggtagataatgtactcaagggtacacagctaagaatttcaatctaaaggtggtatacacaggacacagcatgtgacatcatgcagcaggcaagcacgaaactccaaggagcatagcccctttaataaacaggactttggctgaaatgtgtgtcataaaacacacctgcgtgtaaccacgagggtcatactgtctgagaatttaagaaagggcttattagggccactcagcttgggtttggggttgcaggcaaagcaccccagaggatgtggcatcaccagaaaccctgaggatgggaagtctcagccaggaaaagagcagggtcagagcctctggggagggtgagaacacagcttggagacttgtgctgcagtttcttggtggcctggtgcagccatgggcaataataggacagcctcggccaaggactctaacagcgcgttctctcctccagaccctgttggccagggcactctacgacaaccatgctgattgctccgacgagcttgctttctccagaggggacatcctgaccatcgtggaacaaaatgtgccagaaagcgagggctggtggaggtgtctgctccacgggaggcaaggcctggctccagccaaccgcctccaagtcctcagagagacccctgcagacagaccctgtcccctgctcccgagaggcccagacacagatctcaccagctccggggagccttaccaggtgcaggacttgatctccccgccaccccagggacctgtgtatgaaccaatgaggagctgggtggaggggccgtcaccagcgactgcccaagtctacgaattgcctgagtcaccttccagtgccaggatcatctgtgaaaagacgctgagcttccccaagcaggtgagtgttgtctccggatgaaagcatgggtaaagggtactgggatacccaggggcttcactacactgcagtcatcaccattgcatcagattaaatgtgcaaagcaggacctcagagccctactgagcatgcccaagacccagccccacttcatgcacacgcttagcatccccgtgactgcccggctcaccaagactgaccaacctgtgccatcagttgaaggtgtgtgcaggagtttgttggctattcacaggaccccacgtcacagagagcgctggagacaaggggaacaagggatggcttaattcacaccatgttaaggccagggcatcactcataacgttcaagactcgcatctgcctcccccagacaattaacttctagaattgttacagaaacatgcaagagggtcaaatagagatcagaagggggttggaagtgaccacattggtgctagggaaaacccacaggtccccaagtgtttgcaggggagagtgttgggtacagacattttgaaagatttttttttcccctccatttacttatttgggacctgagcatgcctgggtcactgcacatttgcgcaaaccggaagacactctcaggtgttggttctctccttccttcatgcgcaggtcccagggacaggcagggtggcatgtgcttttctctgctaattcattcctaccccaacccccaaactttgtcccagaaaaatcatcttttgtccctgtcatcatggtgagcttaattcacacagggataagaaatgtttctatgtggttgttctaaaaaggaagacagaatcctttaatgaaggattaaaccttggtgtgtgtgtgtgtgtgtgtgtgtgtgtatgtatgttcttgtatgcagatgaacacatggactggaaagacctagaagaacccacacaggtagttctcctcaggaagtagaattgagtaaggagaaaattaaataagagagtggctgggcatggtggcgcgcgcctttaatcccagcactcgggaggcagaggaaggcagatttctgagtttgaggccagcctggtctacaaagtgagttccaggacagccagggctacacaaagaaaccctgtctcaggaaaaaaaaaaaaaaaggcagtaacagggacctttctttcctttcttttattctgtccatgtccccagcaccttgagtgaggcaggtcctcaataaatatttcacgaaaaaatagatcaggaagatgctgggtgccctgggggacacgtggacacctgtgaattttacaagcagagggaagctggagcttgaaaaatgtgtggtcacatcgttggggccttaaggaaggaatttaaaggcaaaaggaaccactcacctcacacccctggcttcctggggctttaaaattacagtgcaagcagcttggagctgaagctcggttggtagagtgcttacctggtatgcttggtctatcccaattactgcatacaccaggctgggtggggcgcggctgtaaccccagcactcaggagataaaggcagggggatgaggggctggggaacagcctcagctatgtagtgagtttgaggctagcttttgctacatgaagatttgtctcacaaacaccaaacacacaaacaagaccccactggcctcagtgttcagtgacaataggcctctcctaaccctgacactcaaatagcacatctcgccaggccatgaagccaactgatgtcctaggaaactccacgtagacagaaagacagaccgctgcctctgatgtctgtgtggcagggtcctgaagcactgctcacagcttccaacactgcctggaaacaggaactgtcccttcaaacatgtcaaatacttcatattttccaaggcaagacagtttccaagcacagacagttgtcacacacaggtgctggctgtagcccccagacactgccacaaggtgggccctatttgtcttttctggaacaaattatcccagcacccaactgcttgctgtctgagccactgactcaagacaggctttggcggtatttctttaagaccaagtcatgtggggtggagacatggcttctcaggtaaagaaaggctcctaccaaaaagaagcccggtggcctgagcttgatgtccagagcccacattgtgatcagaggatagactccacagttgtcccctagccccacaggtacactgggacccccatgtgtgcacttactataaataactgaaagtgcagagaagaaatcacgccagaccgttttcatttgcattgtcttccaaaaccactgaagggggtcggggttgggggggaaggccaagttccatctcactcccgaaaggaaagcagatgtgatgcccactgatgccaagacccctcaggacccagcacagggccaggctctactgctgaataaacgaagtgactcaacccaacagtagcctgttcactgggaactgacacgatacgaggggaaactgagtttcccatcacagcttaatccaggaggatgggtactgtgcgagcattgagatctgtcttgctgaagcgaagcctgtcagagtatgcatccttggagggggcgggggggggggtgctgtggtgaacaagagaaaccacaatggctggaaggaaacttggatcctctgtctccgagcaggttctcccagggaccgcagaaaacccctggggaatggccttgcctttcctccttcagattctctccgtgtctgtcctaactacattccggtttcctcctcctctttctctcctccctctccccttccccctcctacnnnnnnnnnnnnnnnnnnnnnnnnnnnnnnnnnnnnnnnnnncacacacacacacactttgatttcagaggcagctactatcaacccagggcattgcaaactctcccagtaccttctgtccctttcttcatgagctaggagtgtattggactgacccacacctaaggtcagctcctagctgtacctttaggagattctaaatagtttcctctacctccccaaaagacaagagccatacaccccagaagagtagccagcgattggttgtgaatgaagacaggcatggatgccttccctgctcagacatctgccatttatccctgagtttgaggctgcccagaaaatgtgttccaatcaggagttccagtcaggaatacatagaattaggtgagtccaaacccagccctctgagctgtttctgccacagtttgcatgttcaagccacagctggagaaggacatgtcatgggctcctttgataccagtgccaggctcccgaggttcagagtggcccagcttgaaaagccaaggtggctggaatgcaccactttttctcaagtggtcgtgagagtttcatctctgcgccagaatcggaagtgtccatccaggggatgcctctggggacctttggattccaatagctctcctttctacacaagatgaaattgattcctgagaggtcaaaccgcccgtccctggtgagcccagtgggaacccagggtgggaactaacaccttcaagccagtctgtgtccaccttactctgaaggcagacctttatcctcggtgtctctgttctctgtggccttttttatgtgaccctggctaaagctactctttttttttttttttaaagcatatatatttggttatctagaaaagtttttcctctttttttttttttaaatcacattttatgtttatggaggtcaggggacaacttgtggaagtttgttctcttgatttacccatgagtcctaggaaccgaccttaggccaccaaacttggcagcaagcacctttacccactgagccatctcgctggccccaaagttattctttctatagagtttttgtcaatttgtcttctccagacgctggaggcacagcccagctactagtatccacaaggagaaatcaaaaccagcttccagaagctccgcgccttcctcctgtagcttccgctcttctgtgttttcttttactttccattccagcttcctgtattcaatgtggaaaccccgcttaaacacgcatgcacgcacaaaaccacacacagaacacacttccattctgagaagggacactttggtatttcaagtgtaaggggacagatttcttgctgacagccttttggaagtgcctctcctgcctctggaaaccacagcactcaggcctgttccttaaatgctatctggaacttaacattttcccaagaaacatgggacagttctgaagtggcacacacaggaaagtccctgagtggactgttctcacagtcacatgtgacacacaaggtcatccatttgaagttctgcggctctgagcaaggaaaagcttgggaaaggtctatggaggcagggacagggaaagctggatatggatttaattcaacatgtaatctaaccaaccattgatgagtttggtcctgggccaatcagcctacgataccagggacagaactagggtttgatttttctaatatgtaggtgtgtgtgtgtgtgtgtgtgtgtaaatgagattgtgcccatagacatgtagaggtcagaggtcaacatcaagttgtctaccttgtttggtttttgctatttttttaaacatattttttaagatttatttatttattttatgtatatgagtacactgtagctgtcttcagacacaccagaggagggcatcagattccattacagatggttgtgagccaccatgtggttgctgggaattgaactcaggacctttggaagaacagtcggtgctcttaactgttgagccatctctccagccccggtttttgctattaaggccacatttaagcagagcgtggtgggacgtgtcattaatcccagcactaaagaggcagatgcaggtgggtctctgtgggcttgaggccagccagcctgatctccgagcaagttccaggccagctgggactagatgagtgagatctgtctcaaaaacaaacagaaaacccctctcctacatttattcgaggcactcgcttgccacagcagtgcgtgaagggcggagcttgcttactagaatcagttctctccttccactgcgtgagttctgggattgagcacaagtcatcaggctttgtggtgagcgcccttacccaattagtgagccttctcaccagccctaccttgttctttgagacaaagtctctcacttgcttggaacttgccctggatggccagagacccccacctcctcagttgttagggttacaaataggtgcagacatagtcaacattgtttgtttgtttgtttgtttgtttgaggacggtttctctgtgtagccctggctgtcctggaactcactctgtagaccaggctggcctcaaactcacagagatcctcctgcctctacctcccaagtgctgagattaaaaatgtctgccaccattgcctggcaagcccggctatttttacatgggttctagggattgaaaggcaaatagtttaccaactgagccatctccgcagccagcgttcagaagattgctgaacccgggttctgggagtatcgcacaagcagtcgcgaatgtgtaatttgaaggaaaggtgggatttattgggtcagcacaagcttaggctgcaaggtctatccctggaaaccatgaagtggagatgggcggaacgtgaggctagaccttcttgtcaagcttgtgaggagacgcgcccgcctccatgcgtgttactcgggtttccaggtgagagtgggtgtttcctttttaggacagtactttagaaagtccagctcgtgggaaccttgccccttgtgaataagcaagcagttgccatataaagtgggttggtttgaccctgggcagctgcagtgtgtgcctggacagacgcatatatatggcctcacagcagctttatccatgcccgtgacagaagtggagagacggccaggagagtttttatgcacggcacagtcctgggctatgtgccttcattcaccaagtcatcccgaggctgggtcctaggggtagtgacaaatacaggaagcctgacctggtcctcggaagctgctcctcagcctggattatatctgctgccctagctccatattcaaatcccgaaccctcacctcagtgatccaacttggcaagtgccctatgcaatgcctggttccttaggacctagctaggcggttcaccctcatttgggctctcagtaactttcctctcttgcctcactcctcagcctgtggccttggtaggacgagtcctatttcctttttcctttgttctggagtcctggcaacaagtattcatcagcctattaaaaccaaaccaaaccaaaccacaccacacaaccacacaacagggctggaagtggagctctgttggcagagcgcctgtctagcatacatgaagacctggttaagccctgggtttgatccccagcaccgtgtaaagctgagtgcagtgtggtacacacctgtattcctagcccttgggatgtggaaacaaaaagatagggatttaaggtcattcttgacttcctgggttgtttggggctggcccccaatcatgagacaagtttgtctctactgcaggctcccagggcctcctctgcaccagattcaccaggcatacgcaccagaaatgcatattctaagccacttctcagttgaatctgatggagacactgcagcccaccttgtaaggaaggcacgcccatccccgcgggctccacctgtaagcgtcccatgttacctagactccagcagtgacttccaacagcgacatgacgctgccgtttataaagctcatgcttgagaattgtataatcaagcttttaaagcttgcaaacagatcttatatttcacttacatctgggactgtgtgttgggctgcgtccacaacaccctcagcctgacagcctcaagggcagacccacccgctagtgcagacaaacgcttggtggccatctttgctgtccggaaggtgactttgttctttttctctccaaggccctctctgtgcttcccagaccgacgagggcctcgttgccgacacttccttcccaggtgtatgacgtgcctgtccagaggcagggcttctcaacccttgaggtgagcttcactctgcaaaccctgccccagcctgaggcttggtgccatctctgggttctccacgctgtttgcctttgcggcttccttcattctgaaggctggttccctcaagataactgccggtgtttgtttgggtgacggctgggataaatctgtgcttgtacctctctaccccacccccataccttcagctaagatgatgccttttaaagcatcgagtccgtcatcatagtgaagctcattattatgtacagtcattatatggtgatcagaaacccttaggttggagaagcagcacatagataaagtgcttacaggtgtatggagacctgagtatagatcggcagaacccacacaaaaccagacacagtactgaggcgctcagcccagtgttgctatagtgaaatgggaggtggggacaggggaatctgcagtagggccaggtagacaaagaagcaaacaagagaccctgcctcagacaaggcagaaggttgtggtcctggtacatatacacccatgcttacacatacacaccacacacacacacgagagagagagagagagagagagagagagagagagagaatgaatcacgactaccagccacaaagtgttcagggatttgtgtcttttttcttttcgagacagggtttctctgtgtagccctggctgtcctagaactcactttgtagaccaggctggcctcaaactcagaaatccgcctgcctctgcctcccgagcgctgggattaaaggtgtgcaccaccacgcccagggatttgtgtctttcattggagaaaacactgaactcgtaggcgttgtgtgggaaaacccttggaaagagaagttaaagttgtcctactgtgtggtctttccctagaggctggagaagcagcagttctatgacatacccaccagctcccagaaggctctgctccactcctccaccagccaggcaagtgtgagtgccaaccgagcagggatggggcactaggggactaagcatcctctgggaaccttattagttagatggattgtcttctttctgctgctgtgctgaaatactgaggtaaacagtttatggagagggaaggtacgctgtctcaagggttcacaattggttgtctggttgctttggaaactgtggtccggggtggtacatctcagagagagagcacaggatggaagaagatgcttgctctatggagagtagggagcaaagagaagagagaagagagggctggagtcccagtatcccctcaagctgatggccctgatggctcaacttccttctactaggccttatctcccaaagggttcattaccttctatcagcggcacaggctaaggaccaagccctcaacaccgaggaacattccaagttcaaactgtggcacttggccagcactcaggtgcagggtccccataaccaactctactgcactggaagtgaaacccctccttgccctggtactcagggctagggcagcgggttggggcatggctctgttggtgagcatttatcttgcaagcataagggcatgggtttggatcccctgtgctcacatcgttttttaaaagtggagctggcgcgagttggctaagaccattgtgctggtcttcctgaggtcccaagttcccagcatccacatgactgctcacaaccatctgtaactccagtccaggggatctgatgctctctgttagcttccatcattaacacacacacacacacacacacacacacacacacacacacacacacacacacacacacacggtacaagtacatgcagtcaaaaacccatatacataaaaataatatttaaagtgctgggcataagtcaggagtcccagagctgtggactgctcacacccatctgtaactccagtccaggggatctgatgctctctgttagcttccatcattaacacacacacacacacacacacacacatggtacaagtacatgcagtcaaaaacccatatacataaaaataatatttaaagtgctgggcataagtcaggagtcccagagctgtggagatggaggccaggggattgttggagctggtggaccaacaagtctagtgagttttaaattcaatgagagactcttgtctcaaaaaacaaggtgaggggtgagaaaggaagaagatgcccaatgttaatctctagcctccacacacacaggcacacacacacacacacacacacacagaaagtgagaaggtgggagggagggagaaagagcacagtataagctatgtggtggtttggatatgtcatttaacttccccatgcctgcatttttactacagatgttcaggactattctgtgagataatttgtataacacatagaggaatagggggaatcgtccaactttgatgcgtttcgacgatatcatgagtgctgtgtagtggtttgttagatgcaaaagaaaaggttcaaggcccagtagcaggatcgggacaagtagaggcaactcgggggtatgggtgtgttttctgaactgagaggaagaaaagcaacttgggaaagtgggtgggtgggattagttcctttgctgtgacaaaatgtcatgaccaaggtaacctataaaatccagcagtccattgggctggtggctccagagggtttgaccccaggatggcataacggagccatggcagcaggaacagttgaaagcttacatcttaagtcataagcaggggggcagagagcgcacaggggatggtggaagaaagctttcctttgtgacccatttcctccaacaaggccacatccaatcctcccagacggtctggccaactgggaaccaagcattcggatataggagtccatgggggttattctagttcaaaccaccatgagtgtgcagacggagatgggtggctgtggaagtgcagagaaaggaggtttgacagaggatgaagccagactgggagagcccttgagtgacaagagcaatgggggtggggagggcacactgaaggaacctgagcaaaacagtgcactcggatgtcaagggtctgtcggactctcgtttggttgttactaaccggggacaactttgtgtgtgtgtgtttttttcctccagggacgggatgttacattggcaccgacaatggccttcagacaaggtggtggctataacccgttatccagccctcagaagtcagaacggattcatgacactccggtgttgctggaaaaggccgatgtcagaaatgtgtctatgaccagcttcaccaaagactcaggttccagagccattccaggctcctctgctgtccacactggagctgtggccctctccccacagctggggaacactgtgcagagaaaaaacagcctcccagaagaacctacctatgccttcccaacgtccagggacccactgccctctgatgcaggtggcagctacaaggtcccttccaggtttcttattcccagagtggagcaacagaacaccatgcctaacatttatgacacccctaaagccatgcagggtgtgtctcataacgcccctaaagccatgcagggtgtgtctctggctggaaaggagctggagagaggcagagaggctccagaaaattccccctggatctccggacagacaagtttcctgtctcctgactcggaccgattatctgttgccagctcagacagcagggctagtgtggtgtcttcctgctcctccatatccatggactcctcctctggctcctcctcagaggactccgtcaaggagctatggatggacgtggactttgcaaaggagacagcagtgtctctgcaacacaaagtggccagctcggcggcgggcctgctgctctttgtaagcaggacttggaggttcaaagactccttggaaaccaacatccacagaatccgcagggccgctgaccacgtagaggaatctgtaagagaatttctggattttgcccaaggggttggtgggaccgcttgcaatctcacagacagctaccttcaggctagaattagagatcagctccagacaatctctagctcctaccagacactgctggatgccaagggaagcttggaccgctgcaattggtccctggaagttcttgtgacagacaaagtccaaaacagcctggatgacctggagaggtttgtcgccactgcacgaatagttccagaagacgtcaagaggtttacctccatcgtcattgccaatgggaagctcctttttaaacagaactgtgagaaaggagagatggacttgaagtgtgagagatgcatccggcctccccaaagagaaactgagtcctaccaagagagcagccccttcgacaggcaaccgacaactgaacactcctttgaactagcaaggaaaaacagagtgaatgtctgttggcaggtaagtcagggtgacaaacagtacacaggggacttcatctgttacctgaactggtcatcactgaggcagatgctggcatcatgtgcctgtagaaatgtgcacttgcacgttcatggggaagccataggataagcctgggtattgttcctcagtgtctctcactgacctggaagtggctgagtaggttaggctggctggacggcagtgcctggggatccgcctccctctgcgtcccagagctggagagacaggcttgtgccaccacacccagtctttttccatgggtgccagtggttgagcccaggtccttatacttgcaaagcactttactgattgaactgtctcctggctttttttgagtgtgtggtgtgcagtgtctgtctctgcctttctccgtctcttatggttgtttgggctttgtttgtttgggggacaggatctcactatgtggccctgtcctggaactcacagagatacacctgttttcacctctgccacctctgcctcccctgtcccccctcctgcctcctgaagcctggtttagatgcatgtgcccccatgacagtcaccactctttttaccctttattttgagacaggatctccctaagttgcccaggcaagctttgaacttgggttcttcctgccttagcctcctgtcctagatagggtttctgttgctatgacaaagcaccatgaccaaaagcaaattccagaggaaaggttcatttggcttacactgccacatcatagtccatcactaaaggcagccaggacaggaactcaaacagggcaggaacctggaggcaggagctgatgcagaggctataaaggagtggcttgctctgcatggcttgctcagcctgctgtcttatagaacttagtacccagaggggaggcacccacacacactgggcggggggcctcccacatcaatcactaattaaaaaacaccctacaggcttgcctacatccctaccttataagggcactttctcaattggggcgccctcctctccaatgactctagcttatgtcaagttaacataaaaccagccagcacccctcccaggatgctggagtcacaggcctgtgctgctgaccgccagatctctccatgttccagcttggagtcgtagtttctcagagtcagaggagaacatgtattcttctctgggccagactgaccagcctgcagctccaggcaccccgagaaacattgctctggctggctgcctttggactccacaaggagatgcctgagtttaggcatccttagactgctgaggcccagcaagtgaccatcccagctccttccaaggtccctgctgctagacgagcatcgacacactctagaagttgatggttgttcatttctgtcctgtcgggctaccctggcaggcaggacgcagcccttggccaccaaagccaataaatgaatcagtaggcagaatcatgaacaaaatctcacatttaggagtaaacttttaaagtggggcatggtggtcatgcctgtaacctctgtactcaggaagctaaggaagggggtggggagtttcaggccaatctaggctacacagcaagatcttgaggggccttggggggcacaaaacccaccaaccataaaagcaaaacaaaaaaaaagtgaacttgagcagctatcgtaatttgaaagctattcaaattagtgattggaagatttgattttttttttcagcagtcacctaacctacaagagaaaggaaagcccaccatggaaggaaagtcaaacagaaacccagacttccatggcatggtaagtcggagtgctccccagtgctctgattgtgattctgccctagagagctctccttggctatgaaaattcagtgttatagcctactccatgttcaaggcctccatctgtcttttgctttctttagtagtggaaggacacctggacacccagggtagagcatcagcccctgagtatcaggggaaaaaatttaggtattgtttggggttatcatgagtagcaccaacatggcatttaatgacactgtcacacgtcttgtgataattgtctcttcccctctttcctttctttgtacttggaattggatctagggctctgtgcaagacaggcaaagaccaccactgagctacaccctcacctggcatccctttcatgtctctgatgatgagcacagtaaagcactttggctcaggggttaggtatcttcatggtatctttgacacttgatccacgtcttttaaaccaaagatgttatcactgtttgtctttactggctgtcttctatttgtggcaggaggcaattttccgtttaccaactttaaatgtttccactaaattaacgtgccaacattgagtccagggctagcgacatggctccatagtaagagtgcttgctatgaatgcatgtggacctgagttcaaatccctagcacccatgtaaaaaagccaggcatggctggcccccatgtgcctgtaaccccagcactggtgggtgggagagagagattctgggagctcactggccaacaagccaagccaaaatggggcccttccagttctctgagagacctttctcaaggcagtaaaacaaggaaagaccggggaagaaacctggtgccgtgttttggcttctgaatgtatgtgcaccgcaatatctgtacacctacatacatgaaccatacattacacacacacacacaccccacacacataagcataaacagtgagtctatttaaaacccaagtaagaacccagacaacactgagagggtaaagatgaaggctacagagctgcctagcaaccagggtcctggagagagcaagacaggatacagatgtccattgacttggacaaggttatctgccttctcagcaacaattctgggcaagagcccaattctctcagcgctctgctctctaagcccttatcactcagctttgctcctcctgctgacagccacactgttttgtcccacaagaggaatgccttggctttctccaagtcagtttctgatctcttgggtctggacagaggtggagaatctgcatccccagcaagcccaagttgatggtgatggggctggtccagggcccacatctgcacagtgctatttcatactaacaaggcttccccactggcccatgtgtgggatgcaccatttggcttcccaggggccctccctgcctgctaactgactaaggctcacagcagcccctcattaagagatggcagcttcagccctgatccctgacccaggtacatttttcattttcaagccaagatgctcatgatgcaatgtctgtctttctgtctgtctgtctcactggttctactgtctgcctgaaaaacggggctcatcatatagggcaggccagccttgaatgggcactcttccttctgcctgcaaagagtggatttaacatctagttcctcacccctagaacactggaaagtcgcaaatttatcgttatagatgtgttaaaatgtgattcttatgtcttacagagctggatgagtaaaatcgtacacacaactgtgttgcaatctataacaaaagaatacatacagagccgggcgtggtggcgcaagcctttgatcccagcactttgggaggcagaggcaggtggatttctgagttcgaggccagcctggtctacagagtgagttccaggacagccagggctatacagagaaaccatgtctcgaaaaaccaaaaaaaaaaaaaagaaacaataacaacaaaaaaaaagaatacatacagttgcatatgtaacagtacttgggaaacactgatatttgagcctcatgtcttcaatcccagcacgtgggaggaagaggcaggcaaatctctgtgagttccaggacagccagggctacacagagaaatcctgtcttacaaaacaaaacaaaacacaagcaaacactgacattcaattcacattcaattcaagtgtcacagccagnnnnnnnnnnnnnnnnnnnnnnnnnnnnnnnnnnnnnnnnnnnnnnnnnnnnnnnnnnnnnnnnnnnnnnnnnnnnnnnnnnnnnnnnnnnnnnnnnnnnnnnnnnnnnnnnnnnnnnnnnnnnnnnnnnnnnnnnnnnnnnnnnnnnnnnnnnnnnnnnnnnnnnnnnnnnnnnnnnnnnnnnnnnnnnnnnnnnnnnnnnnnnnnnnnnnnnnnnnnnnnnnnnnnnnnnnnnnnnnnnnnnnnnnnnnnnnnnnnnnnnnnnnnnnnnnnnnnnnnnnnnnnnnnnnnnnnnnnnnnnnnnnnnnnnnnnnnnnnnnnnnnnnnnnnnnnnnnnnnnnnnnnnnnnnnnnnnnnnnnnnnnnnnnnnnnnnnnnnnnnnnnnnnnnnnnnnnnnnnnnnnnnnnnnnnnnnnnnnnnnnnnnnnnnnnnnnnnnnnnnnnnnnnnnnnnnnnnnnnnnnnnnnnnnnnnnnnnnnnnnnnnnnnnnnnnnnnnnnnnnnnnnnnnnnnnnnnnnnnnnnnnnnnnnnnnnnnnnnnnnnnnnnnnnnnnnnnnnnnnnnnnnnnnnnnnnnnnnnnnnnnnnnnnnnnnnnnnnnnnnnnnnnnnnnnnnnnnnnnnnnnnnnnnnnnnnnnnnnnnnnnnnnnnnnnnnnnnnnnnnnnnnnnnnnnnnnnnnnnnnnnnnnnnnnnnnnnnnnnnnnnnnnnnnnnnnnnnnnnnnnnnnnnnnnnnnnnnnnnnnnnnnnnnnnnnnnnnnnnnnnnnnnnnnnnnnnnnnnnnnnnnnnnnnnnnnnnnnnnnnnnnnnnnnnnnnnnnnnnnnnnnnnnnnnnnnnnnnnnnnnnnnnnnnnnnnnnnnnnnnnnnnnnnnnnnnnnnnnnnnnnnnnnnnnnnnnnnnnnnnnnnnnnnnnnnnnnnnnnnnnnnnnnnnnnnnnnnnnnnnnnnnnnnnnnnnnnnnnnnnnnnnnnnnnnnnnnnnnnnnnnnnnnnnnnnnnnnnnnnnnnnnnnnnnnnnnnnnnnnnnnnnnnnnnnnnnnnnnnnnnnnnnnnnnnnnnnnnnnnnnnnnnnnnnnnnnnnnnnnnnnnnnnnnnnnnnnnnnnnnnnnnnnnnnnnnnnnnnnnnnnnnnnnnnnnnnnnnnnnnnnnnnnnnnnnnnnnnnnnnnnnnnnnnnnnnnnnnnnnnnnnnnnnnnnnnnnnnnnnnnnnnnnnnnnnnnnnnnnnnnnnnnnnnnnnnnnnnnnnnnnnnnnnnnnnnnnnnnnnnnnnnnnnnnnnnnnnnnnnnnnnnnnnnnnnnnnnnnnnnnnnnnnnnnnnnnnnnnnnnnnnnnnnnnnnnnnnnnnnnnnnnnnnnnnnnnnnnnnnnnnnnnnnnnnnnnnnnnnnnnnnnnaaagcctcctgaagagtaatgagtttgccttttttcaatcagttgttttagatgaatactgtgagatgtatacaaactgtttatgcacaaacacctgtgtgcatgcacgcgtgtgcatgtgttgctagaaacttaatctagggtttcacaaatgctaagcatgtactctgccacgaagactgatccctagtcccccaaatgtatgctgttacttcaccccaaaggtgacaattatgtgctctgttgagtcccctactaacttattttgtgttacaaatcctgtattgatctgttcccctgctcagttagattaggtttatatttcactagtctcaaatctgttatattatttatctataatcttgggtttaaacatacttgcaaggtcctgatggctcaggaggtagaggcacctaaccccagtcctgatttcctgagttctatcccagggacccacgtggtggaaggagaggagactcctgataactgtcttcagacatccatgcacaaaataaaacgaaacttgtaattaaaaacttaaaacatacgagcaagctggcagcaatactttctctgaaagggcctctgagccgtgtcacctgagtgctggtaccaaagtaaagtgtttgttaaagacacctccactttgaatgcatctgcaagtttgtatgtgtctatctggactggaaagcaaaaccatcattggtgtattcccggagtgggtcaggaagatgtggcatgcagacgacacccacagttggtcacagctgtggaagtgttaccgagctcctcatgcaaaccacttccgttctctctccccaaagctctgcctttcacctcacgttactatggttaccttaggctttcccccatgggagggccctgtccctcctgagcacaggatactttgactgaagaagaaagcattcccaggttgtgtctcctgcagaggtgccaagtccaaatcctgtcttatctgcatgtagtgggcacatgaaaatactggctggagggactagaacatgtgtgaaaatactggctgtaaggactgaagagacggctccgtggttaagagcttgttactctcacagaagacctcagccatttgcaactctactggctccttagacagcaagcatgagagtgacacaatacatacataaatgcatatgcacgtacaaacatacatccacacatattcatacatgcaaaccctcatacactttgaataaacataaatcctttttttaaatgttgatgggggggggcagggagcactttctgctctcccagaggacctaagttcagatcttagcaccttcattaggcagctcacaactgcttgcaactacagctccagaagacccaatgtcttctaggctctgagggcacctgtgcacatacgatgcatacacacacacaacgtatgtatgtatatagatagatagatagatggggaggggagagaaagagtatgtgtgtgtgttagtcagggtttgtattcctgcacaaacatcatgaccaagaagcaagttggggaggaaagggtttattcagcttccacattgatgttcatcaccaaaggaagtcaggactggaactcaagcaggtcaggaagcaggagctgatgcagaggccatggagggatgttacttactggcttgcttcccttggcttgctcagcttgctttcttataacccagaactaccagcccagggatggcaccacccacaatgggctgggccctccccccttgatcactaactgagaaaatgccttacagctggatctcatggaggcatttcctcaagagaggctcctttctctgataattccagcttgtatcaaaaccagcatagatatgtagttttttaaaagaaagagttcctctgtgtagctctggctgtcctggaactcactctgtagagcaggctcgctcagactcacagactcaccttcctctgccacctgagcgctgggatcaaacgtgtggaccaccgctaaggcctagccacataatacataatacataaataaataataaaaaattttaatgttgagtgtagagctaggtatagaggtatacatctgtaattccaacacttggaaggtaagcaggaagatcagaagttcaaagccagcctgggctacatgggacccctctcaggagaccaaaacagaggtgacagaggggagtgaatggcggtagggagaaggggtggaaagggagcagttggggactctgtctcaagtaaacaaacaagaagccattgcccctagcagctgccatctcaagaccctaaaatgaggacccctgtgaggcttaggctcagccccctgtggggctggggtggaggtgggttgtcacattctgaacggcaggatctcacctgttaggatcctgctgggacagaagctgtgcccactccatcttagcaatgcagcaaaacgctgggcttttaagacaacctggagccaactagccacggggcctccaggggtgtcaagggacagtttccaggtccacacacacgagtcaactcccgtgggggcaaagtggctgccttggattatgaccagaggagagggacttccctttgcttatactaccttagatcaggtgcctgccccgacagtgtgaataaccttttcacagacacacactcaaattactactactcattcacccacacaaactcactcacaaatacatctcctccacatgccctgctagtctctctttcacacatttccactgctttatgtgtgcgcgggcacgggcacacacacacacacacacacacacacacacaccgaaacatactcaaattccaataaccctaaccgctggctctgtgtggcagtgtgatgcacccaaggattcctcctgtcagctctgggtgcagaaataaagattggaggttctgggagaagagactatgtaggtgggtcttaagtaaccctgtgacctaattagtcacaaggggacttacagtcacactcagacctatgcctcacttctttttgtttggtttttttgagacagggcttctctatgtagccttgactgtcctggaactcactctgtagaccaggctggccttgaactcaagagatcctcctgcctctgcctcccaagtgctgggattaaaggtgtgcgccaccatccaggggaaagcagatggttacactgaatcacactgtatgcgtagtttagacgcagagagccatgcttagccatcctgagaatggtgaaaagccctcccaagtccaagtttccatgtgctgatctagagccacccttggagctggctctcctaagcctggcagccaggcacactgcatagacatacgtctgcccagaaacaaggattggcagcatcaaaagaaactggcgctcacttctacattaccgactgatccatgtcatttcagtcccaaggctggatgtaggggtgagctcacacgtaggccggatacaacaggtttgtatcagagccaaggagcctctgaggttaggaatgccttgccttttacaatagaccctgagcatagctggtagagctgtgtctctaagacaccattatttatctgattttcagcagctggcgattgggaagcagaggcaggagaattgctacaagttgaggtatctctatctctatctgtctgctgggtggtggtggtggtggcagtgcacacctttaatcccagagctctgggggcagaggcaggtgtagctctgagtttgaggtcagcctgagctaaagagcaagttccaggccgcccagggctatacagtgagcccctgtcaaaaaacaataggtgtctattggtagatagatggatgaatttttttctttagcaaaaataaaatctggtctgcaatctcgaggacgaaagttatcttttaaggtcgtcagctgcagcactcttgagaagataacagatcagaacaaaatgctacatggtctgctcagatatgcagaaatggaagatacacattgcaaggttggagaggcagctaggagcagggatgggatgtagctggaagcagggaataccacagggaaccaaagggtgaagtcggtcactcaatgataacagtatctatttgcactggttctttggctctgcgatgttctaatgcctcatcaacttgagccccgccttcccccagtgacagacagcctaggaacctgtgacctggggctgcttttcatagttttacatttcttgagttctgttcaatccaagaactgtcatcaagagacccgggtaagttgctagtgtgtgcttagcatgcacgaaggaagccctgactccatccccagcacctcacagatgggagggggaggatcgtcaggatttcgaggtcattttgaggccactatgtgagaccttacaaatcaagcaaagaaagcccttgtcgacaaagagcaaacctcacgagaaaccctgcaacggctgcagatgcttccttctctttttgcaaagatggcagtgagcccgcccagactcattgcagaagacggcctggggctttagaatcaaacgcattctctcagcttttggaggcttcttgttgaatatgtttttttctaataaccaacattctgtaccatttcctccaca

SEQ ID NO: 1365 - DNA, 1856 bp, Mus musculus
ccagctcctgggaaccagccagcagcatgcagtgatattgcatcattggtccctggaaccagatatatcagcggcagaactccgaggaccctgctcacatcacagccatgagaggcaccagcatcagagagggtgcgcccaagaccctgttggccagggcactctacgacaaccatgctgattgctccgacgagcttgctttctccagaggggacatcctgaccatcgtggaacaaaatgtgccagaaagcgagggctggtggaggtgtctgctccacgggaggcaaggcctggctccagccaaccgcctccaagtcctcagagagacccctgcagacagaccctgtcccctgctcccgagaggcccagacacagatctcaccagctccggggagccttaccaggtgcaggacttgatctccccgccaccccagggacctgtgtatgaaccaatgaggagctgggtggaggggccgtcaccagcgactgcccaagtctacgaattgcctgagtcaccttccagtgccaggatcatctgtgaaaagacgctgagcttccccaagcagggacgggatgttacattggcaccgacaatggccttcagacaaggtggtggctataacccgttatccagccctcagaagtcagaacggattcatgacactccggtgttgctggaaaaggccgatgtcagaaatgtgtctatgaccagcttcaccaaagactcaggttccagagccattccaggctcctctgctgtccacactggagctgtggccctctccccacagctggggaacactgtgcagagaaaaaacagcctcccagaagaacctacctatgccttcccaacgtccagggacccactgccctctgatgcaggtggcagctacaaggtcccttccaggtttcttattcccagagtggagcaacagaacaccatgcctaacatttatgacacccctaaagccatgcagggtgtgtctcataacgcccctaaagccatgcagggtgtgtctctggctggaaaggagctggagagaggcagagaggctccagaaaattccccctggatctccggacagacaagtttcctgtctcctgactcggaccgattatctgttgccagctcagacagcagggctagtgtggtgtcttcctgctcctccatatccatggactcctcctctggctcctcctcagaggactccgtcaaggagctatggatggacgtggactttgcaaaggagacagcagtgtctctgcaacacaaagtggccagctcggcggcgggcctgctgctctttgtaagcaggacttggaggttcaaagactccttggaaaccaacatccacagaatccgcagggccgctgaccacgtagaggaatctgtaagagaatttctggattttgcccaaggggttggtgggaccgcttgcaatctcacagacagctaccttcaggctagaattagagatcagctccagacaatctctagctcctaccagacactgctggatgccaagggaagcttggaccgctgcaattggtccctggaagttcttgtgacagacaaagtccaaaacagcctggatgacctggagaggtttgtcgccactgcacgaatagttccagaagacgtcaagaggtttacctccatcgtcattgccaatgggaagctcctttttaaacagaactgtgagaaaggagagatggacttgaagtgtgagagatgcatccggcctccccaaagagaaactgagtcctaccaagagagcagccccttcgacaggcaaccgacaactgaacactcctttgaactagcaaggaaaaacagagtgaatgtctgttggcag

SEQ ID NO: 1366 - protein, 603 aa, Mus musculus
YCIIGPWNQIYQRQNSEDPAHITAMRGTSIREGAPKTLLARALYDNHADCSDELAFSRGDILTIVEQNVPESEGWWRCLLHGRQGLAPANRLQVLRETPADRPCPLLPRGPDTDLTSSGEPYQVQDLISPPPQGPVYEPMRSWVEGPSPATAQVYELPESPSSARIICEKTLSFPKQGRDVTLAPTMAFRQGGGYNPLSSPQKSIHDTPVLLEKADVRNVSMTSFTKDSGSRAIPGSSAVHTGAVSPQLGNTVQRKNSLPEEPTYAFPTSRDPLPSDAGGSYKVPSRFLIPRVEQQNTMPNIYDTPKAMQGVSHNAPKAMQGVSLAGKELERGREAPENSPWISGQTSFLSPDSDRLSVASSDSRASVVSSCSSISMDSSSGSSSEDSVKELWMDVDFAKETAVSLQHKVASSAAGLLLFVSRTWRFKDSLETNIHRIRRAADHVEESVREFLDFAQGVGGTACNLTDSYLQARIRDQLQTISSSYQTLLDAKGSLDRCNWSLEVLVTDKVQNSLDDLERFVATARIVPEDVKRFTSIVIANGKLLFKQNCEKGEMDLKCERCIRPPQRETESYQESSPFDRQPTTEHSFELARKNRVNVCWQ

SEQ ID NO: 1367 - DNA, 66666 bp, Homo sapiens
agcctggccaacatggtgaaaccccatctctactaaaaatacaaaaattagttgagtgtggtggcacatgcctgtaatcccagctactcaggaggctgaggcaggagaatctcttgaacccaggaggcagaggttgcagtgagccgagatcacaccattgcactccagcctgggcaacagagtaagactctatctcaaaaaaaaaaaaaaaagagagaatttacaagtgagcacataacacttagatatttcgaaagagtattcaccaaagtattgactgttacctctgatgggtgcaattattaggcagtttttattttcctttttatactttatttggtacttttaaacataaaatatgtaatttatagtcataaaaaggcttccttttggaaagtagatattcatatactttgtctcagtaattctgtctctaggaatttactcctaaggaaataaagctttctgtacaaaggatgttcattacaacattacttataattgatataaactaaatgtcaggaagtaaaagaattgttaaacaggccgggcatggtggctcacacctgtaatcccagcactttgggaggccgaagcaggtggatcacaaggtcaggagataaagaccatcctggccaacctggtgaaaccctgtctttactaaaaatacaaaaattggctgggtgtggtggtgtccacctgtagtcccagctacttgggaggctgaggcgggagaatcactcgaacccaggaggcggaggttgcagtgagccgagatcacgccactgcactccagcctggcgacagagtgagactctgtctaaaaaaaaaaaaaaaagatcacacacaaaagaattgttaaataagtaatggggcttctaaacatgaggcactttgcatctagtaaaaaacatggaaaaatgtactcagcataaagttggttaaaactataatagaaaaatatagtggcaacaattttatatgtatttttaaaatgtgtttttttatgcctcaaagtacattaggacagtaacagtattgcttcaggtgatctggtgatctcctttttttttttcctgatgcagtcttgctcttgctctgttgcctgttgcccagactggtcttgaactcctgggctcaagcagccctccttcctcagcctcccaaagtactgggattacagacgtgagccactgtgcctggtttgattttcttttttgtacttttttagagtttctgaaagtgtacaaggtgtatcactgcaacaggtttaaaatgcttttacattgaatgctagaacgttctgagggtctaagatgtggacttagaaagctatccctcttgctctctgtggcaggcgcgggtttaagtggacgccaggtgcaccggacacaggctgtgtttaaccacaccgaggactatgtgttgctgcccgacgagaggacgatcagtctttgctgctgggactcgaggacagccgagcggagaaacctgctgtcgttggggcacaacaatattgtacgctgcatagtgcactcccccaccaaccccgggttcatgacgtgcagcgatgacttcagagcgcggttttggtaccggagatcgaccactgactgagccaccctctccgtagggttctttctcgaggactctaccctcctcccccacgtcctgtctcagctgcagtcgtaagtccgtgcaccatccttgacgttttgctgccacctctgtccacattcttcttggatttgtataaaagaatctttttttaccttgatgtagaatcatggtggaaaaagttggaaacacagatctgtgcagttctacattcactgattattacagtgtgattttcatcggttttgtaagtacaggacttgccgtttcttttgatctcttgattgaaggaggatagggcattaaagtgcttttgacatgaggaattttcatttggttcttctgtcaactttcttgcttattctgctgaaccctctgtgtatttcccttccaggtatatttgaacagataagcaggcatgcagctctgagactcctgagttttatgccattatcaaaagcattttcaagaatccctcaattctatcctgaaatgatgttattctgataataaagctcagatctgcaactttattgttatatatttttcacttctgtaaaattaatggccagtttttcctgacaatttataggaacagtatctttcaacatactccctacattatccttcaatatctgcaatacttgtctttagtaactgtatttctggtaagattatgatttcatgagaaacaattgaaaatatatccgatctaattaaattaggtcagcctgctattgctctcaggtgttgcctgtcttcacgaatgattagtatcgattgacctctttcttaggtggttttaagtcttcagttctcgtcagcatgaactaacttctcatcatggaggcacatagtaactgcattctcagaagatttatgcagttaaccaattgatacaagttttctttttcttgaatttttttttttttaattgaggcacagtcttgctctgtcacccaggttggagtgcagtggcgtgatctcagctcactgcaagctccgcctcctggtttcacaccattttcctgcctcagcctcccaagtagctgggactacaggcacccaccaccacgcccggctaatttttttttttttttttttttttttgtatttttagtagagccagggtttcaccatgttagccaggatggtctctatctcctgacctcgtgatccgcctgcctcagcctcccaaagttttgggattacaggcgtgagccaccgcgcccagccttcctgaagctttttagaacatgacagtacttctctggattcagcactagcagagtcagagaactctgaactccccttgtacaaacataaactttgctttatatttatcccaaaaaacaaataccttatgatctgcataggagtacctagaaatataatctgggatcatttgataaaaatagtaaatagattgaagtaaaagtcattgctttatattataggaagttttgttttgttttgttttgtttgttttgtttttgagacggagtttcgctcttgtcccccaggctttagtgcaatggcgcgatctcggctcaccgcagcctccgccacctgggttcaaacgattctcctgcctcaggctcccgagtaactaggattacaggcgtgcgccaccatgcccggctaattttgtattttttttagtagagacggggtttctccatgttggtcaggctggtctcgaactcccaacctcaggtaatccgcccgcctcagcctcccaaagtgctaggattacaggcgtgagccaccacgcgcggccccatcatacgaagttactgaagttattgcgtaaacattctgttttagtcatccttgaggatcgttttaactccttgatctgtaaaactgtcttaagcatcttaacatgttacatcacagggttttagctcagatttccaaagagccatattttttgatgcatatttccagttgaattccagtgtgaatttccagttgtactttgcattctgattctttgatatttgaacttggccatctgtgggtgctactctcgtaagactaaaaggcacctactaaatacgaacaaggataaccagttctaccaaaaacattaccaaccaaacctcccctgttcttttttcagactttccttttgctttcaacctcttaaactgtaaaggagagatttaatgtttccctattattctgctttgactcacatactaaaatgaccacatggcactccattgaatcttttcagttgttcacgaattaaaataatgcccatgttttacagtttttcgagtagtctcagcaatggatctgtagtttcaggacctgtttttaaaagatcaagatacttttatgtgtttcagaagtagctgttttttcattttttgtgggtttgttttttttgtgtttgtttggttggttggtttttggtttttttgctttttaaaggtcacagtgttgtgagcctggtgtaaatgccaggaatattatatggacttagtatctgcatctcgttaattgtaccacacaacactctgccattcaaataatgaatatctggtcaggatacgaacttataccctctgtgtgttttttttttttaagatacgtgatttctgaaataaactttatatacaatgataagctagtttattttttttggaacttactttgaacatttcccacatttgaacatctgttctcaaacagcagttatgactttggtactgttcaccctttctttagtgctttgttccagaagtcaggtttttatagctggatcacctttagctctttatctttgctcctctgctctctatgaatttttctttttttgaaacgaattctcaccctgccgcccaggctggagtgcaatggcgcgatctcggttcaccgcaacctccgcctcccaggttcaagcgattctcctgccttagccccctgagtagctgagattacaggcgcgtgccaccatgcctggctaattttttctatctttaggagagacagggtttcgccatgttggccaggctggtcttgaactcctgaccttctgatctgcccaccttggcctcccaaagtgctgggattacagacgtgagccaccgtgcccggccgctctctgtgaagttaaagaacttgagtataattcagttttttggcttattcagagaacgctatctttgcttacactttggttttccttaggaagagcaatgtgagagagtccagtctcagctctgttactgacttggtaagtaatagggcaagtcatttttctgggatacagcttccttttctgcgattaaagggcttaatgaaaaaaatctccagcatgcacttcaacctgtaaagctctttgttttcatgcctgatgatacaaacagacttcagggagggaggaagccattgttcctaagcgggagacatctgtttctaaaaaggtaacaaaccagatatttccagagccctttcaattcaaacctggatagaactttttttaaatctctaatagttagctgagacagcaagaaagaaggaattcctgaggggcagaacaaagcacaaatccagaggattcgcagtgctggagcactgagtaggtcagttcctgtaacctactcatctctgagcagaagtcaaagctctgagtcttcatggaggaggaactttggtcaagacccagaaagcctggaaccccaaaggtgccccttcagtaaaaggatgaacttgacaaaaacctgcctcagagaaagacgagaaatctgcctgcttggtgctggctcaggggttttcggagagagggtgtctggtgttggcacaagggagggtctcctgagaattcggtccacgcactgttcctcatgcaggtttggaacaatttacgctacctgtactgctcagagaaaatcaaatggggatcttaaagcagtctccaactgatggtggccacaagtatctggcagaggccagcacgaattttctgtgcaagaacacgtcttaaccccagtcctccctctatcccagataaacctctgaggatcatgaactcacagtcaggtacgtgaggaaacaagccaccctgataagaatcagcaaaaataacataatcagacttgcaaggacctagtggaattaccagacacagattaaattcagagaactaaaacagtaactaaaatgggaccaaggggcgggcgtggtggctcacgcctggaattccacactttggaaggccgaggctgtgagatggcttgaggtcaggagttcgagaccagcctgggcaatagggcaaaacctcatctctaccaaaaatacaaaaatattagccgggtgtagtggcgcacacttgtagtcccagctactcaggaagctgaggcatgagaatcgcttgagccagggagatggaggttgcagtgagccaggatcaagccactgcactgcagcttgggcaacagagcgagcctctgtatcaaaataaaaatgggaccaaggattaaaaaacttgcacaaggccaggcgccgtggctcacacctgtaatctcagaactttgggaggctgagaccggcggatcacctgaggccaggagttcaagaccagcctgaccaacatggagaaaccccatctctactaaaaatacaaaaacattagccgggtgtggtggcacatgcctgtaatcccagctactcaggaggctgaggcaggagcatcgcttgaacccgggaggcagaggttgcgatgagccgagatcgcaccattgcacttcagcctgggcaacaagagcgagactccatctaaaaaaaaaaaaaaaaaaacttgcacaagggactgggcaggtttgaattaaagaataagacttgtggaaaacctcctattggaatgtttctctagttttcatcgtgaattgctttggcctttccctggagctcttaactgttggccttcctgctccctgactggatatttgactctatgaagcctctttcacaggcgtcttttggccaagcaactcctcgccactctgtctgctccccagtaacgaccgcttgcctggggcatcattttctctctggctttttcttgctctcctgccggcattcagcctttccctccagcttcctgtccccactctgtccccagagcatttcctttgcatccttgttttcaattcttgccctaattccttttccctcccaacctgggggtcaaaacttgggtgataaaactaatcactaataactagagtggctgcagattccccagccctcccagtattatccctgcagcagaatatttggtgaatttgtgggcaattcatgaaattcttttttttcttttttctttaagacagtctcactctcgcccaggctggagtgcagcggtgcgatctccactctactgcagcctccacctcccgggttcaaatgattcttgtgcctcagcctcccaagtagctgggattataggcatgcaccaccacgctcggccaatttttgtattttttgtagagatggggcttcgccatgttagccaggcctggcctcaaatgatctgcctgcctcagcctcccaaagttctgggattacagacctgagctgtcttgcccagccaattcatgaaattctgctttggtcaaaagagctatttttatgagtaatcttcatgagattacagcctgaaacttcccgccaagcctttaatgttttgaacattgtaagtctggtgttcagctgtcctttataattcaaatatcgagtgcccagtgtttcactactaccagtcagggagcttgatattcacatgaaaacaacataaaagcatacagaaaaacatgcaaaagcaattttcctccctacgcatgtataaggcactatagaagtgaattggtcagactcacttgtctcagaaaagaaaattcggtccaaactactgttcttgatagcacatttgccaagagcattaagattacctcactagagtccttctgacgtagttcccttgaactccagctgtttcagccttcagacaaccggatattatgcaagcacccagtttcctagactaatagttcttgcaatgtttgtccacattaaaggctcatttgccttaaaatactaatggattgcagcaaaatgtctaaggcagtttctcacacctttcattcagaaaaaccatagagggctcaaataacagaccgagaggtcaagttccttattcacaaaatatcaaactaggtatctatgtaggagctagttgatataatttcagggccaaagcctattacttttgtgtcttacttttctagttgaggttgttttccctagaaaaaacaacttgtgaattatagcattctgatctgtattatgagcttaagggcaggctcttcagtatagggaagaatcactgccgggagtctgccaagttgatggaaaccatctgaacttgagttactgtggagtcttttctaagagacttgaattcagtttctgggtctgttactttactctgtgaccttgggcaagtttatccatccttccttttcattacagagaatttcagacataaaagtcaacaatacagcagaaacagtggtttccaggggctgggggaagaacaagtaactgctaatggggtaaatgtccaggaattgaaagaggattactttttgaaatggtggttgcacaactctgaatgtactaaaaaccactgaattgtatacttcaaaaaggtgcattggccaggtgcggtggctcacacctataatcccagcactttgggaggctaaggcaggtgaatgacgaggtcaggagatcaagaccatcctggccaacatggtgaaaccctgtctctactaaaatacaaaaaaattagccgggcatggtggcacgcacctataatcccagctacttgggaggctgaggcaggagaatctcttgaaacctggaggtggaggttgcagtgagccgagattacaccactgcactccagcctggtgacagagcaagactccgtctcaaaaaaaataaataaataaaggtgaattttatggtacctgaattatatcttaatataatattaatatattattattaatataatttatatcttaatatctctatggatctcctccttgaaccaaactgttcattgcgtggggtcattgttccctccctgttatctgctatcgcctgcagcatgccaattacttggccctgaagttaatttctaacaatgataacatttaaaaatgtggactgtctcagccagaaatcagtcagctacttcaatgggtaaatacatcctggtgcccagacttgtggggacgacacatgggacaaccagaggacaagacgctaagtgctatctgttgaacttgcctcagaggtgtggtaaaagaaaagaaaatttaaaaataaaaaattaaaaaatgctgtctgacaagaagatagcggtaagctatcccccacagctggttggggatagaacttgagcctggcttggaagaatgggcaccattttgtctaaataaaaatgcaggccggggccaggcgttgtggctcacgcctgtaatcccagcattttgagaggctgaggtgggtggatcacttgaggtcaggagtttgagaccagcctggccaacatggtgaagtcctgtctctactgaaaatacaaaaattagccaggcgtggtggcgggtgcctgtaatcccagctgctctggaggctgaggcaggagaatcacttgaacccgggaggtggaggttgcagtgagccgagattgcgccactgcgctcccacctgagtgacagagaaagactccgtctcaaaaaaaaaaaaaaatgcagacttattttgctcagtgtctgctatgctgtaggtcctctctagagattggatctgaatttaggaaaagtaaaaagagttggcaagtgatgataaactgcatgagctagcaggggtttcaagtacaacacacacgataagtttatttgatttaagagagagaatacaggtgcggggctcagcatagccctcagtgcagagccagtacccagaagatgttattcattaggtaccgtgagcaaagaccaggagatgagcatggggttccgagcagggtgaatgcacaactgacagggtgggtagagtggagactgtgtcctttaaggcagcctgtttgactgcttttatcctggctgtcataaggcaagttttagggagcaggaaggaagaaatgctgaccgctatcagaaatttggcctagtggcctctcatcagggaaatgagcttggtctgttcggttggagttgttccacagagttcaaaggacaagaatgctgtgtgttcatacactgagctcttcgaagtaggaacttcgccctataaagcagaagagtggtgtttttttcttcttcttcttcttttgtggtttcacatagcaaatgagtgacagtctctacttacagacaaagtgagacgtcaggcattgagacgtgagtgtggcttgtatttctggtcctcccctgcttcactgctttcattttactcttatcgtgctttccagaaagtttgcctgctgggagagtctttttgatcgtttcccatgtgttgtcagatagctccatagaattcagtttctgagaaccagccagaagcatgcagtgacattgcacaatctgcctctgaagctggagatactagctgcagagctcaggggagctgctccacatcaccgacatgaagggaacaggcatcatggactgtgcgcccaaggtgagtgatgtggggctgtttgaatgggctctggcggggagcaagctgtgatgattaagggtgttgaccagctttagttgtgactttctaataaaggttgaataccagtgacgtgtgagttggagatgggaaagtttaacataagtttaagtgtgggaaatagatgtgttgtaaagctccttaccagtttgcatccaagatgggtgaaaatgactttgtagtagaaatcagcttacttggttgacagcgccgtccatcattttgcgtccagcaaactcctgaagcaagatgcgagtctgcctcagcccccgctaattccttctttctctggaccccaaagacactcagtgccactctaactgtcctatttggtttctgtgctcacctcccaacagcagagcccagacccttgcctgcagcctcccgtgctgagcccacagtgggcacttacatgttattttcatgttaacttgtgcattatgtgagcaaagctggagctttcagacagacttcatgcctgtcatgaatcaaaaaagattcactatttagaaaggtgaaagaagccaggcacggtggtacatacctgtactccagctaccggagaggctgaggtgagaagattaattcagcccagaagtttgagtccagcctgggcaacatagcgagaccccatcttaaaaaaaaaaaaaagaaaagaaaagttaaaatggctaccatattaaaaaaaaatttacccagacataaagaaagtgaagctcaaggttgtgttttcatcttgctatgccctttttaaattttaagtagaacaggaaaaaagaaatgaaacaagcagtaaatggggagcttgcttataaaaatcaatgcttatttttcattataataaaagtgactagtgtggctgtctgcggtggctcacacctgtaatcccagcactttgggaggccaaggcaggtggatcacttgaggccaggagtttgagaccagcctgatcaacatgaaaaaaccccatatctaccaaaaatacaacaattagctgagcgtggtggcgcatgcccgtgatcccagctactcgggaggctgaggcacaagaatcgcttgagcctgggaggcagaggttgcagtgagctgagattataccactgcattccggcctgggtgacagagcaagactctgtctcaaaaaaaaaaaaaaaaaaaaaaaaaaagtcactagtggaatttgtgactgagtaacccatgacagtctctcttgtatagattatatgtaaatatcttagctaccctagaattttgtccccaactacttactttgaaaaatttcaaaccattggaaaaatatgggaagcgtgggggttattcagtaaatccctgcatatccttcacctagatcattggtttctggtactttgtcatatttgtgtgcatttatttgtgtatatttagacactggaacacacttcatttttattgttgttgttaaactctttgaaaataaatggccaatacaatgacgctccacccctaaacttcattatgtgtctcctaagaacaaggacattcatctacagaacgtagaagaatatctacatatcatcatacccaagaacatttcacatttatttaataatgcctttctactattcagtctaattcacgttgatttaataatgccattctactattcagtccacattcacattttccaaaattatcctttttagcttttctggctgttgttgtttgtgtgtgtgtttgtctttctgatccaggtggtgtttgtcaattctcagttcttaatctagaacaatctactacctttttctctttcataacattgaccttttttctaaacagcctagattttttatgatttagacttctttttatgtactgcttattctgcctaaataatttatgtagcgctttacaattgggtggggttttgttatttaaaaaaaatatttttagcaatgggggtatcactctgttgtccaagctggactcaaattcctgaactcaggtgattcttctgcctcagcctcccaagtacaggattacaggtgcacaccaccgagccccactgcaatttgtaaataacatgcatgtttgcatagaacatataattgatattcccagcatccccatgaaattctgctattaatattatacagataggccgggagcggtggctcatgcctgtaatcccaccactttcagaggctgaagcgtgtggatcacctgaggtcaggggattagcctggccaaaatggtgaaaccccatctctagtaaaaatacaaaaaaattagctgggcatagtggtgcacgtctgtattcccagctactcgggaggctgaggcaggagaattgctttatatatatatataaatagtagccaacccttaccgattgtctacatgtgaggccctgtgctgagtgctctacttgcattttctcactattacatcctcacaacatcctcatgaagcagaggtattattcccctgtcacagacgaggaaacgaggcctcgctgacttgcccaaggccatacagctagtaggtggcaatgccaggaatcaaccccaggcagactaagctcagagctccattcttagctcattatattctctcccttgtaccaggggttggcaaactcttcataaagagtcagatagtattttatgctttgcaggccaaatacaatctctgttgcatatggttgtttgtttatgcagtccttaagatatgtacagtcattcttcacttatgggtcatccatctagatttggtccacaggcccttgtgtagcagcctatgtcatctcagtttacgtaggccacccccacccacccacgcagtaccaggaaacacccaagttgtcgacacctagttcagaggcatcctcagttaactgtttcttgggtgtccctacagaaactatcaatgcatctataagatacatgttttaaggttttacacaaataggagctgtaagtaaagatctgttgagcttcttgcctttagcaactaccaatacgtactggtgttcagttcatattagtgcagttgatccatctcattaatcttaatgcctacattgttgctcaattgctttataaatggtagcacaatgcttcaaggggtcatgtcatgtcagtggtccttagctttggggcattcgcctttaaaacaaccctgcctttcattcagggccaccgcagatagcctttcagaccctgaagttcgcctttgtacatcgtatggtaaacagggactgttctcgcaagctgttcctaattctacctgctggccagtagctccgttgccagtagagctgctttcacctttgtgcatggcagattttgtgtaatatccagactgatttattctattttttaaaaattgttttatagaacaaggcgaaatttttttaaaacacgtgatattagtgataggaaacactggcctcaaaggtggtaaatttaacacctcattcattggtttgtggaactctagccaactagtcaactccattcaagaaatactagaaatttagttttcgtgggtttttttgaggtggagtttcactctgtcgtccaggctggagtgcagtggcatgatcttggctcactgcaacctccacctcccaggttaaagcaattctcctgcctcagcctcccaagtagctgggattacaggcatgtgccaccatgctcagctaatttctgtatttttagtagagacgggttttcaccatattggccaggctggtctcgaactcctgacctcaagttatctgcctgtctcagcctcccaaagtgctgggattacaggcgtgagccactgcgcccagccagaaatttagttctaaaagaactaaaattgtctaaaagacaaggaggataagtgggcttattatacgtaagttcttattttggatttttggtagtttcaagatgccttagttacgaaaatagagtctgcaatgtactttagtgattcagtcctgtttgctataaattctgtttacttccgtgtgtgtgtgtgtgtgtgtgtgtgtgtgtatgcacacatgccattacaggtaatattgaaattagcatcttcatacacagcccttttttccccaataacatgattttctcactggagtaaatgtccaggaattgaaagaggattttactgaatgaaataagctttggcacttattttccatcattttctgagaatttctgatatttgattctattttaaacctactttccccagtattttctctacaatctgtactttcttttataaagacagctatgtgctcattcagttttctgaaggcatttttcaagcaagcatctttactatgttactgaagagtggatggtccaatatttatactgtaagaacatttaaatgtgattatctttcacattttaaattcagcctcaattaaagagcaaatcttttttgtctctctcccatctcaactctgagtggcatggttttggacccactcaagaaggatcaaggtaaaaatgtagaattttttaaaaaatcttccacatctcaaggttggtttaaacacgacaaaatgtgttggcttggaagtgtgtaccacttgctgggacttggcttgcttcagtgcttctgggcaagaaagcctggtgaggcttcgtttgtgagtggagagcagttttaggttctctttgtacctttagcagctctgaggtggtgagcaagacatttcaaactcagtctttgttgaagggcaaatgggattgtgtgcagaaagctgacctggcccttcagggcccattagatcccactccgagcagctctcctgcctcagttccttccccttctcccctgctgttccccgccttggattcttctctctctagcaagcatcgcctcacccagaggcctctctggaccacgctgtgcaaatcacttcccccctacacaggcccaccgccaacactctcatctatcttaccttcacttattaagatctgaaattatctcactttgtttgttcctctgtcttcctctctgggaacgaaactccatgagggacagacctgggctttcttactcagtgctgcatctccggtgcctacaacagtgcctgcacaaagtagttgctcaatacatgctttgtggtagtgtgtgaacgaatgggagcttacagggagtgcaggtggagccctggctgcagccccgctgtgaggataggaacagcactactttctagtcagcaggtgtttggcaacggaggtcattcctgactctcagctctctaacccctacctggcgtcagcctaagctgccactcagcctgttctcttgacaattgtccccctccttgtccatggtcagatgttgccttagatgcaagctgttgctattgaaatcaaggtcacaaagacctgtagcctccctccagcatttcccagcaacttcctcccttcatctattccacgaggcaaaacagcccagacacaacacccaactcgaaaacacagctcaccatccatgcctcagccattcacccaatgcatagttattgggctccgggggttcagggtgatcaagacagagctgacattccaatggagtgagcatgacagtgagtaaatagacccatggtttcaggtggtgagaactgccagaaagaggagaaaacagggggatctgatggaggcgatggatggaaaaggccactctgaacacccaagagatgggaaaagctttccaggaagagggaacagcagatgccaagggcctgcagtgggaaggtattcagcatagtacagggcccctgtaaagacccatggggtcaaagaagagtaaaccaagagagagaggggtcagaagtgagatctgaggtgtaagcaggataacatagggcctggtcggccgtgtaagagctttgaagccattctaattgcaaaggaaaccaccagcccacttaaagcaggagatgacatgatctaatttatgttttctagatcactcaggctgctgtgcaacagatgggctgtaagtaggaaagagcaaaagctggtaaacgtggagacttcagtgtaggtggcttcattttccactggggtggtaccctgctcttctccatggacacgaaggagaatcgtgtactctgtctttaaaaaagtagaacttttgatgtttgagaccgctggtcgccgtgtcgggtggggagtggttgtgagcagaaaaaatagtaaatcaaggagtagatagcttctatttatgtgtgttacgtttgattcaggaacacaatgtacctttcattccgtcaacaaatattgaatgcctgctgcacaccaggcactgttctaaatgcttccaagtccaagtgcctggtcccctttctccatatgtagtaaataattattatgactaataaaaaatccatcacatactcattattggttcccctgtttaatcacctgtagtctttgaacattttatttcctatagagcacacttggggggaaaaaaagctaaggagaatgccaccatcaccccaaaacttaaaaggtctgagaatagacaggcattggccgacacgataatggaatggggaagcaactgtagaatcaaaacagggccgttttggaattgcgatgactaagggaggaaatgacaggggcctgaaggggaaatagcttaaaaggaggaaggtgggaggctggtaagagagctgccacggagggggagattagaacactccaacttgagttgcaaaaaaaggaaatacattttttaggaaccatttccaaacataacgcctatgaagtgtttgttcaggggaagagcagccttgtacacacacctacgaaaagcatagtcgacactgagaagactgagaagaatatgcgtggcctcttgttcctgggaaagcatccccagctctcagtgtgggagatcctgcacttcccccacaccacccccgctcaggctggagtacagtggcacaatctcagctcagtgcaacctcagcctcctggcttaagtgatcctcccacctcagcctcccaagtagctggggcttcaggcatgcaccactgtgcccggctaatttttgtatttttagtagaggtgggttttttttcaccatgttgcccaggctggtctcgaactcctgtttttaagtgattggcccacctcagcttcccaaagtgctgggattacaggcgtgagccaccgtgcccggctaggctctgcactcttaaaactcctctaggaggccaggcacagtggctcatgcctgtaatcccagcactttgggaggccaaggcaggtggatcatctgaggtcgggagttcaataccagcctgaccaacatggagaaaccccatctctactaaaaacacaaaaattagctgggcttggtggtgcacgcctgtaatcccaaatactcaggagactgaggcaggagaatcgcttgaacccaggaggcggaggttgtggtgagccgaaatcacgccattgcactccagcctgggcaacaagagcgaaaactccatctcaaaaacaaacaaacaaaagaaagctcctctaggagatgagtgtggactgtgaaaaagttattcacaggcaatttgaggccacctacctggccactcagagagtttctccacgagtttatgttagtgaatgtattgttcttttcctttgaacaactgcttcaccttatcatcaagagcagcttttgtttgctctacatgttctggacagcccaggcagtctgtcttttgtggggttagggagggacagggggcaaaagagcagtagggtcatccctgtgtcttggaggtgtttgccatctggttaacagtaagtgaaaagtgctttgtggaatgttcactttgggttcagaaattttcttttagagacagggtctcactttgtcacccagactggagtgcagtggcgttatcatagttcactacaacctcaaactcctgggctcaagcaatcctcctgcctcagcctcccaagtagctgagactactggtgcacgccaccatgcccatctaatttttttttttttttttgtagagatgaggggctctccctatattgcccaggcttgtctcgaactcctgacctcaagcagtcctcctgcctcagcctcctaaagcactgagattacaggagtgagccaccacacccggcccaggttcaaaagtgagagtctccccacggttgaaaggggaatagaagcacaagagtcagtaatcaataacaaacaactcaaggtgctccttccttacactggtgttccccaaagtgaggtgaattgccagccactgggagtcagggccagttacataagacattctcggtaagccccctttgggtatcccaaataaggactggggtgggtttatgtgtagtccattattaacaactaaacgaacaaacctagtgaattgcaataaattcacaccaacagaacaaaagaagaaaagcttaaacaaaagagtggctccttgctttcctgaagcacctctaaaaatgaccatagaaagatggaaaagtttggtgaacaagcctgaaccttcactcatttctctgtcatgcattaaacagcttgagccagctttgaattcttcctggtcaatcaaatggaagtgccctgactgcaggcatgccagaggatttcaagtgtggtgcacagaacagtttttgtacaatactggtgtatcttgatttgcattcaaacaaactaaaactagctcatcaaacctgtaatttcatgggtaacatcgctgagggacagttgttttttaattgactcaatttgttattttacctaaaaaattgtagtggcacgtggatatgacaggaagcaggcagttgctagacacaaaaccctttagaaacacaggctgggggctgggtgtggtagtccacgcctgtaatcccagcactttgggaggctgcagtgggaggatcgcttgagcccagctgttggagaccagcctgggcaacatagcgagactatctctacaaaaaatttttaaaagtagctgggtttggtggctcatgcctgtagtcctagctacttgaaaggctgaggtgggaggatcgttcgagcccaggagttcgaggctgcagtgagctgtgatcgcgtcactgcagtccagcctgggtgacaaagtgagaccctgtctctagaaaagaaaagagaaaaagaaacacaggcttagacaaagttttcttctaattggtgtcggcataattgcttacgacccatcaaataacacaaaactccttctttctttatgcctttcctcacttttttccttaaaaaaagaaaaaaggaaagagggaaggaaaggaaaggaagttagagagaaaagcacctgcatgttattttctctgtaatccctcagatggctttcatgaactaagaggtaagagtaagagaagaattcatgggaaatgtagattttgcagctggatgggaactttggcgattgccctgggaagctatctcactttcaggtgaagaaactgaaacccagagaagttctgttacttgcctcctccttcggtgggtttttcatgagcaagggtgaaattgtcagccccttgacttgatccaacagttccccaaaccaaatatcttaagcaataactcagggacttagctggcaaggaatagacttggcggtggcaggcagtggcaaggctgtgaatgaacacactacgatctctggagcactttgagttggagaatgcagtctggtatgacatgggcccatcttgggccacatccatgataatcaattatgtgaaggcctgagagacctttattgttgcatcatttcaatcctgagcttagatcaaggaaaccagtcacctgttcccccggtgtatattgtcagacatacagtaggtgcttgataaataattgccaattcaatgaagccttaagtgcagcttagcaaggtttccatgagtagaggaagtatattaaagcatgtcgatctgggtaacacccaaacctgctggaaaagcacagtattcaggtatcagggaagcaaatgtttcatttccactgggtggctttggaatttttttctggccacaacctcctcctcaaagccccgttagtaggcagtgcctcctacagctgcggaagttcctttaatgtgtggctttttcatctgaatcatcaggaagaattcaaagctggctgggtcagagttcaatgttatcatggagaaccagttaaagtttgcgtttattcacagcatgtgccattctccacgattatttttagaggtcttaagaaaataaggaactctcttttcattaaagtttttctttttctctcatatccctcctcatatccaagttcacccggttcattcacttctttgtccctggtttctctggataaaccggccacaaaggctatttgcatccatttggatgggagggaaccaatgggagtgtgggagagaatgcgttatgtaaccagcccatccttccccatggctggggtggcaggaagggcagtgagcctcccccaggagcttagagacccactggccagatccacaggcaaggacagctgcagagaaagtttagacccagacctcacagcattcctgcacaaactcctacagaaagatttcccttcccaagcgacttctgctggtgttttccaggatatggatagtactttttaaaatagtttctttaaaggatcaagatgaaggtgaatgtgagtatctgagtttctgtcttctgacatccatttcctacaactctttgattgtgtgggactctgagttgactatataaaggggtccagagcttgttatttccaatgctccccactatattaaggaagtaggtaatgatggtttccaaatgactgtcacaccatgggaaacaattgaaagttgcatcaggttttgaaaccaaaaagggagaccttatatttttgtttagaaagttatattctattctattaagttttgttttaaagcttaaacattactttattttatttatttatttatttattgagatggagtgttgctctgttgcccaggctggaatgcagtggcgcaatctcagctcactgcaacctccacctcccaagttcaagcaattatcctgtctcagcctccccagtagttgggactacaggcatgcaccaccatgcccggctaatttttgtatttttagtagagtcggggtttcaccatgttggccaggctggtcttgaactcctgacctcaagtgatccgcacacctcggcgtcccaaagtgttgggattacagacatgagccactgcgcctggccttaaatgttacttaaatataagagtagttggaaaaagggagtttcaattcacacttccagttaagtaactttcagatcattttctgcacattctggagcttttcattcaataattttcacctttttcaaaaacggggctgaagcagaaactcagttcttttcctagcctatttggcaaattaatattaatcacaaaaaaaggcagcagtttcccttcagcatctctcacttaactactttgctaagttttttttaaacagctccaagagaaacaactgtcctttatgtgagatgatgcaagaaactacttagctatcacctcattaaaagaattcaaaatatttctgataatgagatgcagattattgaagcaaagctgtctcaagtttaacaacctcataaactaattctctcacacattaggcatgacaaattaaagagatagtttaatctacctgcaaattcttaaagcaagttctggttatgaaatataccattttgctattttaagtgacaattcctcataacttaaggaattttacttttaaatgtaaatattgatatggaaagccactgcaattcatgggggaaaagaaaagttaagatacagcttcggccaggcatggtggctcacgcctgtaatcctagcactttgggaggtcaaggcgggtggatcatctgaggtcaggagttcgagaccagcctggccaacatggggaaaccccgtctctactaaaaatacaaaaatttgccgggtgtggtggcatgcacctgtagtcccagctactcgggaagctgaggcaggagaattgcttgatcccaggtggcagaggttgcagtgagcagagatcgcaccactgcattccagcctggatgacagagcgagactctgtctcaaaaaaaaaaaaaaaaaaaaaaatcacaggttctttcttgggtaactatgtcaaaggggaaggaggcacaagggacaaagagaagacaggaatgagctggcaaaaatggagggaggaagggagagagaaatgaatgttagatgagggaggaggtggctggttgcctggtgctcccttctcaactgcagacctcacagcacaacttcaggagttgtaggaggttttccaggaggaaagtagggacatggttattctgaatgttttccccaacatcacacacatgcaacatgcagctactgtgtcctgatactgcatatcctaactttggccttggggaacatgtcccatcatgggaggccctcctctctggcctgggtctttgtacacagtactcagatcattctgcagctggccaaaggagagttcaaggatcactgggatagcaggaagggcagcgagcctcccccaggagctttgagatcctctcagtgcctcctcaacttgcctggaccaggccagacaaatctttaaaacactttgagtctaaacttctgtgactcttaatgcacctgcagttagatcccatttaacagtcattcgttgccctctctgtgtggttccactctgtggccctactctcaaggaagaggtaaatgctcacaaaatcagctagttctcagaaaccactcaagcacctttcagcatcctccatgctgtacacggtccaggccctttgagggatggccagtgagaagtagttgacgatgtttggcatcctggaagttcagggaggtaagaagtcttcctgcatgtggcaaactgcttttggccaagattaagatggactcaaagtcaaaattcctttctatctaatctaggagtagaaagggcttgcgtggtaacgacaagcagctgcttaaattcaccagcgcaggagtcctcttcttccaatagaacagaatcctttgtaaattagatttttatattgaaaaagaatatttacacatggttttaggaattccaactgtacaaatgaacatggactcaaagtgtttttatctaatcccaaacctctaactccccagacccctgtttcctacccagaagggaccctcagtgagtgacataatcttccagaaagatgctatacttataaaagcatcaatgcagacctatgctcatcttgctctttttaaaaaatttaatactacattttggagattgtcccgtttccattgacataagctctacctcattcttgtaatggctacattgtactccattatacaaatgtctccgtttctcagcttcatctccctctcccaggaggcactttgccatcttgtatctgctaagatgtccacaccgtcttgtgatagagtctgtgctaagcagagtggtttgtaggctaaaagagcacactccagacccaaaactgcctgcattccagtcctggcgttggcccttgatcgctgaactaccttaagctactttctcaccctctctgtgccttggcttactcatctcctaaatgagatgttagttatagtacctgcttcataaggtttttgaatatcaaatgcggtcatcagtgctgactgcttatcccagtgcctgacacagagttgagaacccgcgagctatcctgattcccgaggcgttggctaaacagtggacaagactgacacagttcctgcgtagttagagtgcgacagacactcctttcagggcgaacagaatggttttgtgaggggctacattgaatctaaaagattaaagaggatttttccctcttcttcttcttcttttttttcccccttcttcttcttctttccgcctccccctcccccgccaagacaaggtctcactctgtcttccaggctggagagcagtggcacaatcccggctcattgcaatctccacctagcccatgttcaagccatcctccagcctcagcctcccaagtagctgggattacaggcatgtgccaccatgcccagataatttttatatttttggtagagatgaggtttcaccatgtttcccaggctggtctcaaactcctgagttcaaagtgatctgctcacctcagcctcccaaagtgctgggattacaggcatgagccaccgcacccagccagcttctcccccttatttggttagttataggaaaataatactagctgacacacacagtgtgtgagaagtctgtattgttatgtggggtttgcaaagtgaggacactttccagatcatctttgctgtaactccctaagctaggcatggtgatgtgtgcctgtagtcccagctacctgtgaggctgaggcaggaggattgcttaagaccaggagtttaaggctgtagtgcaccatgatcatgcctgtgaatagccactgcattccagcctgggcaacatagcaagaccctgtctcttaaaaaaaaaaaaaaaaaaaccctctgtcacccttctggaggtgacttcacagaatgttgttacccaccagaaatccctcccagaagaagtgtctgtagatactttgatttttcctcaggttgtccttcctccttctctgtcttccctttttggagaatgtaggtgggaaaaatgtaggtggtgaggggatttttcttacgctcttggaaacttttttttaacataatatccttttaaaatgatggaaagtaaacattcacaagccaacagataatacccttctctctgcattaatctttcctagcctgtatttgaatttacatgaaatgaaatacttccaagtacatttgaagggagactatttacttgaaagatgatcaaagagccctttctccattctgcactctctcgatgttgagtctgggcacagctacctcataaaaatgtataacagaatatgtcactgatctcaacataaaagctcctacatccatggaaatccttcatgaacttcagggattcacatttcccatgtatcaaaagatctgtgatatttatagtatatgcagtttttaaaatgtggtttctctataactaactatcctttcctggccctcaaaggggaagtaggaagcattccatcacctcgcctgaatagtaactaagaattcttggaagtaagacatggaatcagtgagaaggaagccgaaatgcgaaacatggacatttttcaaagaaggatcttagtagaagaaaaatgtccttcttggccttggagatctacatctttgtacagagcaggggcctagacatcacttacagctctggcttcttgcacagttaccatctccaccactagtttggggaacttccttatttaccacctcccactatggactggtgacctcactgtatgatttaccttcccaaagaaagaatgatattctaggttacttggatggaaacggtctcatgatctctactttactatcccatagttactactgttttaattttaggagcataagtgtttggtgtcaggcgggctgtgaaagataaaacaaggaggaagcaggatggggccatgatgctgccctgacccctgtgacaggaaagagagaaggagctggacagagtagagacagcctcaaactgtggggcagcttagacatagtcttgacaactcaacaggggctttggggtaaagattgcccattcagtgagtcctgcattgggcaggaacacccaggccccctgactattaacgttgagtttgcaaaggaaatctggatggggtctctaagacctcagctgcgggctggactcagcagcagaatgcttcactgggcccaaggagtgatattttaagatctgcctgagcatgccacagcctccaccacacccaaatgtcttacgcctggcctgtctcactcatgtatatttcttgcccagctcctataatcctttgagtttgctgcttctccttacagctgtctttaaaccagctctttctggatttgcacacatttggatgtaagagttagcagattagagtaggaaacagacttggacttggaaaggccgtgcagagtattggcaatagcaggcttcagtcagatggatgcgagtttgaatccctgctctgctacctgctgctgcatgaccagaggcaggtcattaatctctcctagtcttaggtgccacaaagcactaaaatgaggccaacagagcaatcagtgtaccccccgacctgccccccagccctgacattcttgagtttctgcagctttgctcttttgagtaaactaaagagaaagaaaattgaaggtaaagcagagaagcaagctgtgcatgtgggcgagtgcacgtgggtgcagtcacccgggcagtgtgtccaccccggcctagagaggggatttccatcccaggaacagggacaatgaggcagcataactgaggctgcaggagctgcttctctcccggctcatctaagctgctcctgcctagagctgccatgcctgcggatgtctcttataccaccatggatgatgaaagtgtgcgggccagttccctctcttcttcttactttccctggcccattcagcagtgcgtccctcccttctctgcagttatgctcctgctcttcttccaagcatcacctcaagttgcatccagtccttcaccagctcctccccaaaactaacaaaatccagcctctgccctcagccaagccacaggcatctcccagctggaccagacaattgactttgaatcgcctctctggcttccacttgctccatgcaccccattttccacccagtaaccacctataaacagcatccgctatggaaattaggagccagggcctttgttgatctctctccaggcaacctggtcatttttcagttcctccaactttccatgcgcccccaacacatacatacacactcactcatactcacacacgccccctcacccacgcactccggcctccacacattcctcttcctctgcctgaatgctctttatctgactaacactttatctgactaactccttatctaactcctccttacccccagatggaagcttccatggctgctttctcaggtaaacgtccctaagccctcacccatcactacttcccaactgcacttataatttttcataacttcctgtattttttcataacttcctgtattttttataacttcctgtattttatttctcataacttcttgtattttctttccatctcacttacaagagatggaaaccctgtatttatttctgtgatgatttgattagaatttgtctcctccactaacatgtacatggcatgagatcagaaacagttttgttcaccacgatgcctccagcagagcccctggaatacacgtgatgctcaatacaatcttggtgaatgaatgaatgaatgaattgctccccagatttctccaagtgcagctaagaccactgtatccttggctgctcgggtttagatgagcacattgcacctgccagctgtggaaaggtctctgcactgaggttatcatcagcatgaaggcagtgagtctcttattcttcacgtttgtttccctatcctcctcctgttcttccttccaaatgcatattcattttccttttccctctcccagctgttgtatgaagatgggcatttgggggaaatgtcctttttggaaatcgtttaagaacatttcttccattgtacccagaatctaactgcttgtgtacccacaaggaacaaaaatgtgaacatacatcctccttcacctctgaaatttctacacaaatatttccaaattaacactctatttaagaataccttgtgagtggcctcagcaaccattgcaatggttactggatgcctttggagtggcctgtcaactgcttccatctgttattcacaaagagctcagtgcagcgccaggaacatgggtgcaggatgagtgctggctgctgctattgcaatgtccagtgctccctgcacgcccagcctgaccataacagcctgagcccagccaaaagtggggtggtcaggggcagcctctgcaaaggggtgactcgagctgagacccagaggaggaggatctggcggaagagagttctgggcagaaggaacagcaaagaaaaggtctgaggtggaagcaacctcagggcatttgagaaaagtaagaaaacaatgtgactggagggaaatgaatgagggtagagctgcaaactgggaggctgatcctgcctcgaagccacactaggaaggtgaccttttgttctgaatgcagttctaagcaattagaggtttttaaaataagagaccaacaggatccaattttatgtgtataaaataaaatattctggctagtgtctggagagtggattataaggtgaaagaatggatgtgaggaaccaattagaatttaagtgaccttggacaagtcatttgatctctctgaccctcagttctctcatctgtaaaatggggataagaaagtctgcctctgagatttcatagaaataggtaatattatgacttcagtgcatccaacacaaaataggttctcattcagtataattccctgttttccctccattccaggtaaggaactccccaagactttgcacatgcatttcattcgtcttttgtaacattaatattgatggtctttgctactgaaacgctgaggcataattaattgattgcatgagctgtccagagacacccctgtcaattgtaatgaaacgccatacagtgtttcattcatattgaggggaatcgtgttatggcaacatatttagagttttcctttgctgggagtttacatcctttgaagatgtggtctgctgtcctgaagacagcaggtcaaaattacaaaataaatcatatatcaagaataagactgctgctattcatcttggacagctgtgagtgcccagtggggtggatgatcataaaaaccccattgttctctgggaaaaagtccttacttttacaataggcaaatccgccagctaagctgcattcaatctggacccttcagggcagctgccatattgcaacaactgctctgtctaaagatatgcactatcttatttctagacaaatgcaagcacatttcagatgatcggtttttaaagatcgctttaaatgtatttcatgggaattacgatgaaatataccataattatttcattatagcctctgcaaaggcttttattttcccttttgttcccaatgtagatggttaaagtacagttttcaaaaaggcaaaattatgactctcatgcaaatataaaatgaactcatgtcaaagattttaatcaattttgatcaattaatagggaatcaatgaaatgttaaaactaggtcaaagatcgttgaggatacttgtccaacttgaatgaatttatttttaaaaagagatcattgaggggctaggtaggtataggcaatttaattaaggcatattagagtgtgattgcaaggctaagtatgaaactggttaaagtcctacaagataataaacctttcagattattgtttcagataataaacctttcagataataaagctttcagattattgttttttactgaacggcaattatttgtctatttaactggaaaaaaaatctgcaaagtagcatgtaagtttcataagtccttttttttttttttttttttttttttttgagagacagggtctcacttcctcacccaggctgtagtgcagtggcgcgatcttggctcactgcaacctccacctcctgggctcaagccatccactcacctcagcctccccagtagctgggactataggcgtgcaccaccacgctggacaatttttgtattttttggtagagacggggtttcaccatgttggccaggctggtctggaactcctggcttcaagtcatccacacgctttggcctcccaaaatgctgggattccaggcatgcaccatcacacccagcctaagtcttgacctttaatcaatactctttataagactctaaaactctagtcccttaaatacttcatcactgctggattctccaagctcagcacccacattcttgtgaaacccactcccaacacattcaagggataatgattccgtgtgcagactagttacgccttgaggtttatcttctggacatggctggtggtcattcttaccgaaggtcatccaaaagtgtgggcaggggcgtcacagaaatcttccctcttaccctactccagacagaaataggagcgctcatcctggtgtttgtgatttcttacctcttaaagacttgaaaatgggggcgttatgtcacgcctctctttcattcattaattcaacaagtagctaaagatcccctactctgtcctggatcatgggacgcagtccagaacaagagggtgtggccctcgctctcctggagcttacgttcttatggggagacagaccctggatgagttgaaccctaatgtgacacgtactgatgtgcaaaggtgttgggcagaagtatggggagaactagtttggtcaagagggtgtcagggaccctttttctaaggaagtgacatttaagataagcctgaaaggatgtgtggaatttcactgggtggaaagctgctgactgctttggggtagagagaacagcatgatggagggactcaagccctcagaaagggtgacaccctggaggccagtgaggaagtgatacctatgagtctggaagtgtgggaagaggcaaaatcacacagggccttgatggtttgggcacagtttgggctttgtccaaagggtaatagggagccactgaagggtggtagagaggggagtggcatgatcaaaatttgtgtccctgaaaaactcgaggacgacaacagtgccatatgtaataaacattccataaatgtttgctgaatctgtgaaggaacaattggctgacccagaaagacaccccatgggatgcctgacaccaggaagtacagtcattgtccatcggctgtagctcagctctctgcttttcaatgtcatctcatacactcactgggctcagacaagtgatagcttcatatcttccctctcacttgaggatttctgcttcaccatggagaagagaggaaatctctacaggcaggaatgcccctcacaatacacatgcccctaactcctttggggaccttttttctatggaaaaatgagttaaaagtgggtacagcagggaggtgacacatcccccgggttgcctgcaagttattccctcagcggcatgagggctgcagctgattctgtagttttgagtagtctgggtgttgctaagaatgtgctgggaaacatttcaagtttccttgacaaagatttctaaacaaatacatcatccaacaaagaggtaatgcacagggtagattagggtacaaggaactgtgcagtctcattcaccgtgggtggaggtgtgaattgattgaactttgctggagggcaacgtgacagcatccggagccctgatggtttccacccaccgacttcccactgaagaatttatccatggaaataaataaggggagttgcaaatattagctataaagatgatcatttcagcattgtttgtaatagctaaaacctgcaattagctaaaatgtccaaaaccaagaagaaaaattatgtttcatctgtacaatggaaaaccaagccactgttttaaagaatattgaaaaatgtttattgacacggaaagatgctcacaatttacttatttatttatttatttgagatggagtctcactctgttgcccaggctggaatgcagtggcaccatttcagctcactgcaacctctgcctcccaggttcaggtgattcttctgcctcagcctcccaagtagctgggtctacaggtgcacgccaccactcccagctaatttttttttttttttgtatttttagtagagatggggtttcaccatatttgccaggatggtctcaaactcctgacctcatcatctgccccctcggcctaccaaagtgctgggattacagacatgagccactgtgcccggtcccacaatttatttttaagtgggaaaaaaaagcagattataaaattgtgtgtttcatattatgccattagattttaaaactttaatgatgactctaggtgtgtatgtgaacaactatgcaaaagaaaagatctggaaacacaaaaaccgaaggattaacagcagttacctgtggtggcagcactgcaggcattttaattttcttctgtttgcttattattatttttactttttctttaatgaacttttattacttttgtagaaagaacaaaatgttttattttcaaaaattgttcatgatctcctgggatctcagctgtattagattttgtgggggatgttcaatgtctttctgggtgcgtgaaggatctgattcttcttacgctttttagatagacttgtagtagtgtttcccctaatccacacagacctgcttgtctggttaagatggtatttttcagcattggtcttccaattccatttttgtaacagaatagagatattaggcaagaagcacaataattttcaacaaacataatggaagagttggtcacttttgctttatttatgaaagtatgaacaaaggttaatgagtttaaaaggtgtaattaaatttatttagaaaaataaaaaacaactggaaggataaataccaaaaatggtgtgaattggtatcttttagtggtgggattatgggtaattttcacttccttcttttatttctctctttttctgtaatgaacatgtattgatataaaaagattgggaaaggtgattactttaaaacctaaagaaacaagttgccttcatgtaattacagtggaaagttcaaataagaagggggctcggccatcactgccgtggtaacaaggcgactttttttagaactgtgtggctaactgaaagagcatgggttggagaattaggagactgggtttgatcctggctttgtgaccgcaggcaagtcactaaccccctaagtcttttgtcattcactagtttttcttttttcttttgttttgtttttgagacagagtctccctctgttgcccaggctggagtgcagtggcatgatctcggctcattgcaacctccgcctccagggttcaagcgactttcctgactcagtctcccgagtagctgggactacaggcatgcgctactctgcccagctaattttttttatttttattagagacagggtttcaccatgttggccaggctggtcttgaactcccggcctcaagtgatctgccctcctcggccccccaaagtgctgggattacaggcgtgaaacactgcgcccagcctcttgtcattcacttattaatgaacatttactgagcatactctatgtacctgggtctgggcctgacactggggacagaatagccaagtgaggtgtgggcccagcagtcacagaactgccaatccaattcagaaggaaaatagcaaaaaccagacaaaaagcaatctaatagtaataacagtcacagctgcctgtaccaagtacttactaaatgtcaggcacctgtacatgacagagagagagatacccatatgtatacacaatatataatggattgctatatatatgtgtgtgtgtgtgtgtgtgtgtatatatatatatatgtatatatatatatataggatatatgttgggtacatatatatatcaacccgtcatatatagtgtgtgtgtgtatatatacatatatataaatatctcaacccatttaattctcacaataaccccatgaggtaggtattactattattaccattttacagatgaggaaactgaggctctaatagggtagctaatttgcttaaaggtacacaggtacgaatttctaccccactatgtgcgctatgctgcactgaactacataactacaagggtcataatttccacaaattaaaacagggccatgacccaggagttggaaaccagcctgggcaatggcaaaaccccttctctacaaaaatacaaaatttagcccggggtggcggcacgcatgtgtagtcccagctacttgggaggctggggtgggaggactgcctgagcccgggaggtcgaggctgcagtgagccaagatttcaccgctgcactccagcctgggcaacagagtgagaccctgtctcaaaaccaaaaacaaacagggccatgaaagcatattaggaccatccgacctcgtctcaggatacaggtaagtctgccctgaggatgtgacatttcacttagaccccaaggatgtgaaggaacaaatcaaagagcagggacaagagcctctggggtggaagaaatgaaatgaaagggcatgatgaatttgtatgaagctttctaagagagtgggattggagtagcagtcactggccacggtgctaactgcaaattctcttctcccctctccacccacaggcactcctggccagggcactttatgacaactgccctgactgctctgacgagctggctttcagcagaggggacatcctgaccattctggagcaacacgtgccagaaagcgagggttggtggaagtgtttgctccatgggaggcaaggcctggcccctgccaaccgcctccaaatcctcacggaggtcgctgcagacaggccgtgccccccattcctgagaggcctggaagaagctcctgccagctcagaggagacctatcaggtgcccactctaccccgccctcccactccaggccccgtttatgagcagatgaggagttgggcggaggggccccagccccctactgcccaagtctatgaattccccgaccctcccaccagtgccagaatcatctgtgaaaagactctcagctttccaaaacaggtacgcatacttccacctactagacatgggttgaggggtatggaaacacccagaggcctaactacctcttgaggcatgggtgtccttcagatcaaacacgcaaaacgggagcccagattgctggcaatcacgctcggggagcttgtgtgccaggttgggatggagaactcagcggcctccacccccttgtcgttgacacccttggcgccactgtgattccccagctctccaaggctgggcacactctgtgggaaatggaatgcttagctgagctgtgtgggaaggcactgaggatgttcgtggcacccttttcacaggatgaaggatcaccaggactgccagtgacaaatgggagggtggggtttccatgggttcagaggcaagaagttacacatcgcatttaaaatgtatattccaggctgggcatggtggcttacacctatctatattcccagtactctggggggacgagacaggaggatcatttgaactcagagttcgggaccagcctgggcaacatagtgagaccctgtctctaccaaaatttaaaaattagccagcatagtagcacacatgtgtagtcccaactacttagtgggaggctgaggcaggaggatcggttgagcccaggaagtcgaggctgcagtgacctatgattgtgccactgcactccagcctcggtggcagtgagaacctgttttcaaaaaaaaaaaaagtatatccccttcaatgcagaaattttatttctagaactgctatggaaatatacaagcaggcaaatatatgtctggatgaggaggctgtagccattatggcatagaaaactcaaagaggcctaaatgtttattaacagtggattggttatacatatcttggcatatcaccacaacaagctgctgtgcagttgtttaaaaaaagaatgaggcatttataagagggaagaaagatctatttaaacaaaaaccaaacagatataaactcaaaaaagaggcagggcgcaatggctcattcctgtaatcccagcactttgggaggcggaggcgggcagatcacaaggtcaggagttcgagaccagcctggccaacatagtgaaactccgtctctattaaaatacaaaaaattagctgggcatggtggcaggcacctgtaattccagctactcgggagactgaggcaggagaatcacttgaacctgggaggggaaggttgcagtgagctgagatcgcaccattgctccccagcctggacgccaagagtgaaactccatctcaaaaataaacaaacaaacaaaaaactctaaaaaggaattctgtatgtgagtgtgtatgtgcatgtgtgctctcacactgagactgagaagaacatgctccaggcatagttaccccaaggaaggggaactggttaaagagaaagggagcagtaagctggggcctttattttattcattcctgtgtcctcagcacgtgggaccaggcctggcctggggtaggtgctcaatacatatctgacaaacaaacaaattaggaagttgatttttatgtcatattgaacatgtatgacatctgtaactttttaaaatatcaattattttgtttttttgagactgggtctcgctctgtctcccaggctggaatgcagtggtgcaatcactgttcactgcagcctcaaactcatggcctccagcaatcctcctgcttcagcctcccaaagtgctgggattacaggtgtgagccaccatgcctggcctaaagtatcaatttttaaaaacagaggaaaaagagcattcattaaatgtagaatgggctaggcttggtggctcattcctgtaatcccagcagtttgggaggccaaggcaggaggattgcttgagcccaggagtttgagactagcctgggcaacatagtgagacctcatctttactaataataataaaaaataattaggcaggcgtggtggcaggcacctatagtcccagctactcaggaggctgtggaaggaggaccctttgagcccaggagattgaagctgcagagagctattattactacggcgcccctgcactccagcctgggtgactgaccgggaccctgtcttaaaaaataataaaacaaatgcagaatgaaaactttttttaataaggaaaagaattaaagtaaggaaggagaaaaagaatgcgctatttccctcaaagccctggccttcatgaggtgttgagatgtagagcagatgtgcacaggcctcagtcactgcaggcatttcctgccatcagatgctttgctttcagctcccatgacacatcccacccggccacagctctggcagagggtcttggcaaggtctgtgtgcagggaaaggccaagctccctgaggcatgtgctgtgggggccccaggaatgtgctactcaccattcaggccttctccacaccagcttccaaggttgtcttcaaacaggaaagtgttgattccttagaagattttgaatactttacattttctaactccctgggctacaagacatagaaccagacagttgttacatagaacagctgccagcacaggcactcgctacaaacaccaggaggaagctggtggcgccttctgaagcagtcaatgaggtggacactaactctcttttctggaacaactggccccgatctaggcctggcatgctcagctgctgtctgagcagctgactcggagcagagctttgctgaggtttcttctaagaacaacaagtgacattaactgaagttaacttgaatttcttccaaagccatgaaaagaaaaaacaaaaaatcaatagcaattccttcctctccctgaaaggaaaacagatgcgctgtcctctgttggttgaccagaggaccctcgaagaccacttcacaatcagttaagttttctgatccacagaaaaggctggcaaggctggcacctcctccctgctcatgccactcaatacaatgacaggctcctacaaggtacttagtaaatacctgttgcatgaatgaaattgaccaaacacaacacaaggtttcaaaaacatggagtccactatcaactgctagactgacatccgtgtgaaaggaaagatgagtttactattgaaacttaactttgaaaaatgatcagggcattagcaatgagatttgtccttgatgttaagtgcatcaaccatttgaggccttgcttgtgcaggctgtggcaaacaacagaaaccgcaaggaaattcagggggggtccctttaaccactgagcagagttcttgaggtggccacagtaaaaccccccaggggaatttcctgccttgttttccttccttaagttccctccatgtctgccctacctacaagtttgctcccttccttccctcccttcctatttatttacttaaaaaaaaaaatttttttttttttttttggaggcagaatctcgctctgtcacccaggctggagtgcagtggcgtgatctcggctcactgcaacctctgcctcctgggttcaagagattctcctgcctcagcctcccaagtagctgggaacacaggctcccaccaccacgcctggctaaattttttttgtattttttagtagtgacagggtttcgccatgttggccaggctggtctcgaactcctgacctcaggtgatctgcccacctcagcctcccaaagtgctgggattacaggcgtgagctactgtgcccagcctatttacttaaacattgttttaatttattggctgggtgcggtggctcacacctgtaatcccagcaatttgggaggccaaggcgggtggatcacctgaggtcaggagtttgagaccagcctggccaacatagtgaaaccctgtctctactaaaaacacaaaaattagccatgtgtggtggtatgcatctgtagtcccaactactcagaaggctgaggcaggagaatcgcttgaacccgggaagtggaagttgcagtgagccgagatcacgccactgcactccagcttgggtgacaagaggaaaactccgtctcaaaaaaataataataatttttaatttcttgccttctctgtgcttggagtctcttagcaagagatgtggtctgtggcttacaactcaggagtgccatctcatttggcttctggggcagccaatgttgcactgggtgattggggacctcccaacaccctttgtgtttctccttcctcctctgtatagggagaaggttggaccccatcttttctaaagtcaccttcagatgtaccttttggtttttctaaatactttcttcttcctctactctgagaaggaaggagctagaagaacttgaagaccagttaacaatcagttacacattttctgatccacagaaaaggcaggcgtctcctccctgctcatgtcatctagccattaaccctgaggctaaacccgcccagaaaatacattccaaatggaagcggctgttggtagacggggcaactctgagccacgggttttgaactgttttcccatggcaaattcacaggcttggaacacagcctttgtgaggcacttcacggactcctttctatatctgtgttgacagtctgcagactaagagtggccccaaattaacatccgagaaggtggaaacatgtcatttttctcaagttgtcctaagagaggcgtctatgtgtcagaatcagacatctctatagctgggtgcgatctctgcatatctttagattagaacaactcttcattttacagatgaggacattaattcccagggaggtgaaactgctcgtgcagccacacagctgatgaagtacgacttccatcaccccccaaaacacagcccttattccttgatcttctttcacctgactctgtggctgacgctattctttctgatgaacactttactgaaatttcacctacagatgctacgttacagctctgtaacttatatccagaccacgaaacaacaaaactaccaccccagaagcctccagtgccttctctctgtcacttccccactagggtaaccactatcttgagctttgttttactttttatcccaacttccttaatataatgtgctggcctaatttaaaaaaaaaacccaccacatcaagagcatatttgatttcagtttaaattcagaagggactcttgtatttcaagagaaaagggtcagatttcctggtgaaactgcttttggatccactagttcctgaactggagtttccttctgtctccctaaacctttcgaaactgtgtttctcaaacatgttccttaactgattgccatactgggcctacgttttccaagaagcactgggcatttttgagctggcttccttccatctgaaatgtcatacacaggaaagtccctttgctctgtggaggtgcccttataggcaaaggggatcccacagtcagccatcaaaataaaatgggcctgaagtcatggggaggaatgggccttgggacagcatttggaaagggtctgcggggggagaaagcttggtgtgtttctgggaggtaccactggcggtacagccagtggtccgggacactcactcaaggtccctgggtgtggcgggtgcatagcttgtcagaccgggtaagcagcttggatttctggcctggcgcggtggctcacgcctgtaatccttccactttgggaggctgaggcaggtggatcacttgaggtcaggagttcaaaaccagcctggccaacgtggtactaaaaatacaaaaaagtagcggggtgtggtggcgggcacctgtaatcccagctactcgggaggctgaggcaggagaatcgcttgaacccgggaggtggaggttgcagtaagccgaaatggcaccactgcactctagcctgggtgacagagcgagactccgtctccaaaaaaaaaaagaagcttggatttcattcaaaatgcaatgggaaaccactgatgggcttgtccacctagaccaatcagcctgagaccatcaggaacaaagtcaggtttactgagtgtaaagagggagatcacagagcagaggaaccatgaggcagctcacaaacaggaaaaggtagcatcgtgatgggatggggaaaggcggggtttaggtgaagtctaagcgaagctgtgtcttgataggctctgtgcacaacacggcagcgtgcaggctggacgagggccgctctccccttgggaaccacgaagcggagatagagggggagtcctggacccggaaaccccttgtctgaagcgctacatgagggcctgggaatcaaggctgcttctctgtcaatgactcagatcccccaggcgagagtgggatgcttcattcttactgagagcgctttggaaagctgggcttcgagagcctaggatttcagggaaccaagtttctcagggagtaagaaagcagtcgtcactcaacgaagggggctgttttgacatgtgacagctgcagcgtgtccttggaagaaatgttcatcctgttcgcattgcggctgctttgtctgcatccgtgagtctagccagatgaatggcggggtggatttttacactgtgtgctaatgtttaccatccaagccgtacacatccactcaccaaaaacaaacagataaatctagcatgtacattcccagtgctgcatcccggggacaccatgatgaatagagggaccctgacccagtcctcagaaactgctcctctgcctgcgttcccctccctcagctctgcatattgaaaccctaacatcccctgagccaacttggaaagccccctactgagcaacagctccttgggacgccagtgggaagtacactccccctgtcctggactccggagcttcaccctgtcctctcctccaggccctgtcttgcttaccagcctgtgcccagcctatattcagacctcatttccctcttagactttaagcccgtggtagacagcatcttctactctagaaaaatgtgcgcattcctagtcccctcctagagacgttctagttcaggaggtctgggtgggagacttggcagctgtattattttaaagttccccaggggactcggatccctggctgggtttggaagctgctctgtggcacccagtgtggtacccaccattgagccaacatcattgagctctggaggattaacttgaatctgaagttcccattcacagacccaggttccatggctgagaccatgtttcccaaagtgccttgagcaataactggccaggtgctctcaataaaatataaatcggggccaggcgcggtggctcacgcctgtaatcccagcactttgggaggccaatgtgggcagatcacctaaggtcgggagttcaagaccagcccgaccaatatggtgaaaccctgtctctactgaaaacacaaaattagcctggcatggaggcatgtgcctgtagtcccagctactcaggaggctgaggcaggagaatcgcttgaatccaggaggcggagtttgcagtgagccgagatcgcgccattgcactccagcctgggcaacaggagcgaagatccatctcaaaaaaaaaaaaggtttatatgtatataaattggatggtcaatcccatcctttgtaggacaaaattcaaactccttcactgacctgctccctgttaacctttcccactccacctctccctcctcccctccctcgctcctctccatcactttcacattgccaggttctcttctgcctcccactgctgccagcaaaagctgccagctgcagctcaactggtcacctcctgcttccctgcctcagcccaggtgacaagtccttagacagctctcagacctcagtttcctcccagaccttgttggtccctccaccttacattcttaaagtcccctctgcctattgcgtgcacttctccagcctcagcctagctagatgaatgtagacgaatagctcagtatcagagtcacagcctcctggtccctagagaacatcggaatcacctggcaagcttgttaacactgcaggttcccggcccccctcgacacccagagactccgtccaactcgcgtgggcccaagaatcttcatgttaacctgcttcaggtgaacttcccaggtgaggcaggtaaagaacatcgtgggccacgtgcgaggaaggctgcctccaccggggagcctcccacccgtgccctgctgtcttgagagtgaagagcctgccagcgggggtgccgggcgaccccttcagcagtatccacccagctgtctctgcttttggagagatgactttgaacctgattgtgatcatcagagtgacatttccttttcctcttttctcctcctttctctccaaggccatcctcacgcttcccagacctgtccgggcctcactgccgactctgccttcccaggtgtatgacgtgcctacccagcaccggggccccgtggtcctgaaggtgagccttgttcaggggcccctcatcacccagacctctgcgcccagagtctggggttcttgggatcatgcccacattgcatttcagcattaccatggcggccaggggctcagcctccagaatacacatcaccactcagaggccaacttcataacctcctttttacccatggagcccagtcctgctctagaaaacattatgactacttgagttctgaatattttgaaatttttacttttcatttataatagattgttttttctttttcttgttgagatggggtcttgctttgttgaccaggctggtctcgaactcctggcctcaagcaatcctcccatctcagcctcccaaagtgctgggattatgggcataagccaccgtgcccagccattatttataatagatatttaatatatgtatgtgtgtacatacacacacatttttttaaatgatattttgaaggatatgcaccacagtcttaacacggattatcactgattatcttaacattgattatctctgggggaagaaattttagttgtttttttttaacttgtttgtatataagtggaatatcacatttgtaagacatgcttcatgtgatcaaaaaatagctttgctcctttcttagcccatccaaatgctctgcggtggcgttctccccacccacctaccattgggatcagtagctcccaactttcgttgtatgcaaaagcatctgagagctttagccatcctggtgcctgtgccccaaccccagagactgttgaatcaggtctagatggggcccaaacatcaggatttttaaaagccctcaggtgattgtactgagcagccaggattgagaaccacagttccagtctaaataaaatttcaagcaggctctgtgacttcctggtcactcacaggtaataagtcacttttggccaggtgcggcagctcacacctataatcccagcattttgggaggccaaggcaggaggatcacttgacactaggagttcgagaccagcccagccaacatggtgaaaccccgtctctcctaaaaatacaaaaattagctgggcatggtggttcacgcctgtagtcccagctactagagagggtgaggtgggagaatcacttgaacctggaaggtggaggttgcaatgagctgagatcacaccactgtactccagcctgggtgacagagcaagactctgtctgaaaaaaaaaaaaatcaaaatcaaaaattaaaaaaaaaagaagtcactttagccttgctaggctcagttgagaaatttaattgtccaggcaataatcaaactttctagttcatttaaagctaaagctcctgctgcccagcttgggcctgcctgctgggctgggctccagggactggctaagttctctgctggttcaccatctcaggtttctaccctttctcactcactgggtggtctcagactcctgcagggctgcaagaggcaggcagggacaaaggtcctgctcacctggttctgttggcagatgtgctaatagcagtggccagtatggcaagctgattctttctcttctggggtattcctgtaagtgccccccacctcctacccctcacctccttgctgagcatctcttacctgcaagtccctccaggtggacaaatgcatctcctctggctgctggctcctcccttagctctggggcaggcaggtcatttccagccacatcctcgtgacattccctgagccattcctccctggctcttgctccagctcttgtgtgagccatgcctggtccatgacaaacacacaagctccctttgccatgatagactccaggagcacaggcgcttgccttgggtgtaaaagttatcaatgggccgggcgcggtggctcacgcctgtaatcccagcactttgggaggctgaggcaggtagatcacgaggtcaggaggtggagaccaccctggctaacgcggtgaaaccccgtctctactaaaaatacaaaaagttagccgggcatggtggcaggtgcctgtagtcccagctactcgggaggctgaggcaggagagtggcgtgaacccgggaggcggagcttgcagtgagcagagatcgcgccactgcactccagcctgggagacagagtgagactctgtctcaaaaaaaaaaaaaaaaatagttatcaatgaagacacacttgtatgactcatttcactcatcttgccctaatcccagccccactagaccctgtctttatgtaaaactgtgacattttgttcaccatgatttttttgcattatgatttttaaaaatattgcattttaaatagtatttactatgatgattgagttttttggtgccctcttaatgttgtgcccaaggcaactgctttgctctcctccccctggtcctgaccctgagaacaggccatccacagcacggctgccaccctctctcttttcaactttcccaagccagagtcagcgcccaaccactgtgaccccaagctcaggggatacaactcaagtcattgaatggtcccatgggaacacttgatggtttgcttttggggagtgaaaggcaacccccgctacaccgcaccccatttcccagctgaggagagccctcaggagactcacagcccaactccctctacagaaaccccttccaatatccaactctttctctctttctttgcaaaacctattttggtgctctcttgccttgctttggaatttgtaacctgttttttgtatcctaatatatatgttttttaattactgtacacattacatatataatatgttatgtcatatatatatctcaagccactgaaggagtttgagcaggggagtgacaatcagatttttaggaagcacacatcatcactggccgtcagagaaatgcaaatcaaaaccaccatgagctaccatctcacaccagttagaatggcaatcattaaaaagtcaggaaacaacaggtgctggagaggatgtggagaaataggaacacttttacactgttggtgggactgtaaactagttcaaccattgtggaagacagtgtggtgattcctcaaggatctagaactagaaataccatttgccccagccatcccattactgagtatatacccaaaggattataaatcatgctgctataaagatacatgcacacgtatgtttattgcggcactattcacaatagcaaagacttggaaccaacccaaatgtccaccagtgatagactggattaagaaaatgtggcacatatacaccatggaatactatgcagccataaaaaacgatgagttcatgtcctttgtaggaacatggatgaagctggaaaccatcattctgcacaaactattgcaaggacagaaaaccaaacaacgcatgttctcactcacaggtgggaaatgaacaatgagaacacttggacacagggtggggaacatcacacaccggggcctgtcatggggtagggggagtagggggagggatagcattaggagatatacctaatgtaaatgacgagttaatgggtgcagcacaccaacatggcagatgtatacatatgtaacaaacctccacgttgtgcacatgtaccttagaacttaaagtataataataatcataaattattaaactaattacacagataaaaataataaataaataaataataaaataaaataaaataaaaaagatttttaggaagcacagtgcctggcacttaggtcattgctaagatgcacatttatcaaatgagtctctcataccctgtttttattgctgtcgtgatgtgcacagtgtcatccagcttcgtgtctggtcattagtgggcactcgttgaatatttgcagaataaatatgaatgataaaacaggaaaatttctactgagaaaaagaaagaagacatattaggtctcagtctcatttatcctctggcttaattttaagatgaactcaagataaattaccatttttaatttaggcaactgcagttaaggctctcttgtttgccccccaacctttggttgagaggtctttttttttttttctttgagatggagtttcgctcccgttgcccaggctggagcacaatggtgcgatcttggcttaccgcaacctccacctcccaggttcaagagattctcctgcctcagcctcccgagtagctgggattacagtcatgcgccaccataccaggctaattttgtatttttaatagagttctccatgttggccaggctggtctcgaactcccgacctcaggtgatcctcctgcctcagcctccccaagtgttgggattacaggcgtgagccaccacgcccggctgagaagtctctttttaaagcacaaagtccattgttgaatgtataccctgttatgggaaaaaggactgtgatgtcccctgcgttgcctcagacaaggaaggcgggagacctgtcacccagatttctaccattacagcatcatgaccaaaagcaccgaaaagtcttcaggaatttgtgtcttcctttggaaaaaaacactggaatagggagtgttcgtgatgtgtagccattaggaaagaaacattcaagttgtctgcctttgtggtctttccccaggagccagagaagcagcagttatatgacataccagccagccccaagaaggcaggactccatcccccagacagccaagcaagtgtaagtatgaagaggtgctaaggtgcggtgttatgaacacacaaaatcctctcagaaatgttattagcttggggccaggcacggtggctgaagcctgtaatcccagcactttgagaggccgaggtgagtgcatcacctgaggttgggagttcaagaccagcctggccaacatggcaaaaccccatctctactaaaaatacaaatattggctgggtgtggtagtgggcgcctgtaatcccagcactttgggaggctgaggtgggcagatcacttgaggtcaggagttcaagaccagtctgcccaacatggtgtaaccctgtctctaataaaatacaaaaattaaaaaaaaaaaaaaagaaagaaagaaatgttattagcttggtcaaaaattagaatgcaaattcctcataacagagaccttgttgcatttgaggtaaaacctctcattgcacttgtgttcaggaataggactaattacgtggttgggataagtcgtttaacttctctgtttttatgggctgggagtattaagtgagataatcctgcaaaggacccgggacagtgcctggcatggtgtgaaattatgtaatggcttcttcttacgacagacctcaggggcgtgctgtgatacagtacacttttatctgtgttgggcaaaggactttatctgaaatctgtgtaatctatgtttataattggattctaccacatgtgtcccacagacacacttacacccaaggtcattagggaacatcttacaagaaggctggcatttcgccgtgtcagggggatgcatgggagtttggtggatggaaaagaaagggttgcaagggcatttagagcagagaaaccagtttgggtaaaattaaatacactggcatgagtcagtgttctgagttcaggggaaagtaaacagcttgggtggctggacctgtaagcagatggtggcagaccaggtggggtcagcgtggtggaagtcgaaagaaatgaggctcaaaagaatcctgaaggaccttgagtggtaacagaaatggggagccactgaaggagcggcggagtgacgatgagatttaaacaacgcactcgcgccctctttggaaagctactaacccggcaactatgtgtggttctcccacaggggcagggtgttcccctgatatcagtgactaccttaagaagaggcggttacagcacattaccaaatcctcagaaatcggaatggatttatgacactccagtgtctccaggaaaggccagcgtcagaaacacgcctctcaccagctttgcggaagaatcaaggccccacgctctccccagttccagctccactttctacaatcctccaagtggcagatccaggtccctcactccacaactgaataacaatgtgcccatgcagaaaaaactcagccttccagaaattccttcttatggctttcttgtacccagaggcacatttcctttggatgaagatgtcagctacaaggttccttcaagctttctgattccccgagtggaacagcagaacaccaagcccaatatttatgacatccctaaagcaacgtcgagtgtttctcaggctgggaaggagctggagaaagccaaggaggtgtcagagaattccgcgggccataattcctcatggttctccagacggacaacttccccatctcctgaaccggacagattatcaggttccagttctgacagcagagctagcatcgtttcctcgtgctccaccacatccaccgacgactcctccagctcttcctcggaggagtcagcaaaggagctctccttggacctggatgtggccaaggagacagtgatggctctgcagcacaaggtggtcagctctgtcgctggcctgatgctctttgtcagcaggaagtggagattccgagactatctggaggccaacattgatgcaatccacaggtccactgatcacatagaagaatctgtaagagaatttctggattttgcccgaggagtccatgggactgcctgtaacctcactgacagtaaccttcagaacagaattcgggaccagatgcagaccatctccaactcctaccgcatcctgcttgaaacaaaggaaagcttggataatcgcaattggcctctggaagttcttgtgactgacagtgtccagaacagcccagatgaccttgagaggtttgtcatggtggcacggatgcttccagaagacatcaagaggtttgcctccattgtcattgccaatggaaggctcctttttaagcggaactgtgaaaaggaagagactgtgcagttgaccccaaatgcagaatttaagtgtgaaaaatacatccagcctccccaaagagaaactgaatcacaccaaaagagtaccccttccactaagcaaagggaagatgaacactcttctgaactattaaagaaaaatagggcaaatatctgtggacaggtgagttcagagttccaagtgatcgaaaaaggggcttcaattgttacctggagtagtggctactaagatgctgagactctttccatagtgtataggctttggggagacactggttccattttctagaaaataaaatttatgaaagtaaaattcttgatgaaatcttattaacaagtcagataaagataggtcagcataggcagataggtcagttgatttggatttcttccgaaaacttttggcgttcaagtttaccatattagaattaaaagggatttttaaatttcttaaaaatttattatttgagtagatttttaaaacctcaccaccaagtctccttgcatttttgaaagttataaatttagtcattctcagtgtgtttcttagcaacgaaagaggaagtagaaacattctttcaaattgcccatggtctgatcagcccccagacttcagctactcttagaaatacttttctgaggctgggcctggtggcttatgcctgtaattccaacgctttgggaggccaacgcaggaggatcccttgaggcaggagtttgagaccaggctgggcaacatagtgagaccccagctgtacaaaatttatttttaaatatccaggtgtagtggctcatgcacttgggagtctgagtgggggtatcccttgagaccaggagtttggggttgcagagagctatgatggtgccactgcactccagccttggtgacagagcaagagctaatctctaaaaaaaagaaaagaaaaaaaagagttgggatatagtggctcactcctgtaaacccagcactttgggaggccaaggcgagcagatcacttgaagtcaggagtttgagaccagcctggccaacatgatgaaaccccatctctactaaaaatacaaaaattagctgggcatggtggtgtgcgcctgtaattccagctactcaggaggctgaggcaggagaatcacttgaacccaggaggcagaggttgcagtgagctgagattgcatcactgcactccatcctggaccacagagcaagactctgtctcaagaacaacaacaacaaaaaaacaaaagacagaaagaaatacttttctggatgagttcagacattatagagcgagatgcttcagttcagggattgtgagccttaagaggcccagaagtcacttgggggctgtgtcaaggagataatttgctactttcagccccgacctttgtgttctgctgaaatgcctggtggtgtaggagctttaacatgttctagaaatttggatgtttaaaatttacatacacatatatataactttaaacaaaccatgtgggtcattatatcaggccatgttgataggcaaaattcagcctttgggtggccaaagtctcctttggttgagaaaaggaatcagtaggcagaaccatcaacagaaaatatgagaaagaatgctcaagtctaaagtgaacttaaacagttccactgtagtgtaaaacaccactcaatttggtaagttgaagggattttatttttcagacattgcctaacttagaagagaaagataaacctatcttggaacaaaggttagatgaaaacaaagacttaggaaccatggtaagctatagcactcactctctaaagcttctgattcatacgctctattgctagattcgtctcatcatgctacggatagctcaacattacagccatgacccacatgggcgagagttcgtttttgtgattctttgtcctttattttagcaagagagtcctggagatcactgagtctaatgaacgaaccccagggaatgaaagtgaagcattaaccattactgaaatgactgtaggggctctgcaaggttgttgtgggtggtactgacagggctaaataggactgactccgttcctctttgacattctgatttaatgtttctgattacaacagcaaatcttgatttggggcttgtatatcttcaacacctcttttacacttgatgttcttccttttttaaaaaaaaaaaaagtcaaagatgttatcgttgtgcttatttttattggtttccttctatttgtggtcaatgacagtagttttccatttaccatttttcacagtttcctttaaattaatgtaagtaaaaacaatgggtccatttaaaggaaaggaatgaagccagtagaagttaagaggaaggtggaaagagtataacttgtaaaggttgtaaaggttgtctctgaataactgagcttgggaaacttacctaggttatagggcagatggggtagagggtggaagaaaaggatgtccaatgataggataaggtcatgtaccttctcagaggcaaactaggacaagaattcaggcctcctgatgctcagctccctgaaccccaaacactagtctttgggcctgccatattgctgacagttatgctattttgttcaacattaagtaggccttagactagtggttctcacatttgagtgtatcacaatcacctatgatctttgttaaaactcacatggctggccgggcatggtggctcacgcctgtaatcccagcactttgggaggccgaggcgggtggatcgcctgaggtcaggagtttgagaccagcctgaccaacatggtgaaaccccgtttctactaaaaatacaaaaaattagctgggcatgatagcgggcacctgtaatcccagctactcgggaggctgaggcaggagaattgcttgaacccggaaagcagaggttgcggtgagctgagatcgcaccactgcactccagcctgggcaacaagaacaagactctgtctcaagaaaacaaacaaacaaaaacaaacaaacttgcatggctgggccccgctctcagaatttttgatctagtaggtctggggtgcagcataataatgtgcatttctagcaagtttgcaggtgacgttgatgcttctggtccaaggacctcacttggaaagcccccgctttagactgacagcacttctcagtggaggcccggggcaccgttggccaccgggtggacagttctccattgcgtggtgaaccgttcagcatcccagaacccctgcccgctcactgcctatagaagtccctagtcaatgcgataaccaaaactatctccacacatttccagcaccccatgttaagaatcttagtacatttttcacctccctacggttaatattttcacttaagatgctcataatctgatgcctacctcattacttctcgttatttctaaactcttctttttttttttgagacgaagtcttgctctgtcacccaggtgggagtgcagtggcgtgatctcagctcattgcaatctccgcctcacaggttcgggcgattctcctgcctcagcctcctgagtagctgggactacaggcgcctgccaccacacccggctaattttttgtatttttggcagagacagggagtcaccatgttggcaaggcacatctcaaattcctgacctcaagtgaccctcctgcctcagcctcccaaagtgctgggattacaggtgtgagtcaccgtgcccagctccctttttcattttatttttttgagacagtgttttgctctgttgctgaggctagagtgcagtggtgagatcatggctcactgcagcctccaccacccaggttcaatcgattctcccacctcagcctcccaagtagctgggactacaggcccgcaccgccatacctggctaatttttgttttgttttgtttttggtagagacagagtttcgtatgttgccaaggctagtctcaaactcctagggttaagcgatcctcctgcctcggcctcccaaagtgctgggattacaggtgtgggtcactgcactcaacctgcttcattcttatactccctgcttccaagagtccatgtgaactgacatttcaatctttccttcactttctatgacaaagacaatcattgttttcattttccaaatatgcaattctaataatgaaggtgcttcttcgaagtatgccttcctcttccttgtctaacttcccctccaaccctactaggagacataacccccttctgaaaaaatcagttttatgccctatctgtctgaatgcttccgggctatgaattttgagataataggtaaatgcgagcgtgtgaaatttaatggaaagaaagcaagtttcagacctagagctccagatctctcatgtgctaatggaatagccggaggcagccttttctcttctctgagcttcacctttcaattgttacctggagttgtggccactaagttaggtactgaaaatctttgagagtatgtaggatttgggagatgttggttccattttccagaaaataaaattcatgaatgtaaaattttgatgaaaccttattagcaaatatgataaatattttaatattaaggcaaaaaataaaataaataatattaaggcagataggtcagggtatttagttgcttctggaaatgttgagggttctggtatatctctgatactgaaatcagaggatttttggctttttaaatgtttttaaatctgttctttgagaaaattttaaatctcatcaagtttttgtgcatttttaaaagttacaaatttagctgggtgcagtggctcacccctgtaatcccagcactttaggaggctgaggtgggcagatcatttgagatctggggttcaaaaccaatctggccaacatggtgaaaccccatttctgctaaaaatacaaaaattaattgggcatggtggcaggtgcctgtaatcccagctactcaggaggctgaggcaagagaattgcttgaacccagaaggtggaggttgcagtaagctgagattgcaccattgcactccagcctggaagacaaaggaaaactctgtctcaaaaaaaaaaaaaaaaaaaaagttataaatatagtcattgccaatgtgtttcttaaaatgggtttcttgtagttggtttattgagatgattgaataaaattatatatgtatgtattacaatataatattgtatatattatatattacagtgctttgaaaacattaatttgttagacaactgttgcagtattgggcttcccaaaccaaaccatgcttttttaaaaaaaataaaaagtcttgcaaatctagccaaaacaggaaagggcagacagccacagcccattgattgaatctcctatctattttcttccttcccttctttagaatcctggccctcttatacctcagccttcgagtcaacagactcctgagaggaaaccccgcttatctgaacactgccggctctactttggggcgctcttcaaagccatcagcgcatttcacggcagcctcagcagcagccagcccgcggagatcatcactcagagcaagctggtcatcatggtgggacagaagctggtggacacgctgtgcatggagacccaggagagggacgtgcgcaacgagatcctccgtggcagcagtcacctctgcagcctgctcaaggacgtagcgctggccactaagaatgccgtgctcacgtaccccagccctgccgcgctggggcacctccaggcggaggctgagaagctggagcaacacacgcggcagttcagagggacactgggatgaggactgtctacctcccttcctcctctgctcacctctcagcttcacacccacaccttgtgcaactctgccctatgggaaaagccagccggggcatacaccaatgagctgaaacagacctggtgcccaaagctggtagtaccaagtggctaagcaaccccagggcattgacttaccccgcagggggtcaggaaagagagtcaggtatgaggtaaagaccttgtgaagtttagcatatatggagtatgcagtatcagcttgaagtgacttcgcagaaataatattttatattgattaaatgtgtgcatgttttgtttgttttttgagacaaagtctcactctgtcacacaggctggagtgcagtggcgcgatctcagctcactgcaacctccgccttctgggttgaagcaattctcccgcctcagcctccagagtagctggtactacaggtgtgcgccaccatgcccagctaatttttgtatttttttttaatgaaaggtctcacatatttattactgaacccagccaaccaatgcattcataacagattcagaaagaaaaaatatattcccaataaaacatgtacaattctccagagagcggtgacattttcagcttgatgtggtaacatgactgtgaccttcagacagcataaatatgtgtgccctctcatgtgcaattccttatagggctagcttggttcttcttcaatgtctccttttggagttgtacctgattttattaccagttttcatctgaatccactggggagtggggcgattttgttttaatttctcggtcaggaatcacttaatcctggaagtcttatgagaagacatggcaagaagcagagtcaagcacacaccacaatggcagagaaaggaagagctaatttttgtatttttagtagagtcggggtttcaccatattagccaggctggtctggaactcctgacctcaggccatcccccgcctcggcctcccaaagtgctgggattacaggcctgagccaccattcctggcatgtacgtgttttaaattcactcatttaacacttatgtattggatgcctactacatgccaagttctaggtgctggagacatagcagtgtttcagagggcttgccctcttggaacttatgatctagtaggggagtcaggcagtaaagcggtgaagaaatacatacacagtatagcaggtgccaggaaaaacgtaagtaggggaagtgcaagagaacttatcttcaaatggttaatttttattgcatccattagataatagagtaagttttttgttgttttgaattgaattagttctgtgagattggtacaaattatgtatgtgtcttgcacccataaatatatatttttgctatgttactttaacctaaagatagatgttatatttacaacataacatgatctgttgggttctctattaatttatttcatacattatagattctgggttgataaattctgctcaatttgaaaaattttatattttgtctcaaatctgttacaatttatattggttggtgcaaaagtaattgcggtttttgccgtagacagtaatggcaaaaaccacaattgcttttgcaccaccctaataatattaaatataatcatgactttaaacatcatttgcagcattctttttttggaaaagtctttgatctgtgtcacccaagtgaagcctccgatgtttacttttgtcactccagtgcttctccctgaagtctgcagagagatggagtagaggccctgctcttaggcaccggattggtgctggaaaacaaagccatcacctgtggtggtgcagacaggaaggcgtggtgtggacaggatgcccatcattgggcacagatatgaaagtggcacagagctcccctcaactcaaaccacctcctcttcctctccttgtagctgagtcctcagctcacgttgccatggttacatcatcacttcattttaagtgatggtctgggcctcctaaatgcataaacacctctacagcttggaagagcatctccaggctgtaagtcacctgaaatgataccaagtccaactcctatctgctactctttccttggtaggcacttgtaaaatgttgactgctggaggctggttatttttattaagttagtctcagggtccttaaaaaaaggatcccatctttgtgaggcttggttctctacaactggacagaggccctccagggggcctattctttgaacagccatgatctgcatcagttaggacttctcttacaagggatagaaaatcatacccaatctgtcttaagcagtaaaggaaatttattaactcatatgtcttaaaatcatccagaggcaaactagccgcaaggctggctggtttcaggggctccaacagtgtgatccaggaccagtttctcggtcccacttgctctgggttaacccccatgattgcaaggtggttttcccaggttacactcttcttgattcttggccagaggagaagaaaaggacttcattcggcttggactggcttagatcaggtgctgctcctgaaagctccatgataagcagggcatggaacacccaagttaatttagatctggaattcctacccaccccacactcactctcccatgggtcctgagaggtaacgggattgctctttcaagcactgtgatgggcctgaggtttcatctttgaaattaacaagttaacctgtcaccatttcatggatgcagacagaagatctaagattctgggatcagagactatgtcagtggtccccaagaccacctccaggtccaatgagtcactaggaaaattcacaggactcagaatacagtcatattcacagctgtgacttactacattgaacagatgcaaagtgagatcagcaaggggaagaggtacccggggtgaaatctaggggagaccaggcacaagcttccaagagttttcccccagtggaatcacacaggacacgcttaattcaccccagcaacacttgtgccaacatgtgtgaaatgttgtcaaccaagaaagctcatgagagcctcagcagccagggttttactgggggctgatcaggtgggaagcctctgtctggcatgaaccaaatttccagactcccagaaggaaagcaggtgttcagtatgaatcacgttgtttgtataaacagtttaggcacaatgagccattcttataaattctggcaatggtgggaaccctcccaaaatccaagtttccatgcaccaactgaaggtcaaccttgcaggcaggccttcataaggatatttgtcaggcctgcagtgttcatccttttgtgcatggagacaaaggactctttctcctggcattgcaagcaacttggcttcaccttcacatcatttcccatgtcctccaagtcccagggggtgatgcagtggtgggctcaggtggatgctgaacacataggtttgtgtcaaagacaaggaaccttagcataggaatccccaattttttataacgggctcggagcaaatctgacaaggcttggcctcagagggagacatcatctttactatatatttatatatgtaatatatgttatagctatgcaatatagatgttagatatgtaatatagatgttatatatgtgagagatatatatatatatattcggatagggtctcgctctgtcactcaggctggaatacagtggtgcaaacatagctcactgcagcctcaaactcctgggctcaagtgatcctcttgcctcagcctgcaaaactgctgaggttacaggtgtgagccatcgtgcctagccctcatttttaatatactgcataccaaacaaacctgccctctgctctggagggagacactatctctatattccaaggctgttggaagatggttaaacaacatcctttaaaagatggttcacaacaaaatgccattggtgcctctgctctgaatatgtgcagaaaggcaagagacctatggagaactgtgtcccgagaggatcccctaataaaagtcaggaatattcttggaagaaggagggattaggccaggcttggtggctcatgcctgaaatcccagcacttcgggaggctaaggcaggagggttgcatgagcccaggagtttgagagcagcctgggcaacaaagcaagatgctgtcgctacaaaaaatacaaaaaaattagctgtgcctgatagtacacacctgtagtctcagctactcaggaggctacagtgggaggatctcttgagctcaggaattcgaggctgcagtgagtgagccatgattacaccactacactccaatctggatgacagagtacgacttcatctcaaaaaacagaaaattaaaaaggggagggattattgtgaggaggccaacaataaatttgtattgcagtggataaaattatgttttacgcttaataacagtggcatatatttattaaattattactacattgctactaaagcactgttctaatgctttatattctttaacttagtcgttcataagtgagtctttcatggtgttctaataggtaacgaaaagtccttttttttttttttttttgagatgagtccaaattgaagacctttgtcaacaaagtacaaaaccactgggtgtaaaataatgaaaaatgctgctgctagctaaatgtgtttccttcctttttttgaaacagtgattccagggtgaatttccactgattaataagatgattacctctgaaaaaaactttaaaataaaattaaacacaattttttagcttttggtaactttgtgctgagtatttttgcttaatgcctagaattctgtatggtttcctcccaaggaaggaagaggaaatggtgcgtggtgtggtggtagcaacttgacctcaactaagtcaaatttcatcaggaggctggaagtggtgaagagcccatgttagcgatcctccagtttgacaagttgtggggagttgtgtttgtggtttggtggcaactatgttttttataaacatctttttaaaaatgttatgttttccctatgtatgcgccccagttctctgaaagttgcccatttgtatgtgcacttataaggaggtgaatcaaagccacttgctgatgcccttttcctttcgttcattcatttctcaaatagtcattgagcagctcctacttgttcaggcctttgctgatcactagagatgctgcaggaaacagaacagaagctctggagcatggcgctttctttccagtcgagggagatgaaaaaccaggcaggaggtgggagaggagctcttatggaatgctaactataaggcggtgcccaaaacactgtgtatcaaggtaaataatattttgatgcaattatttttaagaaataaaaatcaatgcaaaaaactccatggtgaacaaaatgtccaaatttatatttataacgtgatatttgcggataaatgcaaagaagaaaataaagcaagatggggtaatgtgatggcagagcagtgctattttggatggagaggtcagggaagatggctccaaggaagggtcccaggagcagagggctggatcccttgagggggccagctgggaacacatgaagagaaagcgcgtccctggagaaggatcagcaagacatgtgcacagaggtaggagaagagggtggccagtgtggctggaacctaataaggaaaggaacagtggccaacattagctgggaggggtggccaggggccagttcattcaaagctttgtatattgccagaatattttgaatatttccctaaaactgcaaattaaaagtaatttttgtcttgaattatctcaggacttgcctcagttttctactttgttttaaccttctttgggacaccttcctgtgtatgaccttaaaggatggttgcaaagttcttcaaacatttttcatatctactgtcttagtccattttttgcagcattaacagaataagaacagatttatttcttgcagttctggaggctgggaactccaaggtcaaggggcctgcatctggcaagggcttttgtgctgcatcatcccaaggtggaaggtggaaggacaagagagcaagagagggccgaactcaatgttataacaagtccactgtctcgatcactaactcactcccaagataacaacatgaatccagtcatgagagcagagccctcatgacctaatcacctcttattaggccccagctcccaacactgttgcattgggattagatttccaacacatgaaatttgggggacacactcaaaccatagcagacagtttaaaaaatgtttaatgccaactcttaaaatgagttatggtaagctgcagctacggaagagcatatgagcagagctaccaggaaatcaaacctgccatggctcagaagtctgaaatgggccgggggcagtggctcacgcctgaaatcccagcactttgggaggccaaggcgggtggatcacaaggtcaggagttcgagaccagcctggccaacatggtgaaacgccgtctctactaaaaatacaaaaaattacctgggcgtggtggtgtgcgcctgtaatcccaccactttgggaggccaaggagggcggaccatgaggtgaggagttcgagaccagcctgaccaacatggtgaaaccccatctctattaaaaatacaaaaacttagccgggcatggtggcatgtgcctgtaattgcagctactcaggaggctgaggcaggagaatcgcttgaacatgggagatggaggttgcagtgagcccagattgcaccactgcactctagcctgggcaacagggtgaggctccatctcaaaaataaaaaaattatataaaaaaaagaagtctgaaatatttgagacctactgtaaggacttactataacagcatttaaagtactggttcttagcctgaggttcagaaggctgtgagtaaaatacaaacatgtatacgctatgtgaaatgtcgtatgtgctaatcaatacttttctggagatttagttcaaagttttcatcaaattctcaaacaggtccaatgactcccaaaaggttaagaaatactggttttactagagggtaatgattttcctttttatcatttcattcctctgcttccccaaaaatccatggcttggctaggacaaagttgtctccgaagatgcttgtaagggaataacctttattagttcattcaacaaggcagtggaagaagaagcagacaatgatgacatctgcttcccagtagagccgggagaataaaacggctcaagtccaataaagcgctgaacacagcacctgacatggcagccagctctcaacacatatttgctaccaatgataataaacctcacaaaagttctagctgtgtatagtctgaggcacagagtagcctagagaccaatattctaaaagaggaaaccaatgaggaagagaaaaaagtccagctgcctgagctagaacaccagcacagccagtactgctgggttttatcagcagcatttggggaagcagttaagtcagacgggcctcatcggagacagcccctcatcttatactccttttactcagcagctatgagaccctgaacaaagacaacttgcacatctgagtcttggggttttcatttgtaaaacaagagggattataccctctaactcttaaggttattgtgagcccaaagtgaaaaaatgcctacaaatctctcagtgcacgcatggtcatggcttaataaagagccgctatttttgttttttcttccccaaatgagaaaagaacactggtttgagtctttctaaagatgctggtgtttctgctcttctgtatttgactttctttcctttgctgtgagaaagaactaatcctagcactcattcccgggtctctcactgcctatgtgaccttgaaggagtcatttgatctttccacgcttctgtttcctcaccagtaaatggaattctaatagtactaaccagttttagtatctgccaaaactaggcttttcacccctttctcaatgaatctgtactttcttttggtttactgaggaaatgtactcatatattgagtgtgccaaagactcttctaggcactgatgatacaatgtggaataaaagtcctggccgggcttggtggctcacggctgtaatcccagcactttgggaggccgaggcaggtggatcacctgagatcaggagtttgagaccagcctggccatcacggtgaagccccgtctctactaaaaatacaaaaattagcccagcatggtggcgggcgcctgtaatctcagcgactggggaggctgaagcaggagaatcgctttgatcctgggaggttgaggttgcagtgagccgagatcacatcactgcactccagtctgggcaacagatcgagactctgtctaaaacaaaacaaaacaaaatgaagtccctaccctcatagagcttacagttattgtggttagcatagaaataaatcataaatcaatcagagaccaactaattaaagggattattttttaaaattctcattaatcacagtaacaagtaccccaagcttacatatagcccttgaagtttccacatccacgtattttctgggcaactcttcccaagtaaaaaatattttcagcgtttttatgtttcacgtaggtcaatagggtaatatccaatcataaagatctgccttcttggcaatggagaaattttcccatcatatatatgtacaaatacatacatacatacatacatacatattaatgacagagtcttgctctgttgcctaggctggagtgcagtggcataatcataagctcactgcaaccttgaattcctgggctcaggcaatccttcctaccccctcagcctccggagccgctaggactacaaaagcttaccacaacgcctggctaatttttctttttctttcaagatggtgtctcaccatgttgtccaggctgacctggaactcctgggctcaggtgctcctcccgtctcggcctcccaaagtgctgggattataggcactttcccataatatttataataattaaaggaacaaacagagagatagacaatcgcctaagagcagacagacaatcatgaatttttagcaagggatttgtgttcttatagataaaatacagcctgactcttggaacgggcatggcaacatcagtgtatattttataagaactattatatcgtctattaatgatacttgattgttaataaaatttttttagcctgggcttcaggaaactgtgaatgaaatacacacacgcacaaactgtatgcaaaatttcacacacatgccatctacaatatgcatggcaacaccagaaagttccaggccttaagggagggtcttacttcctagaatctgttgtaacatcacttcacaagatttgttgtgagtgcttgagtcacagttggcgctcaagaaagatgcgttctccttttaaacacaaaaatgtccattgatacagcagattccgttcataggcatccttaatcgcagaaacaggagggcggcccttttcctcaaggcgctctcagtccagggatgtgcccgctccgcagccacacaagctggcgtgggatagggtcaaagagcggtggatgcgcacgggccgcccacgccctcgctgccctcccggagcgtgggcgagtgattccgattgtgcagcagaaacccagggtctcacgggaacgaggaaacccgcccacgcccagcctccaagcgacgctctccatgacaaccggcacttggtaacggcctcgccctgccccgctacgccgcgcctagcgtgccgccccgccccgccccgctacgccacgaccagcgtgctgcgtcacggcggtgcgccggaagtggctgcggatttcgccggaaatcccggaagtgacagctttgggggtttgctgctggctctgactcccgtcctgcgatgggttgcgacgggggaacaatccccaagaggcatgaactggtgaaggggccgaagaaggttgagaaggtcagtgatgtgggcc

SEQ ID NO: 1368 - DNA, 1247 bp, Homo sapiens
ctgctgggagagtctttttgatcgtttcccatgtgttgtcagatagctccatagaattcagtttctgagaaccagccagaagcatgcagtgacattgcacaatctgcctctgaagctggagatactagctgcagagctcaggggagctgctccacatcaccgacatgaagggaacaggcatcatggactgtgcgcccaaggcactcctggccagggcactttatgacaactgccctgactgctctgacgagctggctttcagcagaggggacatcctgaccattctggagcaacacgtgccagaaagcgagggttggtggaagtgtttgctccatgggaggcaaggcctggcccctgccaaccgcctccaaatcctcacggaggtcgctgcagacaggccgtgccccccattcctgagaggcctggaagaagctcctgccagctcagaggagacctatcaggtgcccactctaccccgccctcccactccaggccccgtttatgagcagatgaggagttgggcggaggggccccagccccctactgcccaagtctatgaattccccgaccctcccaccagtgccagaatcatctgtgaaaagactctcagctttccaaaacaggccatcctcacgcttcccagacctgtccgggcctcactgccgactctgccttcccaggtgtatgacgtgcctacccagcaccggggccccgtggtcctgaaggagccagagaagcagcagttatatgacataccagccagccccaagaaggcaggactccatcccccagacagccaagcaagtaatcctggccctcttatacctcagccttcgagtcaacagactcctgagaggaaaccccgcttatctgaacactgccggctctactttggggcgctcttcaaagccatcagcgcatttcacggcagcctcagcagcagccagcccgcggagatcatcactcagagcaagctggtcatcatggtgggacagaagctggtggacacgctgtgcatggagacccaggagagggacgtgcgcaacgagatcctccgtggcagcagtcacctctgcagcctgctcaaggacgtagcgctggccactaagaatgccgtgctcacgtaccccagccctgccgcgctggggcacctccaggcggaggctgagaagctggagcaacacacgcggcagttcagagggacactgggatgaggactgtctacctcccttcctcctctgctcacc

SEQ ID NO: 1369 - protein, 339 aa, Homo sapiens
MKGTGIMDCAPKALLARALYDNCPDCSDELAFSRGDILTIQHVPESEGWWKCLLHGRQGLAPANRLQILTEVAADRPCPPFLRGLEEAPASSEETYQVPTLPRPPTPGPVYEQMRSWAEGPQPPTAQVYEFPDPPTSARIICEKTLSFPKQAILTLPRPVRASLPTLPSQVYDVPTQHRGPVVLKEPEKQQLYDIPDKKAGLHPPDSQNPGPLIPQPSSQQTPERKPRLSEHCRLYFGALFKAISAFHGSLSSSQPAEIITQSKLVIMVGQKLVDTLCMQERDVRNEILRGSSHLCSLLKDVATKNAVLTYPSPAALGHLQAEAEKLEQHTRQFRGTLG

SEQ ID NO: 1370 - DNA, 2619 bp, Homo sapiens
gaagagtggtgtttttttcttcttcttcttcttttgtggtttcacatagcaaatgagtgacagtctctacttacagacaaagtgagacgtcaggcattgagacatagctccatagaattcagtttctgagaaccagccagaagcatgcagtgacattgcacaatctgcctctgaagctggagatactagctgcagagctcaggggagctgctccacatcaccgacatgaagggaacaggcatcatggactgtgcgcccaaggcactcctggccagggcactttatgacaactgccctgactgctctgacgagctggctttcagcagaggggacatcctgaccattctggagcaacacgtgccagaaagcgagggttggtggaagtgtttgctccatgggaggcaaggcctggcccctgccaaccgcctccaaatcctcacggaggtcgctgcagacaggccgtgccccccattcctgagaggcctggaagaagctcctgccagctcagaggagacctatcaggtgcccactctaccccgccctcccactccaggccccgtttatgagcagatgaggagttgggcggaggggccccagccccctactgcccaagtctatgaattccccgaccctcccaccagtgccagaatcatctgtgaaaagactctcagctttccaaaacaggccatcctcacgcttcccagacctgtccgggcctcactgccgactctgccttcccaggtgtatgacgtgcctacccagcaccggggccccgtggtcctgaaggagccagagaagcagcagttatatgacataccagccagccccaagaaggcaggactccatcccccagacagccaagcaagtgggcagggtgttcccctgatatcagtgactaccttaagaagaggcggttacagcacattaccaaatcctcagaaatcggaatggatttatgacactccagtgtctccaggaaaggccagcgtcagaaacacgcctctcaccagctttgcggaagaatcaaggccccacgctctccccagttccagctccactttctacaatcctccaagtggcagatccaggtccctcactccacaactgaataacaatgtgcccatgcagaaaaaactcagccttccagaaattccttcttatggctttcttgtacccagaggcacatttcctttggatgaagatgtcagctacaaggttccttcaagctttctgattccccgagtggaacagcagaacaccaagcccaatatttatgacatccctaaagcaacgtcgagtgtttctcaggctgggaaggagctggagaaagccaaggaggtgtcagagaattccgcgggccataattcctcatggttctccagacggacaacttccccatctcctgaaccggacagattatcaggttccagttctgacagcagagctagcatcgtttcctcgtgctccaccacatccaccgacgactcctccagctcttcctcggaggagtcagcaaaggagctctccttggacctggatgtggccaaggagacagtgatggctctgcagcacaaggtggtcagctctgtcgctggcctgatgctctttgtcagcaggaagtggagattccgagactatctggaggccaacattgatgcaatccacaggtccactgatcacatagaagaatctgtaagagaatttctggattttgcccgaggagtccatgggactgcctgtaacctcactgacagtaaccttcagaacagaattcgggaccagatgcagaccatctccaactcctaccgcatcctgcttgaaacaaaggaaagcttggataatcgcaattggcctctggaagttcttgtgactgacagtgtccagaacagcccagatgaccttgagaggtttgtcatggtggcacggatgcttccagaagacatcaagaggtttgcctccattgtcattgccaatggaaggctcctttttaagcggaactgtgaaaaggaagagactgtgcagttgaccccaaatgcagaatttaagtgtgaaaaatacatccagcctccccaaagagaaactgaatcacaccaaaagagtaccccttccactaagcaaagggaagatgaacactcttctgaactattaaagaaaaatagggcaaatatctgtggacagaatcctggccctcttatacctcagccttcgagtcaacagactcctgagaggaaaccccgcttatctgaacactgccggctctactttggggcgctcttcaaagccatcagcgcatttcacggcagcctcagcagcagccagcccgcggagatcatcactcagagcaagctggtcatcatggtgggacagaagctggtggacacgctgtgcatggagacccaggagagggacgtgcgcaacgagatcctccgtggcagcagtcacctctgcagcctgctcaaggacgtagcgctggccactaagaatgccgtgctcacgtaccccagccctgccgcgctggggcacctccaggcggaggctgagaagctggagcaacacacgcggcagttcagagggacactgggatgaggactgtctacctcccttcctcctctgctcacc

SEQ ID NO: 1371 - protein, 776 aa, Homo sapiens
MKGTGIMDCAPKALLARALYDNCPDCSDELAFSRGDILTIQHVPESEGWWKCLLHGRQGLAPANRLQILTEVAADRPCPPFLRGLEEAPASSEETYQVPTLPRPPTPGPVYEQMRSWAEGPQPPTAQVYEFPDPPTSARIICEKTLSFPKQAILTLPRPVRASLPTLPSQVYDVPTQHRGPVVLKEPEKQQLYDIPDKKAGLHPPDSQASGQGVPLISVTTLRRGGYSTLPNPQKSEWIYDTPVSPGKASVRNTPLTSFAEESRPHALPSSSSTFYNPPSGRSRSLTPQLNNNVPMQKKLSLPEIPSYGFLVPRGTFPLDEDVSYKVPSSFLIPRVEQQNTKPNIYDIPKATSSVSQAGKELEKAKEVSENSAGHNSSWFSRRTTSPSPEPDRLSGSSSDSRASIVSSCSTTSTDDSSSSSSEESAKELSLDLDVAKETVMALQHKVVSSVAGLMLFVSRKWRFRDYLEANIDAIHRSTDHIEESVREFLDFRVHGTACNLTDSNLQNRIRDQMQTISNSYRILLETKESLDNRNWPLEVLVTDSVQNSPDDLERFVMVARMLPEDIKRFASIVIANGRLLFKRNCEKEETVQLTPNAEFKCEKYIQPPQRETESHQKSTPSTKQREDEHSSELLKKNRANICGQNPGPLIPQPSSQQTPERKPRLSEHCRLYFGALFKAISAFHGSLSSSQPAEIITQSKLVIMVGQKLVDTLCMQERDVRNEILRGSSHLCSLLKDVATKNAVLTYPSPAALGHLQAEAEKLEQHTRQFRGTLG

SEQ ID NO: 1372 - DNA, 2241 bp, Homo sapiens
gaagagtggtgtttttttcttcttcttcttcttttgtggtttcacatagcaaatgagtgacagtctctacttacagacaaagtgagacgtcaggcattgagacatagctccatagaattcagtttctgagaaccagccagaagcatgcagtgacattgcacaatctgcctctgaagctggagatactagctgcagagctcaggggagctgctccacatcaccgacatgaagggaacaggcatcatggactgtgcgcccaaggcactcctggccagggcactttatgacaactgccctgactgctctgacgagctggctttcagcagaggggacatcctgaccattctggagcaacacgtgccagaaagcgagggttggtggaagtgtttgctccatgggaggcaaggcctggcccctgccaaccgcctccaaatcctcacggaggtcgctgcagacaggccgtgccccccattcctgagaggcctggaagaagctcctgccagctcagaggagacctatcaggtgcccactctaccccgccctcccactccaggccccgtttatgagcagatgaggagttgggcggaggggccccagccccctactgcccaagtctatgaattccccgaccctcccaccagtgccagaatcatctgtgaaaagactctcagctttccaaaacaggccatcctcacgcttcccagacctgtccgggcctcactgccgactctgccttcccaggtgtatgacgtgcctacccagcaccggggccccgtggtcctgaaggagccagagaagcagcagttatatgacataccagccagccccaagaaggcaggactccatcccccagacagccaagcaagtgggcagggtgttcccctgatatcagtgactaccttaagaagaggcggttacagcacattaccaaatcctcagaaatcggaatggatttatgacactccagtgtctccaggaaaggccagcgtcagaaacacgcctctcaccagctttgcggaagaatcaaggccccacgctctccccagttccagctccactttctacaatcctccaagtggcagatccaggtccctcactccacaactgaataacaatgtgcccatgcagaaaaaactcagccttccagaaattccttcttatggctttcttgtacccagaggcacatttcctttggatgaagatgtcagctacaaggttccttcaagctttctgattccccgagtggaacagcagaacaccaagcccaatatttatgacatccctaaagcaacgtcgagtgtttctcaggctgggaaggagctggagaaagccaaggaggtgtcagagaattccgcgggccataattcctcatggttctccagacggacaacttccccatctcctgaaccggacagattatcaggttccagttctgacagcagagctagcatcgtttcctcgtgctccaccacatccaccgacgactcctccagctcttcctcggaggagtcagcaaaggagctctccttggacctggatgtggccaaggagacagtgatggctctgcagcacaaggtggtcagctctgtcgctggcctgatgctctttgtcagcaggaagtggagattccgagactatctggaggccaacattgatgcaatccacaggtccactgatcacatagaagaatctgtaagagaatttctggattttgcccgaggagtccatgggactgcctgtaacctcactgacagtaaccttcagaacagaattcgggaccagatgcagaccatctccaactcctaccgcatcctgcttgaaacaaaggaaagcttggataatcgcaattggcctctggaagttcttgtgactgacagtgtccagaacagcccagatgaccttgagaggtttgtcatggtggcacggatgcttccagaagacatcaagaggtttgcctccattgtcattgccaatggaaggctcctttttaagcggaactgtgaaaaggaagagactgtgcagttgaccccaaatgcagaatttaagtgtgaaaaatacatccagcctccccaaagagaaactgaatcacaccaaaagagtaccccttccactaagcaaagggaagatgaacactcttctgaactattaaagaaaaatagggcaaatatctgtggacaggtgagttcagagttccaagtgatcgaaaaaggggcttcaattgttacctggagtagtggctac

SEQ ID NO: 1373 - protein, 666 aa, Homo sapiens
MKGTGIMDCAPKALLARALYDNCPDCSDELAFSRGDILTIQHVPESEGWWKCLLHGRQGLAPANRLQILTEVAADRPCPPFLRGLEEAPASSEETYQVPTLPRPPTPGPVYEQMRSWAEGPQPPTAQVYEFPDPPTSARIICEKTLSFPKQAILTLPRPVRASLPTLPSQVYDVPTQHRGPVVLKEPEKQQLYDIPDKKAGLHPPDSQASGQGVPLISVTTLRRGGYSTLPNPQKSEWIYDTPVSPGKASVRNTPLTSFAEESRPHALPSSSSTFYNPPSGRSRSLTPQLNNNVPMQKKLSLPEIPSYGFLVPRGTFPLDEDVSYKVPSSFLIPRVEQQNTKPNIYDIPKATSSVSQAGKELEKAKEVSENSAGHNSSWFSRRTTSPSPEPDRLSGSSSDSRASIVSSCSTTSTDDSSSSSSEESAKELSLDLDVAKETVMALQHKVVSSVAGLMLFVSRKWRFRDYLEANIDAIHRSTDHIEESVREFLDFRVHGTACNLTDSNLQNRIRDQMQTISNSYRILLETKESLDNRNWPLEVLVTDSVQNSPDDLERFVMVARMLPEDIKRFASIVIANGRLLFKRNCEKEETVQLTPNAEFKCEKYIQPPQRETESHQKSTPSTKQREDEHSSELLKKNRANICGQVSSEFQVIEKGASIVTWSSGY

SEQ ID NO: 1374 - DNA, 1308 bp, Homo sapiens
gaagagtggtgtttttttcttcttcttcttcttttgtggtttcacatagcaaatgagtgacagtctctacttacagacaaagtgagacgtcaggcattgagacatagctccatagaattcagtttctgagaaccagccagaagcatgcagtgacattgcacaatctgcctctgaagctggagatactagctgcagagctcaggggagctgctccacatcaccgacatgaagggaacaggcatcatggactgtgcgcccaaggcactcctggccagggcactttatgacaactgccctgactgctctgacgagctggctttcagcagaggggacatcctgaccattctggagcaacacgtgccagaaagcgagggttggtggaagtgtttgctccatgggaggcaaggcctggcccctgccaaccgcctccaaatcctcacggaggtcgctgcagacaggccgtgccccccattcctgagaggcctggaagaagctcctgccagctcagaggagacctatcaggtgcccactctaccccgccctcccactccaggccccgtttatgagcagatgaggagttgggcggaggggccccagccccctactgcccaagtctatgaattccccgaccctcccaccagtgccagaatcatctgtgaaaagactctcagctttccaaaacaggccatcctcacgcttcccagacctgtccgggcctcactgccgactctgccttcccaggtgtatgacgtgcctacccagcaccggggccccgtggtcctgaaggagccagagaagcagcagttatatgacataccagccagccccaagaaggcaggactccatcccccagacagccaagcaagtaatcctggccctcttatacctcagccttcgagtcaacagactcctgagaggaaaccccgcttatctgaacactgccggctctactttggggcgctcttcaaagccatcagcgcatttcacggcagcctcagcagcagccagcccgcggagatcatcactcagagcaagctggtcatcatggtgggacagaagctggtggacacgctgtgcatggagacccaggagagggacgtgcgcaacgagatcctccgtggcagcagtcacctctgcagcctgctcaaggacgtagcgctggccactaagaatgccgtgctcacgtaccccagccctgccgcgctggggcacctccaggcggaggctgagaagctggagcaacacacgcggcagttcagagggacactgggatgaggactgtctacctcccttcctcctctgctcacc

SEQ ID NO: 1375 - protein, 339 aa, Homo sapiens; identical to SEQ ID NO: 1369

SEQ ID NO: 1376 - DNA, 122189 bp, Mus musculus
  misc_feature (1)...(122189): n = A, C, G or T/U
ccctgtactggggcatataaagtttgcgtgtccaatgggcctctctttccagtgatggccggctaggccatcttttgatgcatatgcagctagagtcaagagctccggggtactggttagttcataatgttgttccacctatagggttgcagatccctttagcttctttggtactttctctagctccttcattgggggccatgtgatccatccaatagccgactgtgagcatccacttctatgtttgctaggcccaggcatactctgacaagagacagctatatcagggtcctttcagcataatcttgctagtgtatgcaatggtgtcagcatttggaagctgattatgggatggatccccagatatagtagtgtctacatggtccatccttttatctcagctccaagctttgtctctgtaactccttccannnnnnnnnnnnnnnnnnnnaaccaataaaaaatccttttaaactgaaaatgttgtcaaaatgatgtcttgatgtttatggcagtgtttccttcttttcttaaagatgtttctgagagaatcccatcttagaatcaagtccttacagaggcaaacaagtgcaattcaatccacactgctccaagaagagtcgactgtaaaggcagcgtctttagtttccccacttctcagttgaggagaaattcagaggcaaacactgccagggaagaagaccagacaagaagtcctgagggagtgtctggtctggagctgttgggtagttgtgatctgaacactgaggtgagatgggagcacaggcaaaaggagcacaggttggctccgatagcttgtcttttagcggtagcttgaaggaagtcctagaagagtggtagagatagcatggtagaagctaaaggaaggtttttattaaaaaaacagaagaccgaatgcttgttttgtttgtttgtttgcttgcttgcttgtttggtttcctgagaaaagacatgctagaggttgtggttgaaattggccaaaagggtaagtgaaggagtgatgtctctgaagtaccagccttgaaggaggcttggacatgagggaggtacttcaggagggatacctttatcactggcctgaaggaaagaggtaggcgccatggggggttgggggaggcattcagaatactgtgcagtggggctgagagagtgtgctggatggcttttaagttctctgctaagaatgaggatggaataggtgggatgaattaggagaacagctgcaggagactgcaggagatagtggagagctgccttgtgtggaagacagagctgaaacccaaggcagatcaatttataagcaatagagatatttctcagagtcttagaggctggggagtcccagattaaggtgccagcaggtttggtgcctgatgagggctactttctgcttccatgttgctctgtcctccgatgagatcagagccatcacatggtagagcagcagaagagaaaaggaaccaaaggtagttccctccagccactgtgaaggatgtagttacttttccaaaggtgccttgttaatgataccacagtggggaattctggtttcacacatgagttttggggaaccttcagaccacagcagagatcacttgtaatagaagtggtcaatgcagtgtcctgagttccgtttaacactggtaactctttggaacaaacagggaaagaggaagagtcctctcaggggcataagaagtaggtggtttggggaaagatagatttggtggaagagttaggcctgtgagaattccagtttgggggaatgttgcagtttgcagtttatgtctcttgctttggtttaaggcatttccgaaagaccaccacaatcctgtttcaagaaatgtcacagatgggcactagagctaactattaaatatctcttcattcctaaatgcttgagttctctatttcacatattaccttctgttctgtagagacatgccagaccctatagagtcatattacagactataggggtcatttatcccctacaaatgtatgacgtagtgaggctctacccagcagctgactgagacagatgcagatacccacagacaaacattggatggaggtaagggacccctgtggaagagttaggagaaggattgaaggccctcaaggagatgacaaccccacaggaatactaacagtgtcaactaacctggatccctgggagcttcctgagactgagccaccaactaatgggcatccaggagcaggtccaaggcccccgggaagatgtaacagagggcttctatgtctaactttacttggagaagatgcacctaattctgaagagacttgatgcaccaggatgaagtacaccaggggtttggtggggctgccctcttagaggtgaagggaacaggagatgggtggaagaactctgcatggaggaccagaaaaggggacaacatttgggatataattaatcaatcaattaattaaattctaaggatggagagatggatcagtgggttaaagcacttgctgtgcaggtatcaagaagctctagcaccagtgttaaaaacaataataacaaaaaagacccagacacggctgggtctacatagaaccccagccaggtagattctgggagttcacagattagtgagcctagtgggaacagtgggctctaggtttattgagaggccctgtctcaagggaataaggtagcctctggcctccatatgcaagtatacctttgaccccaacctgcaaaatacatacaagtataccatcaaccccaacctgcaacttacatacaagtatacttcaactcccacctgcaacacacacacactgaattctgtttgagtatgcagtggtacattattgttgaggaaatagtatgatgtctgtgagtatatgaggttggtctcacatactgtccaatatcctttggattctgcaggcatacttacattactatcaagagtaagcatttttgtttgggaaaaggcctggcttacaatgctcttctcaggatgttgaattttcataacatgatttaaaagagacttcagctttagagtcaccaacacttgattaacatctctaccacacagtttgttcacagccacagcctgctttgtaggttgagccctggcgactgttgctatgctgttcagtgggtcactgaagtaaaattaatgtaagcatctagaaattcatgcaccaattgtgttcatttattaagtttttaaggtatcatgccagaacaagcccaaagtatgggagtaaaagtatttaccaggctaatattgatatgaaagttatattaaagagaacacagcattggcagaaatactggaaaatttttctgagaatctcctgtcttggagggaatagggtccttctcctgcagttcagaacagtttcctggccttctctcccagctttatttgtttgggtaacaggtgggctgctcactatctcgttatgtaataaaatcttaatgttcttgtccttcttgagaatggcagtttggacttaggacacaatataaaacattgtgcccctgttcaggcttaaagcagttagactctggttgctagcaagtgaggattttgctttaaaaaaattttttttaccatttatttgtttgtttctttattgtttctacataacatcgtaaacagtgcaaaatcaatgacaagtattgtgtttaactttagaaaatcctgagtggatagacatagactcaagcattttatcaagaaaataaaaaaaataatttgtaagaaaaaacaattaaaaaatgagtgggctggagatacagcccagcaataaactacttgcttaggatttgaaggcctgggttcaatttttaatgacacagagatacaaggaggaggaagaggagaaagagggatgaggagaaggagggagagaggaaggaagaaaaggagaaagtgaaaataaaacctaaaatctaagtagaaataaaattcattaaagaacaaattgtttttttttttttagttttttttttttttttctctagtaaagacttagtttcccacactgtgcttcgtgggccttggaaaatgtccttaaagtatggttagtagcttgggccaagcataatggtgtactgctgcagaccctctgggcccctttgtctgcgtggaatgggtctctggggcaggtgggcaaagcgttggatggaatgacagacagatgcacacaggagaggttgtgtagaatctgaatgtaatttgtcaaatcgagcataaaactttttatacagaagaaaatgaggaagttgggtgacacaccagcaaggtacaaagaggttactggattctttcacaaaacagacacagaaggtctaacaggaaccacctgggatagaattcactgttaacaactgggatcaaaaggagctccacctaagattcacttaatcttagaagccagggtcaagggcttcgtgcccttgccatagttcctattttagtctattgtatagtccaccttcccactaggccattgtaaatacgtgtgtatgggtgtaactcagctatctatagttctaagtatctattctggtttctccttatgtctgaaacttccttcttcctagatgatggtaaattcctgtgtagggcagtgacctagcttttattcaaagtgatagtgtagtaccagaggctattctgaatgtcactgaataggcaacattcttcctgaattccaagcccatggtctgctcaaggactttctaggacattggaacactggctaaggctttagctatgtcagaatgaaaaggcacttataataggatgatactaaaacagagcacgtggatccatacactagactaacgcaggagtggaatattaatgtatgggttagagaggacgccagaccccagcaggtgagtttccgtgaaactcttctgcctcgtgagtagcttctaagcctctcggcctgtcaagctgactcgaccagagtgcatggcagtgtacaaggtgtggagtctttcaccaaccagcattttctttaaaaacgacccagtttgggagaggggcaacgttagctgaggagctgttgacatttgagagctactggggaaggagggttacttttctttggatatgttgctcctggtaggctgctcaagccacagtagatggtcccacattcatttcaacatggtcagcactaactagacacagggacctattaatcatcatcatcatcattgtcactgtcatcatcacaccaccaccatcaccatcatcatcaccaccaccaccacctccaccatcatcttatatgatgtcaagtcaagcccagagagataagactggtgggtcccacggagagttggaggcacattgtggcatggataagagcaaaatacactatatacacatgtaaaaatgtcaagggattaataaaaatattattttaaaaggatatcccagagctggagagatggctcatatgttaaaaagcaaagttcttactgcctgtgcagagagctgagttcaattctcagcaacacatcagtggatcagtaaccagggctccagggcacccaataccatgtacacactcacagaataaaacattgaaaagtaaatagatcttagccaggtgtggtagcacatgcctttaatcttagtacttggaagacagaggcaggcaggtctctgtgagtttgaggctagcctggtctacatagtaagttctaggacagcctctgtttgcatgggctctctatcatagattcaaccacactgcagatggacagtatggaaacatctgtttgtagtgatatgtactggccattactccctagagtatacagtataaggttatacactacacacacacaccctcccaatagtttaaactacccatagagttcatataatatttaagacaatgtcaggacatagttcttatactgtatagtctagggagtaatggccagtacatatcactatagacagatgtttacatactatccatctgcagtgtggttgaatccatgataggatgcccatgcaaataagagggctgactgcatgcatacacacacacacacacacacacacacacacacacacacacacacggaaggtgggtctcatcttggtggtctatagatcaaaacgagtacatccaccttcaagttgagcaaaaccctttgctaccgtacctcatttaccataaaaaggagtcaatcaacaggaggataggagcttgagcatctctctcccagggacttactgctacatatactccaggtgaggctgtgcccaactcggagacaggtagtatttgagttgcattacggagacagagaaacagtggcatccacactccatagaatataattttctgggtgcttagtcaagataggacacaattgatgatcatgtttttccctagaggcaacagcttgatgtaactactttgggaaaagaggccttgatcttcctatgagtacacttatctaagtaaggtgattattaaaacaagttttggcaaattgttgatttagtgcaaggtgtattgaaacatatctagctatgatatggaattaaacaaatacttcacttctgcactgaaccttttatagatgagtgatgaaaagttgttttgtgttttcatacagaaaggtcaacttttgatggaaatgaaagtcattaattgggatttgattaagtcacttgtatattttcagttaggtgtaagaacaaaactaaggtattaataccaaccattcccctgacatcatcatcagacatgatctttgatgctatactacaacctgttatataaaaatactgtcaatcattgttttcttactaaaatatgagttaatttcaaggaaaatatcaagtaaatagtgtttcctggcaacattccaaagatggcaaacaaatggccaacaatgggagtccatggcccaggaaactttattcaaaaacattttcannnnnnnnnnnnnnnnnnnnatgagtgatgaaaagttgtttttgtgttttcatacagaaaggtcaacttttgatggaaatgaaagtcattaattgggatttgattaagtcacttgtatattttcagttaggtgtaagaacaaaaactaaggtattaataccaacccattcccctgacatcatcatcagacatgatctttgatgctatactacaacctgttatataaaaatactgtcaatcattgttttcttactaaaatatgagttaatttcaaggaaaatatcaagtaaatagtgttcctggcaacattccaaagatggcaaacaaatggccaacaatggagtccatggcccaggaaactttattcaaaaacattttcatgagtttagcatattcattttttaccacttttctactgttgagcttttagtgtttcttttgttataaacagtgttacaaacaactcttacatttaaatattgttcatgtccatattggatatcttgggagattcacagatgtgggattgagtggaagggtagtaattagatcaaagtttgaaattatgtgtgcatcaaccattccttttagtttttatgcaagcatttaggaagttaataaaacagcatttataacccatgggaatgatttttctatattccttaaagggtcccttaatgcagttgcctttaaatttttttctgggaccaaatggcaattccgacccagggcaagctctatatgttgcagaaaatgcttggctggaagatctggtttacagttaatgttaacctttctacttaattagcttcgtgatcttgtgcaagtcataaccactttaagctataattttctcatccataaaattgtactaaacataatatacctcactgagatgtgattaaatgaaatgatatatgtgaaaatggcttgtaaatgttgaagcatgatataaaaagttatttgttggtattacaaatgatatgtgtgatatgtgttccctcaccccttcgatactctgaaagatacaagtcagctcacgcaatgaagataatcccttaacatcatggggaaatgtctacaaaaaggagacggggatatgaagtacattatagcagaaatctgtttctttactgatattccttttctagtaaatactagaacgtgatgtgtcattgcagtaaatatgattagtagctttgactttcttactcatcatcaaatctgtgaaaacatcaattactcagaggtcacattacttgctattctagaattggtttggtgggccaggatttctgagtccaggttaggacaagctcttcctggcatctataggttgttagaaaaatgagtggtctctactgcgaatgctcaattactgcaatgcactttatttggatggcttcgtgtcatgcagatgcaggtagtctcttgagcttcctgccagaaacccctgctgttgttgaactctggacaggagatcaggatataaatgcaatgtgtccagaagggttagagcacaacacagagggcctctgggctctagttagctcagacacttcaccatccaggctatcaatgctattatgtgtaaagcaggtgagatggatggtctttgtcttagtgaggattttactgctgtgaacagataccatgatcaaggtgtcttttataaaggacaacattcaattggggctggcttacaggttctgaggttcagtccaatattatcatggcaggaagcatggcagtgtccaggcaggcatggtgctgaaggagctgagagttctacatcttgttcagaaaggtaaacagacccctcaacagaggaatggatacaaaaaatgtggtacatttacacaatggagtgctactcagctattaaaaagaatgaatttgtgaaattcctaggcaaatggatggacctggagggcatcatcctgagtgaggtaacccaatcacaaaagaactcaaatgatatgtactcactgataagtggatattagcccagaaacttagaatacccaagatataagttacaatttccaaaacacatgaaactcaagaagaacaaagaccaaagtgtggacactttgccccttcttagaattgggaacagaacacccatggaaggagttacagagacaaagtttggagttgagacaaaaggatggaccatctagagactgccatatccagggatccaccccataatcagcctccaaatgctgacaccattgcatacactagcaagattttgctgaaaggaccctgatatagctctcttgtgagactatgccggggcctagcaaacacagaagtggatgctcacagtcagctattggatggatcacagagcccccatggaggagctagagaaagtacccaaggagctaaagggatctgcaaccctataggtggaacaacataatgaactaaccagtaccccggagctcttgactctagctgcatatgtatcaaaagatagcctagtaggccaacattggaaagagaggcccattggacttgcaaactttatatgccccagtacaggggaatgccagggccaaaaagtgggtgtgggtgggtagaggagtgggggggggagggtatgggggacttttgggatagcattggaaatgtaaatgaggaaaatacctaataaaaatttttttaaaaaaaggtaaacagaatactggcatccccaggcaactagtaggaagctctctcaaagcctacccccatagtgacacactttcttcaacaagtccacacctcctaatggtgccactccctggtccaagcatattccaaccaccacagtcttcaatgtttctttccggagatttcaaaaggtcctgagtgctaaagtaaatgaaaattgagagactgttagtgatgtgggtgggaagatctcagctgggtagtgggggtaggggaaattctagtctatgacatcacaatacccagcatagactagagcttagcatctgagaaggaaaagcaacggaggctcagttattgacagagcaggggaagaacactcgtggaaggacccagaaggatcagccagccatgcctccagttcaggtacaaggtacatgacttttgctaagctaatcacaggactcaatagtgtctaaaggaaaagaagacacttacacgggtacctattttttttaagggatggtaggaatccagaggggcttccagcagaagtaaagctggtatatccaggaggctatgaagccacaaaacacaggcatttataaagttctcagataaccactggcccctcctcaacttctgggaaagtgcaaaaagcactggtgtctccagtggtcagttcgtggttattttctaaagggactcactcattctatgatattcttctacacaggagttttggtttttagtgacttctcccaggatgacagagaagagtgaatattttaaatatttaagtgaaagaataattttaatagagatggttttaaaaatacaacaaaaattaatataaggaggagaaaggtgtattatgggttaacaatagagattaacttcaaagtctagttttgaaattccaagacttcagaggcaaaaggccacccctagggacagtggaagagagagaggccttgtggttgagaagtcaagttgcacagttcatctgcttttacccctactccactcctcccatgtctagggactcggcagtgaatcgttgctggacgtgtgaacagttctgttttctttactttgctttggggttttggcttctaaagtatttgtttcttcctggaggcctagaaagactccaagtgacagcaaatagccgttctgtttagcagcagggcggagcttaggattggtgccaggccctgactcatctctgtttggactcccttgggtcttaacacagagcaactccacagtcagaggctaggactactcaaacaggcttttctgatcatggtctgcaagagccgtgttaggacactgtggaaggagcagcctggggctctgattcggatcagtaacctacaggacacaccaggcacagtagacaagaaaggggatcaaatccacctgggatacagttttcactcagcttccaacaatcatgcatgtgtatcacagcagtaagaccagggccccgacactctacgaaagcagcagtaacccatagcatgtgagacatttgtttgtttgtttgttttgttttgttttttcgagacagggtttctctgtgtagccctggctgtcctggaactcactttgtagaccaggctggcctcgaactcagaaatccgcctgcctctgctgagggacccagagcaaagcagaagtgcctgctcactgtatagcacacattcaactttcatctggaaggttgctatgatttttcacaattgagttatggtccaatttcttaagactctgaaaactaaactttcactgatcagtttttagacttctttcattctatagacaccgaaaagccaggcttaggctttatgtaagccaataaacagaaaacataatttcctaactcatctgtatttacatttattgactggaatattcatgaactttgccacgtggcacaggattttagagttgtagggagatcatgtaggaaactgccccagcccctcctgtcctgaggacagcagcacagggaagtgtgttgtctgggagccacagctccagtcttgtcagctagctccagtacacgctgtccttgactcatgttaaattagtttatatctgagctaactctgtgcatttccaagcttagaatactcgaaaaatgagaacacctcatttcccgcaccggttatcggtaactgcggaccgtgtctaaaggtaacattgctcatcctttagcctctgcactgcctcgtgactaacagatgtgcggtcaagaaccccaaacccatccaaaagtttgagataatgatgaaaaaaaaaaacccacagggagtttagcaagctaccttgtcttgaaaactgactagatacagcccattacaaagaaaacaaacaaaaaaaaatgggctggggaaacggctctgccttaacctgtttacacgcggacacgagggcagagttccgatccctagcactcatggggaaaaaaaatgatgtgatggtacatgcctgtgagcagagagctagggatggagaggcaggaggatctgtgctgcttactagctggctagtcttccttaactagtagtcttgaggtttcttaagagatgctacatcaatgatgatgatgatgatgatgatgatgatgacgacgacttgggagatggatagaggaactcagatttgacttctggccccacatgttcatacacacacaagtacatataggcacaaacatatacaacaagcacacactgcatgtacatacactattaagcatttagacaagacttttaccttgtaataaatgtagtcttcctgtggctttgcctttgacagtgtagccgatcatgctaacttatgaatgtatatgtgtaagcctgtacgtgtatgagtagataacattgtacggtgactgaggctatttgacacctaaatggttaagtgactcaccattatgatccaacatatttgctaagtgaggatcctggaacttttcctatgacttcagattcccttggaaattatcttggtagcttgggtgcttcttcagccttgccaggatttttctgtagcactatatgtcttacatctccaatcagtttgtaagtttatgcctgcacacgccctggacacagggacaccaagtttctaactgaactccttgaaaatatgttaatgtctatacaaagacctaagttctgaaagaaactgagtgaaaccaataattgtttaagataaataaatcctaattgtcatagttgtaagctttctccatcactggaaatgggtggtaaatactttctctgctactggtaaatgcagatgatctttgacgttataggtttatattcgtttaaagccaactgaaatgtctaactcctaaaagactcttccatatattcctggatttccatgcagacttgtctgtggtaaagagaattatgaacattccttagaaaaagcagcctgttgtgacataggctttgaatagagctgtggtctatctttccacttccatattacttccaaaagctgtgtaatatatggagtaattttcacatactatggcaggagggggctgattgctgtggaagaaaggaagtttagatttagcttctgcgatgtggttttgaagtcccagctctctccaataaactgaaatgcaggtgtgcctagtaagcatttggaatattttccctaaaattactgcaaaacttgcagtttgacaagtggtacttaaaagcttccagaggcgatataagaaagaaggataactctgaaaaaaatcatgagacattggctggtgagtcttgctaccacctaggtgcctgggcatctgaccacacatagctccctgacacacgcagggcacacaccatcaacctaacccaacccccatcatacctgctcctctatggattgtgcaacaagacctttgtaacctgaggcctgtgaagtctggaaaggaatgtgacccagagtccatgggtgttggtgctaccaagggcacaaggagttctcctgctgtttaccctgtgcctcttgagaacttcaggagggaaaaggtatgctccaaaacaagccttcagccaagcttcgaggccactgtggtagtgcctgcacaacctccctctcccctccactcccgcacttgccactttgggaggcatgcctcttgttgctccctagtaaacctgacccaccttcctcggtacacactcttcctaatatcagttgtgcttcttagagctatgtgttggagttctcatgtggcccatagagggattaggatgttcgcaatggagagtttgtatgaattggtggcatcaatgatagagtgccaaaggctaaaggcttgatggccagggcatacaagacaaaccatatgtctgcacctcacccccagatagctttctccatcttgaccagcacagtctggccaccacaggtctgctgcctctcctcttctgtctgaggaatggtgttacaagctgagtcacgaatacccatcttttaagttgcccaactatcccgatggacatgccaacagaactgtaaccaaaagaaagccatctaccccaagtcttgtcatttatgctgttggcatcatcttctgtaaatggcaaggtctgcattttatgagccagcattgttcacaaactaagggcaatcccccaaacttttaattggttgattaactttttgcagaactgagagttgaactcagagtctcaaacatacaaggcaaggtcaccaagctatgccttgcagcaagcattctcctctcttgaagaagaaaaagtcaccatttttaagaggattcttgttatactgggttatgtgttagaatgtaacatggtttcatgttcctaaccaggacactgtcccccactgtaacatcctttcaaggtagctattttaaccctaaagatttcaatgtaggtttcagtccaatttatatttttgaatgtgtttgtgcctggaactgtatcaaacacaagggcaataggaaaatgaaatactgcagaagctgaaccttttcaaatttcaaggatttacttagcgtgatatgtacacctgcaaagagttcaaaggcaaagaagaaactctaactatgtgaaaaatgtgcctccttcagacttcaaagtgcccgtggggctcagcaaagaagtagtgaagtggtctggagtgtcagggagcactgggccatgggaggaaccttgaggaagagaaacagtatgactgacccatgcttgaggaagaaaaacatttttctaatgaaaacgttgaccctggcaggactggcctcactgccactcattatccctttgctttcataaacacacggaacagtttccttcccttgactgggacatagaaaacaggagctgtagaaacacagacacaaggaaggaggggaaaggtgtgagaaagtatctgtaaggggtcacatactgtagctatggctaggttggaactaaacctttatgctggcttgcttgtgagcaaataccctaaagtctgcatattccaaatctaaattattgacttccaccaatttgcaccctttgtagattcctgcctcaaccagagactgtactggaagtcatagtgggtatctggagtattcttgcatacctgtctctctgcctttgtccacttacccataaactcacagctctatgccttcaaatttatcattcctagtgatctctgcctgctgctaactggtcatcttttctactcatctccttccttcagttctctgcaacccattggatactgtttccaaaacagattgttactccccagtttgaaaatagatgtttgcaaaacagagaatccaattgcttggtcttcaaggccctttatgcttttcttcttcttttccctcatttcttttctgcatcccccaaaacccagatggatctggctactttcaacttctgtcatctcatcactcatctctgtgggcttcacacttttttttttttttttttagcatttctgaggctgaattcctaagtcatatcctttaccaaggctttcttccctctgttttacctccactatttacgacattcaagttgtagacacctctctgaaagttgagctgaacagtttggaagatacaggatacagagagaagaataatgttttagacagggagtggcatgtgcatagggaaaagcatgcacttagggaactaaaccgtctgagtgcacaggaaggaatcggcaagaggttaccatgaagaacggggcaggagccatgtctgagtgcaggcagtgctaagagccctcactgtttgcttaagtgtaatgggagggtttgaagggttacgagcagagtgaggagagcgtgatgtctatgttttgaaagaaccgtgttgatagcacagataagacaggcagggagtaaagacttgagagggctccagttagagcctgggagggtaaacctctgagacaggtctggtctagtgacagtgggaaggcagtgggatggtggacttacagaccatcagaacaaatgatcaggcctggctgactgatcaggtatggacccaagtgaagatgagcccaacaattggccaaaacataacataaaggtgtagtgtcactttctttaaacctactatggagactggactctcttttcttctcttctcttctcttctcttctnnnnnnnnnnnnnnnnnnnnnnnnnnnnnnnnnnnnnnnnnnnnnnnnnnnnnnnnnnnnnnnnnnnnnnnnnnnnnnnnnnnnnnnnnnnnnnnnnnnnnnnnnnnnnnnnnnnnnnnnnnnnnnnnnnnnnnnnnnnnnnnnnnnnnnnnnnnnnnnnnnnnnnnnnnnnnnnnnnntctcctctcctctcctctcctctcctcttctctctctctctctctctctctctctctctctctctctctctctctcgcttaggcatacttacacttttgtgacaaaataccttttttgagacacactcttactgtgtagcaaagaatggcctctaaatcacagctgtccccctgtttcagctttccaagtactggaattagaggtctgtgccatcatactatgctatatgacttcaattgcaaaagagaacactggaagtgtcatggagggtcaactggagagactggtcatggctgctgagttggggtgcttactgctgacaatgcacagggcttacagcagtgggcctgtcacagctatggagttctggcacatgataaaacagctatgtgattttgttgaaaagtctatgtgcacatagttttattttcatgcaatattattgtaatgaaaaccaatccgcttctccctctccatgtcccaatccacctcttatgcaacttcccattttatacaagctccagaaatgtctatacacacacaaatgtgtctgagcatatgattacactcatgctctccatgtgctgctcttatgcatatacagagatcagttttcttttatgtgagactaataatgtacactcttctatgatcagtttttttaaaacgaattcttccatatgttcattatttttaattgaagtatacaatcatgtaaaataacatttattttagatgtttacagatgtatgccttaatttatgtactctggtatctgctagcctaattaagacataaaacatttctatcaccccagcaaatttgttctgaatattcttctatttgattatctgggcttttaatggtcagtcatcatttaacttgtctaggtcagcttttccccacacaatatgtgtgtgtgtgtgtgtgtgtgtgtgtgtgtgtgtgtgtaattccttatgtataataaaataaagtatattttctctttttccccctcacacatgacgtttttgcaatctttgttgctgcatgtatctccagtttcttgtaggaggaaagcacaccttgtgtagaaatcattgagcatcattatgctatgtgattctttgtgtctagcttctctttctactctatagagatgagaaaacagaagaattaacatgcaaacctgaggagcaaccttgagatgtcaaaacggaatagcagtggtagtagtaagatattgactgtagtaagatattgactgtagtaagatattgactgcatggggctaaagagatggttcagtgattataagcacttgctgcctttccagaagacccaggttcggttactcgcgtgtacacactgattcacaactgtccttaacctcaggttcaagggatccaatgacctattctgtggacacacacacacacacacacacacacacagggtgcacatacatgcaggaagagatatatacacataaaacatattagtggacatactcatatggaagggggaaaatgtcagggcctcagtcctagagaaacagttacaggcaattgggaaatttcgagagagatggtcttctccatggaagagcctccagtggttatccaataccagtggtaagccctgagatatactatcaggtaacattatatggactgagcaggttatacggatgcattgtgtgtgtgtgtgtgtgtgtgtgtgtgtgtgtgtgtgtgtgtgtgtgtgtgtgtgtgtgtaaaagaaatagaagccatggattaacaagtgagcaaggaaaggtatatggaaggcttggaggaaggaaaaggaagaagttatgcaattataatttcaaaataatttaaacacaagataaatatatttttaaaaagatactgacatgaatccaaagggactattttgtgagcaacaatgcagtatattctgaattggagtgagggccccagttcatctatcctaactaaggctataggctccatgcactaggactggaagtggcatttgcacatttcccaagcactgggtgatgcctccacagtcactgctgtgaccatgctccttatttttctgagtatgtttgcaggaatgttacactctattgtccttgaggcgagcacagtaccatgcagtattatatgtccatctctgaagctgctgtttctccatgagcaagaccttcagaccttccagttgtcctgaatgagtccagctcttgtccttgagaatggttctggtacttgccttcagcaagactcttgaagtctggcaccttctgatctagacgggcttctatgtttaggcccagtgatttgatttttaaaaaccacaaatgtatttctattgtactatttttatattagcttataagatcagctttatgcttaatatctacaatgaacatatctacatttacttatgcatgaacatgtaagtaaagtatggtttttataagtcctcttgtccttactttttgtatagctttcagctgctgaaaggtccagagcttgaaaccactttctgtcactagtactctctttccaccattttcacattgttaatcacaagaaggggtcttctgcagtcatataagcttagatttcttcttgaatcacctatcactgtaatataaacttgtcttagatccaagtacttcttacaataaatcattttttcctccaaatatgtcataatctccaaaaattcctatatgcattcagttacatcaggggcttaattataagctaaaaactgtcacagcccaccgacccgccccccaaccccactccagcaatcaggcaatcaatgactagttctttgtaagtcagaatcaaactccagagaaacaaagattttacttccttttcagagataaaaatgttaacaatgctgatgaagatctaagataccttgatttttaaagccttcatctgatgatacagatgctaaacattatcaacatccaagacaccctggaatctgatacaccttggtggataaataactgcttgaattaaattgttcataacagtcttgctgccttttcctggaaaatgttgacacataacccctgtcttcttcatactctaagttgcaatggaccactttcttttcactctagctcatatttcagttgggtcttcactggaaaatgaatctttggctgtcccagtcatctaatagtctttgtagacttcttaatgctccttgcagtgtctgagttttgggaaccaaagccaacactaggaaatcagtaagcagtagcattctttaacctcattgacagtccatttcctacatcatcctttcttgtcaaggtcacgcctggacaaacaggaagagatagcaccagctggagccccaggtcctacattccttctattccatccttacaaagcatttaaggcatccttctatcctcaagatacagagcatctcctcactaatgttaaggatgctgttctgtgtatgagccctacaaatggggagatgggactgtctgcactccctcttgcctccccttctgtgtctctgggattttgtgaccgccttcttgggcccaagcttggaggagctcctcactatctgtatgcactgcagcagaggcagacagagtggtttcttgactctagcacaaccaggtttgcttttcagtgatttcctcttagcaaatgcactgtaaaaccatagcacaaataataccattcttaaaattcagagaactatacaaagaagaggaaataaataatagaaatctaaaatgtcttactcaaagcgtcaagtctcccttccccaatccttgctgtacattttgggtttagaaaatcaggtctacccactgaatagcacattatggttattttctctgcttcttagaaacagaattttaagtgcctttacaagcagatgttactttctttaatgttaacacttttaagaaatcactgtttagtgcatactatatttgggtttccacagagaaacagaaccaatagggtatatttataaaataaggtattgatttttatgatttggaagctaacaaatcctaggatccagagtgagcagtcctgagactcaaggaaaactggaaagcagctgtctctgcagcgagctgtctttcaggagatgagagggtatgcactctaatctcagggagggtacgtttttgatctctataagtctctagctgaagatgagtggcaggtgctttttttggggtctactgatcgaaataccaatacacattcacacaaaaagagtaatgttagaacaaatatctaggcaccctgtagccaggcaagttggcacatagaattagccatttcaccagagaacaattaattgaaacaatgatcctaagtgaaaagccatccagtctccatctgctaaacgcttttttgactgtaccacgtttgtatattttagaaatgcagaaagaagtccggagagttgagtaagtttatctaagtagcttaacttgttaaaagagagctgggatcccagccctcttacatgccttagctgggtgtgggcagtttcccaagtgtctcagagttgctccctccctaggaagaaagcactgaaggccttagctattgctcaaagctcagggaaagcactgtcctgtcttcatgtgtgaacatgctggccttgggcagcatgcagctactagaagggcccccctctcctttgctttgaaagggctctgtggaacattagcagtaactgtttactgaaagccctacccttgtgcttcagatgtccaatcttcagggcttatcacagctctgtgctcccccactgcccacttggctgtagaggggcagcatgccaggtctgtcataggctggaatgggtaaggattctgaaacatctcttcaaaactgtccccatgggccagtccaatcctgttccattcctcccccattttttttataaacagcttaaaatgttcgcacatcaatcatgccataggtgcatgctgcctgctgattcatccagcatgggttgggccttcctctatggcgatggtgcttgttcaacagtgctgccggtctttgcccatccccctcctgctccacactttaagaaaacactgtttagtaacacgcttaactcgaagtgcctaaatctatcttatacacacagattcctttgtcctggacccttataaaccctctctggttgctcctggagttccattcattatgataatatacttagtccccacagtgctgttgagttgacttcgacaacagcaagcacctaattttttcagagagaagccctaagactgaaaagaatgagttccttacccaagtccacttacaagctacatctcccgggccaggtcttctagtgtagcctgtagatatcagctctgagggcatggagtgaggggaccctcctggccccatccagtgtgcacagatcacagagcaggccacatctgtggcagcatctgtgggaaggctcctgttgaagatcagcatcacgtacagcagcagtataggtgcagtgcaaagaaagatgtattagaagaaaaatggggacagagggggacacactttactgactaaagcagggctgcatggtcgtcatacttctgtagaaggcccaagaaagggctgtgagtcctatcacctgttaagtgactcagttaggtcctctattcccagcagaagtggccttagctacttctgtgaatatcatgtattcagaggaaatcagctcatggtttaagtgtactgcacttaggtcagtgaattctccatcccactgtcacaacctgtactcacgtgcctcctccgttctgtggagttttccttccagaagaacttggtctgactttccacgtggtactggttccaaagctgtgacccatatcattgaaagtgaacaatcttaggcaaggcttctgaagatggcagaccaatcggcacacaaggaagcacaaccctcagtactaacaattctcaaattagaagaagtatcttgctttcaagcctgtttcacttcttcctttagcctggaataaatgaactgcaggtgctttgccaacagtggaggctctgtatggaagcagcactctccagaggtggtgaccaagggctccctagagcctgtggacagagaaccaacttcattcatggcaggggttctcagagttaggacgcatgttcctacccaggttctgttaataactgtggtttctttatgacagtgttgtgggcctggcttgttggcttgtaagactttgtctcagttgttgcatgcatcaaatatatccacaagaaagtgctttattgacaacagaacaccatttctcccccaagttaagagctggtgtcttttgctagaagcaaggtggggatggtgaggagaccagtcgattggtgcaagtctccactgaatcaataggaacatgagtgctttctaggaatagctcagcagttcctgtgggtaagactgtactccactgggagacacacagtcaagtgtgaagagctttgaagagttagggatgttgacaaaggcatagctagctagacttagtctgacagtcttagatgaacaggaaggtggttggagaaaggggcacaactgacagatttggggagttcagacatgttagtgagtcataaacacaatggcatatttagaagggaggtggctggcaggacaggtcaagggtgagtgtgtgccaggctggagcttgctgacaagactgaagacgtaaaggacctgtgtaggataagggactgtaggaggatgaaagtggtgactgagagggacacgaggtcaaaaaggcccccagcctgatgaatggtatgcagagagtgagatctatgccaaggttacgtgggaagatgaagaagcagacggaggctgtgccaggatgagaatctgtaggtagcagggataccaagggtcagggcaaagtatccggaagagctagagaggaagggtagggatgtccagaaacacacacgagatttaaaattataacctagccagtacacatagaatcaccattgtgattgcaggctttgggaaacaggtgatttggtgtgagaaataattgaagttgaaaatgactgcttacggttactctccttttgaacactagagggcagcacagccatatagaatggcaagttagctttgtgttaggactgagttgagtttttaagaaagtttcagaaaagaccttttaaagacgtgcatgcacaggggcctcgggagcctggggcagagaggcagctagataagtgcttggtactcacccttctatatcttagttagggttattcttgctgtgataaaacaccatgaccatgataaaacaactggggaggagtgggtttaatcagcttactcttccacagtactgtttgctactgaatgaagtcaggacaggaactcagagcagtgtcttggagggagaagatgatgcaggggccatggagggcgctgcttactgacttgcttctcatggcttgctcagcctgctctcttatagaactcaggaccaccagcccaggaatgacaccactcgctgaccatggtctgggtccctccgctaccacttactgattaagaaaatgctttacagctggatctcatggaggtgttttctcaatttcagaagactctgtgtgtgtcaagttgacattgaactaactagccaggacattatacttgtcaattcctagtcacatgcaagagctacctagtccatgggtccaggtttttacctctggaggctagtccttcatgctggcttggcttggttgtaacatatctaaaagtaaggtctggtgtggaggcagtgggagaaaagctgaggggctgttttgtggctttcacatctgtggagttgtggtgatagggacagctggatggtctgtgtctgtgatgtggaacaatccagaaaaccttgtaatgtttccaagagtctggaaggatgaggagcagggctgtaagtgggtagcatgtagctcaatggtgatgagtgtcagtgggactgctttccaggagatatacactataagaacttgtggatgggaggcagagtggtcggctgagaagacagcatcagcacaggggcccatctgatcctgcatgtctggaaagtaagggtttcttcaaaatgttacccatcatgttctgaaaggggcttttctactccaatcactgggagagtctgctcagctgtggatgtacagttccaggcacctccagttgacacttagtaagactaagagctgaaggccagacctggaagatcaaggattgtagccactagctgcttgcaactcagtgagttctgactacccattctgtgagctgttcttgcaaagatccactggggacactagagatttatgcagtctttggtgtactagcatagtgggccaggagacagacagacagaaccacttagcctccctggtgaccatagacatggggatgcagatgtgtacgcaaagaagggacacactttgtcacttaaagctaacttgtccagctcagcttcttcaaatttaacaagaatatataaatgcagtttcatagctgagcactcaagcccagcttttaacctttcatggttgatgtttttctttgggaaaaatcacatgaccatggtaaccagacaggggatcctaaaatgtctgtgacttgtgaaaagaaagcatttagggagttgccaagtgtggcatatgtgtggtttatctttagcatctccttctctttccaggatacgtctgttacccagttaaagctccattcgaaagggggctaagatacagcttcagggtcatcctccgatgccatcaccacacatactatatctcggtttccatgtgctcgttcttttgtaggctgcctgactgcattcacacaagaatgtgcagaacaatctttataactgatgtcctattaaaagagaattttgcactgagcaggtcacttgagcttatctgaactggagacacgggcggcctgtgaagtcactggccaaggttctgtgtacagatactctgtcaaagaaggacatctgttgggctcaaacttccttggtttattacagcaatttcttatcataagtaagcaacactgtgtttaaatttcacacatgtgaaatatatattgtatttccaggcaggtaacaagactctgtcaatattttctcagtcacatagttctcagattagagatttacttaagtaaggtgggcctcattagtagttccacttctagctttcttgagcttccctcagtcatcactccctgggtcatgggttggtaagaaacagcaagccccaattccccctgcagttatacactcatgaagcaaagctcttcaatgagttagaactttgtctcatccaggctgtctcctacatgtagttcttgggtaattttcttagctgcacccatcttggtcttctttataacactataatataaaatgactcaatgaatactttctttcttttttttaaagatttattaatttttttatttatatgagtgcactgcagctgtcttcagacatacactagaagagtgcattagatcccattacagatggttgtgagccaccacgtggttgctgggaattgaattcaggacctctggcagaacagtcagtgttcttaaccactgagccatctctccagcccgaatactttctttataaaagtactataagcatgctttatttagtataaattataacacagaaagggaatcccatgtatggaatggggatccgttctgagccagtcaagattgataacccaggggcaaactttggaccagcagatgaaaaaaaaaatacgaggatgggaatgtcaagtgcaggaagaatgatggtgaaggcgaacttagtgttcttattgagaggagctcagggcaccaagtgtgaggcatggggaagttgataagatattgagggttattaaacactgagctggtagagtctcttctaagcttaggctgacaagatggctcagcaggtaaaggtaccttgagtctatccctggacacacacatccccatggtagaaaaagagaacctattctccaatattgttctctgacctttacattcacatcatgcacatgaatgtcctgccacaaagtatacaaataaatgtaataataatagaaacaaaaccacctgagttctcacgactcattctgcaacggtgttcaggccacacacaaggacacactcaactgcagttctaaagggaaaagcctgactgaagttcaaagagtgtttttgtttgtgtgatcatgaaggcaataatgtcaatctactgagataacactgagtcttaaaatagagaaactctctctttgttttactacttacatggttttaggacttacatgagatagttgcatcagagtcagctattccagcctctagcatcggcatcacccatgtcaccgtgtcctatcaccaccgccagcctcggggccgccatctttgactcaccaagctttgggtaaagtgcctcacgtgacagaacaggaagcagtttccatttgtataaatcactcgattatcgatgagttagaagcctgagacaaaacctgtcaggattgcatgtctaaactcttagagcacctccagtgcactaggttctgatttggggagggaggaaaagaataacctcccttccttctgatgctcctcctcctccctctcttctccctcctccccttgctcctcttcctccttctattttgtcacttctgtgtttgagtcaggatctctctacatagcagccttggttgtcactatttagaccaggctggtcttagactcacagggggtcctcctgcctctgcttcctgagtgctgggattaaaggcatgtgccaccacacctgacattattactttgaaaaagattttatacaatatattctgatcacagtttcccctctcccaactcctcccagatcccccaacttcctcacccacccaatcctgtgaccttctctctctctttctccttataaaacaaacaaacaaaaaaacaagctagagtaaaaaataaaaccacaagaatcagcacacacatgcatgcacacacacatgcacacacacaccccttctcaattagcccatactagccccagaaagcaatgggctataagagtctgtactctgtctatggatactttgcaatagtcatgggaagtattaaagagcccatgtgctgttctgtgttttacagaggagatgagtaaagagagcagcatgtgtaaacccaagccaacagaaatgttatcttttagttactggagcttgagctaagtcctgtggaacctaatttgactttgtttttaatcgcatggatgctgttaccttcagcaaatgtttccttcggaaaccggagctgtggaaagttcttgcagagggcaggcacccagctggcaagtgttttccaccttactgagctgaagagctctctgcttctcctctctgatgtggggtcagcagcaactctcaactgggcagctccctataccgtgtaaggaactcattagcccaagcacaccgcaggatcttgctttgggttagtttgagtgaccataggcctgaccactcgtaggatcagtgtcagccattcttgagcactttaatttagttttttccctatagcctcctaaggttctatattttctacatatttctatagttgcccaaattaaaatctcaggccccttgtaacttcaaagttatataaaaatgttattcaccattttatataattctccacgtggaagacaataagactcaactttgaaaccaggctggttggctttgaacataaccttaccaagaaaaaaaaaggttaaaaacttataaactcacaaaacttataaaatagggaactgtgtactctcctgtgccatatagcatttgattctatagagtcattcctcagttacagttgagagactgtcacagtggtggccgacagcatcttcatcttacagaatcaaagaaatgagctgctttttcctttccaaattcacttaacacaatagaagcctgaccagattgttgatccccatgaaacttccaagttatgtcatgtggctaaatatgtagtccagtgacaaagaagttacctggaatgctgagatactggattccatcatagacaaaaccaagtgaaaccccaaatccaaaccaatgacgatgacgatgaccatgactatgaccatgatatgtaaatagttgtcccaagtcagacttgtcatctctgtgataaaatacctgacaaaagaacttcaagagggagagatttattctggctcatggtcttggatgtttccatccatgcttttctgactccatgtactctggcagagcactgtggaagtagtaatatgtggaggaggagtctgttcatctcacagagagggaaagggactggggcttatgcatggccttctaagctacatctttaatgatctatctcttctagctaggtcatctctcaaaataatagaaccacctgaatgaagggttcaacccatgggactgtaagggacatttcatattcaaactatagcagtgatgtatagaggtaatataaattgtaacagggacaacaacattgcctttattcatgctgttaggaagcctttgcacaaaaccaatgtacactagttgtgggaagtatttttaaaaaagggtgcaagtcacgctatggtcagtaggacgcagtgggctggccggcgtgttctcatcttggggagatactctgattcagagctccaaaaatctctccactcaatttgctaagttcctacatgtgggttgctaccatgccaaccccatgtttcaaaattcttgcaaacccacactttgctgccctacctttctctctggaacccatttgagcttctgcgtgaaggaaaacactacagaaacttagttcagaatcaatggtaactcagtctctaggcacaacaactagaatcctaatcttgtaagccatattaaatataaatcttctgaaatcttgcaagccatctaaaccaaggattgtcttgtcctccccctgtccctttccaaaagttcctgtctctctcctgcctcttctcttcctccctccaacctggaagtcccgtctacttgtccagtgattggtttctttgctcactagatgaaggttcacaagaagtcacctgagtgtgtgactcattccttggtccagacgacccctcctgggaaaatggaattaacatcaaaatacaaacagcaccagggccatccacagcacaccctcagactcctgtgtagatgttttagttgcatattaaagggctttgtctgatggatgacatggcaaattctgtgctaaattattacttatttcttcaaataatcctaaccgtatgtttctccttcagtggtacacaggagaaagattagtgtattagtgcattttgtattacagtgaccaaaatacctagcagaggcaacctgagaaagggttcattctggctcatgatctcagtccatcagtggggaaagcaggacagcagcgtagtctatagcagcaagataatataacagagagcctgttcatagcatgaagaacagattcaggttacggaaccaggaattgaatgtagagagaatctcttatgcactgtgtggaagcatcacctgccaataaaaagctgatcacctaatagctgaggcaggaaagagaaggtgagacattcagcatcaagagagataggaattctgggaaagagtcaagagtggaagagtaaccatcaggactcagaggagaccgatgaatgaaactgaggagaggtatgtggcatacatagactcaaataaatgggtcatataagttacgagctagccggggaaatgagccaaagcttatgacctaggcatttatccataactaagtctcagagttgttatttctggcgacgggggtggggtggggtgggtggaaaaccccaagcctacatcttggtataactttcagaggtttgttctatttttccctacctcctgaagtttccagattctcccagtggcactaagagctgggaatcaaggattcaaaacgtgtccctaagggacattttggttcaaaccatgacaattagcatctcacaactctcacaccatcatggctctcactccaatcatcacctcgagaaaggtccctttacttgaacactggcttctccagtgtgaccactcacaccacatagtctagggcattttaggtaagttgcttctgagccctctgtcagttcttcttttactaataccatctgaaatacttttccttccagaaagtcacccaagctctggatagatcctttggtgatgtgtattcagaaaccctctatgtctaggtgtgtgatagacagcatcttatgtataccagtatacaccaggatgtcccctttagtcttccagggttaagcacccagggcctttctgaattctcacccacctgtttgacatataccagcagccaccccacgtggttcctttctgtgggtgttttgttcagggaagtgctgccagacctgtttactgtgttagatgaacctggaacatcttccagcaattggtttactgtgttagatgaacctggaacatcttccagcagtcagtttactgtgttagatgaacctggagtatcttccagcagttgtactttcattcttctccgaacggcttttgacttcagcctcttctgtaactctgagacacaatacccctgtgttctttttctccttcttcttttaaacttactatctttctagcactcaaacctgtgactggtttgaaaaaacaggcctataagaacctgtggtttctattttgttctattatttttgttgttgttctttaaaaaaaatgctttgttgtttaaacacacctacacttcaacttcactgaagagttttacaatacacttttaaagctaatgacttatgcagtaccaaaatattagtgacttaagaagaataataaagtgtgaaaatatactaaattttactgaaatgcttgttattaagttgaatttggaacacatgctgtaattctttattgaaagctatccataccttgttaacacagcaactattttcatttctttaagaggagattatctttaggctgaagtgatactagagtttgaatatttagctcttagtctctttagggtcatgcccgcactcctaattttccgagtgacagttgctttctaaactctgactggaaataaggatggatgagacttttgttctttgggagctaaaatacaaacgccctctagaggcggaaggtgttctgcaatgagttcacagaatggctttaggtttcattgtgctggggaggcgactccacctttaagtctccggaaccaagtttgggagcagcgtaggctccacctgagattgtcaccagtatgctgttttttcctgtgactttcttgtgtgagcatttgtggctgcttagactagagagtaaacgattgttagctgggtgaactgggtgcctctggacaaaaggcttatgtgacgctagagagagagttgtatcaatatagcaaaccattaaaatagccctttattatttcccagtaattttaactcaaccttacaccaaaaaaagacattgagctctgaaagaagccattcagtaggtaaggcaagcagagaaatcctgctggaagcacagggctgttccacagtcgagttggctgagccacgcaccagctaatgaagggtggaggctgcgtagttcagtgtctcgatgctctgtaatagcagactgtatggtcatgtatgttttatttggcctttgttatgttttccaaagggataaccaattggctgataaagtaacaaatgaaaagtaacctgactccactgacctgtgcaacccagcaggaaggatggaaaagaggggcccttagccttgccacagtaggacgggtatggagtagagctccgttcctcgctgcctctgtctcctgtctctctgcacatctgtttccagacttggtgaaaacagcaagttcttcccgtcggaggacagaattggagtcataggaacaggtaccctgagatattggaaacacggcagaattgccccattttcaggttactgtctatataaatactgatgcaattaagaagcatttatgtccaaatagcaaattgatgattatgctaggaacagtggttatttttaagacatggcgtgttatttagactgtgaaagttctgtgccaccaaattgaattcaaatgaagaaatagatgtcacaacaaatggcacagcttgctcatttcctcagtaacaggcactgtagggtgttctctgtgttgaaccagctattctcctggcccacactaatttcttctagttatgaaagaaccatgctatgaaaggcatagtttgatttttttttatttttcataattcacatagtagtggtagatgaagtttctgctttaagaggaaaatcttgttttgatgtgtaagaatacccttagacacctgggattagagcatctaggatattagtttcatgtgacgcagcacccatctccagtacagctgaacctcctttcagttctaactatggtccagaagcaggcatgcagtttggtaacagtggtcactgctctaagttgttatgatgctagtagaattataatgcagccagacagaaagtcagtttactgtgaacttcatttcagaagatcaagtattatgtattgtgtgatccagtgtcaactacttgatgacttcgcaaggcaacatttccccccattggatggcatatagctaaaggataatgagtaactgtaaggatgtgaattttgcataggaatattagaatttagaagtattgaaaatactttatgaagattaaatttacacacaggtttaaatattgttataggcccattattcatttatggtggtttaggaagaggttttttttttttataggcaagcttagctactgtttctaggtttctatgtaatactctgagacaaaatggcacctgcatagataatatatgaagagtctggttttgagcccagcaagagatgctgtggctacttactcgaggagaaagttcatggtttgcctgcgcctttcagagccagccaactaacaaacacattggccaagtcttcattatgttctacacagtgcaaattcctcatgcattttaaagtaccttaattgagagacattgtaggcctaaggagagatctttagtacataaagcaaagaaggcataaaatgcagtaaattccacaccatccatttgagtatgggtcaactgatagcataaggcaatagcacactattagatttaacttagcagaataaattataacacagatttctaaagaaaacgctgatttgaaaaaccccataaactgaaggatcgccatgcctacctggatatagatttccatgtaggaaaccgaacagtgaaatccgtcttggtttttgcactgggaagaggaatatggaagcatgggccggagacaggcatttgccatgatgatgtttccaggacttctctggaaggcttagggataggcctatctctctttttcactccagggacaattttgaaggcagacgccttaggagaaaataatattacagtggtgtctgaagatattgccaggatcgcttgcctgccttaccctcagtggaaattctgctgaatcggtatgcaagcacactgatctctcaaaaccttaggcatcccgtgtaaaatgtgagaatgctaatgactaggatgttgtactcacagatacagatgctggtatgcttggtaaagtaatactgataaccaaatttaacacactcacctcctgtcacggactggccagcagggggaagcattgagaaccaggctctttgggatggaaggtgaagagggctttttcatagctgacaggggcaagtttagcaaagaccaaaagaatgggaggggtatgtcttccagagtcctgagagcagccgttgaattatttggatgatgcttctttcctacttgttagggttacaaactcgtctacaggcagacgttcctaaaactttatgtgattcatgaatttctgcttcttaatatttcttctcctatcttcctttgggaactccctcttagtcaacaaactggctcactgtacgtgctgagcagtgaacctatcatgacagctatcatggatacagctgcaaggcactcatagccctggtcaggcacagtgtgaggccacatggtcactgtcctcacattcagagttcttttgaggaatgaatgagttactggctgtgaaggtcttttatgagtcgtgaagcatcttacccagcacaacacacaaaagaacactagctttagaatcaggtggttccaaactcaacactcaccagtgcaaacatgaccagtttagttttactagactcacttttatcactaaaaaacaaaacaaaacaaacaaacaaacaaaaaaccctggcacaatgacataggcattcacacttgtgaccaattggaagctaccaactcatgctaaatggcttcataaactgatatacaatatacaaattattgacttactatgattaaaacagtaaaaggctgtccactgtgagtttaacctcctgatgtgggcggtgtctagagagcagatattgctgaagggctgacttcctgtaattccattttccatgatgatgcatgaactctgggtgtttattattttaaagagagatatagttatcctgtgaatcaagtaacttacattaacatacacacctatgccctccctgtgggcagacttcagagaatggcaacttttcactgggatgccaatatatttgtttactgtgaattctgttcctcaaagaagacccactttggagccacaccagaatcagaaggtgtggaaggagcaagaagtgagatgaaacaaatgattcagagccccaggccatcatgtggcgaatgagacttagattccttccttggttctgcctcagaccatcatgtgggtaatgagacttgaattctttgggtcttccccttaatgatgtgtggatgacacaacaagccttcatctatgtatctgcctttctgtacatgtctatgtctgttatagtttgaatgagaaatgtcccccatacccagattaacacttgctctccagctggcagtgctgtttgggaaggctgtggcacctgtaggaggtagagcatccctggtggaagtaactcactggtggtgggccttgagggtttgtagactggccctgcttcctgttcattttctactttctgagtatggctgtagtgtgactagccagtttcctgctcctgccaactttccctgcctgttgtcatgtcttccttgccatgagagactgaacccctaaaaaaactgtaagacaaaacaaattctttctccactaagttgcttttgtcagagttatttcatcacagcaacagaaagtaagaccaagacaacaactgattactcttaaaaacaacacaaagggaacctggttccatcagttttattattcggttatctgtgggtttccatatggtcttaaaagcccaggaaacatttatctacttaggataacaaatctgaggcagctcttcccacatccatcatgccctgacctcttggtttgaattcctgcagtcttcctcttggacgttcttcagtgctgataccaggatcaagtgatatgacacacacagagatgccctgacacacagaagatattctgtaaatgctggttccctattctctgttcccttcatgccacaaactttaacagccttattggtcagaatgcgtccacaaaccaggactgggaacttaaggagcacagagtccagtagtgaagagagacatgagagtgagtaatcacgttccaccgagcataacaactatactgttccccaacccacaagctgtggagatacacctgccctcactgtgttgtgtactgctttgcttggcagtgtaatatatgcaaccataggatccattatcatcccacacaaatccttcctgaagaagaatttgggggttgaaggtctactcttcactctcaatgtctccattagctttatgataccacacctagtttataactctatcattggtggtttgcttaatcacacctaacatatgtgtactacaacttgatgcctctttccatccccatccttcctgccctttaaggtgttgcacctctctggcatccaatggtcccaagcatttccaagcatccccagggctatagcaaatgctttcataagtaagagtgagtcaccggagacttatccttctctgatcaggcaacagtgttgcctaactgctctgctaatcctctgcctctgcttctcctggggaaaaactcaggcctatgtgtgctggaggctgcttctcccagtaaggtggtttctaggatctgggtctttgtcctctttaaatccttaacaagcatttggggatatctctctctgatgtctggcttctttctccagaggagcccagaaatacttcgttgggtaggggatcagtgaccactgtgtgttctggattccatcctctctgtgctgggtcccattttgaagtaggccctcccttatgttttagccttcaaacccagaagtccccttcagtagataatcaggagcatccttaggctggagagatggctcagccgttaaagcacttgtgcagaagcatggggcctgagtgggtctccagaactcactaaaaccaggtgggcatgacaaccagactgtaattccagcactcagaaggtggagctggctctcctgagcaaggagcttacagagactagctgtgtggatgagctctgagttctactgaaacctcccccaatcaatagaatagagagtgattgaagactcttaaatttacctaagttgtatagaaagagggcaggactcaggcttcaccttcactgtgatggagtcctgaacatttccacggatgcttccttttcttgagccatcgagtcagttttcataaaggacctgtgttttgggtgtaatgctcaggctcagacagcacatctcccaaacagaatcactcctctagaatctggatcatctctaatccaaaattctggttttattattggcttttttccccttcatgtttgatatttgccagcaacatctgcaaacagtttgttcgcatttcaggcttgaatagctaatcaagttgccttagatgggtactaccataaactgtttagcagattaccttcagcaacctttaattcttttcctccctcttaaacatctctaagccctgataagtggtacattagaagccaagcctggtaatgtatgcttggaatcccagcccttaggaggcttagtaagagagctgctggttcaagaccagcttgggctgtacagtgagagagtacatttgtttttttttttcttcagtattctagcactatccattaatttatgggagctatgatatcctaattagctttagttgttgacttgactcatcctagagtcacttgagaaagaaacctccattgaagaattgcctatgggcatgcctgtgggtggttatcttgattgttaactgatgtaggatggtctggctcactgcaggcagcaccatccccttggtggttggtgctaggatatataaaaagctagctaaaatacatacaaataaccttatacagaatgagcagattccacttatgtatttagaaatgtatatgtatgtaaatatacaaatgtaacaagaaaggacagatttaagaaaaatttatttcttaatatataacacaatgtattaacctgactgggaggagattccccaggaatcaccataggtacttgagagtgtgaggtacttgggagtgtgatggtttgaatgaaaatgaccccccccccaggctcataaaaatggcactattagaaggtgttggcttgttgcagaaagggtgtcactgtgagattggctttgtggtttcagaagcctaagcaagctggactcaatgtctctctctcttcctgttgcttgcttattcagatgcagatctctcagctacctctccagtatcatgtctacctgcatgacaccatgcttcctatcataaccataacgaactaaacctctgaaactgtgagccaacctcaactaaatgttccccaatataagagtggtcaacatctcttcatagcaataaaactgtaagacaggaatcttagttgacagtgaccaaaacctagctaaaacatgctcagaggagtggggtatgtgtaaatgtgtgtattggtatttattggttcaatctagaacaaggttgaatggtctagtgcataagagctacaagtagatctggtaagatctagagccagaggggtgggatccacagtgactccttccacttcctatgggcactgctctgttcgtaagttcagaccattaaagagaagccagcaaaatacaatttgtccactctatctatagcccacacggagtcattgtcctgtgtaaaataatctagggatgagtgctaatttgtctggcttgggtcaggtaccaacttttcattttatcaggtgaaacttgagactgaagcaggtcttggaggaaagctttgttacaatggagacatatgtatgcctcagaaaaaaaagagaatctaattgctaataggaagattaccagttataaagatttctgggggctggtgagatggctcagtgggtaagagcacccgactgctcttccgaaggtccagagtacgaatcccagcaaccacatggtggctcacaaccatccgtaacaagatctgactccctcttctggtgtgtctgaagacagctacagtgtacttacatataataataaaataaataaaatttaaaaaaaaaaaaaaaaagatttctggccacaatgactaaagtgtaataataataggcctggttgacttttaattctagattctaggatctggatggccatatttatccattaaccaattatctaactcggcaaggtgctatatatttattacgtgcaacgtgatgttttgaattgtgcagacattgtagaatgtctaaatcaaggtaattaacatatgcattgcttcatgcttatctttatttctgtggtgaaatcccccaaattctactgggcaactcataccctatgggtaccatgctgtaggttgtggtggacagtcaggatttcttcagtgtttttgtttgtttgtttgtttgtttttctataagactctgtaaattatgcccctttggcatccaaggactccactttgaagggagaaggaaatgtaccaggatacatggcaagcccttgcccctgtatggtcttattcttaggtaggctgcttttgagctcagatcctttgggaggcactaagagttttgcagaatcatgtcacatttcctctctaaagaaagtgaaggttggccagacagtggttgtgcacgcctttaatttcagcacttgggattcagaggtgggcagatttcttagtttgaggccagcctggtctacagagtgagttccaagacagccagggctatagagaaaaaccctgtcttgaaaaacaaacaaacaaacaaacaaacaaaaacaaacaaacaacaacaacaacaaaagaaggtgaaggttcacaaaaaaaatttgaacttatgttgttgtctttattgaattccttaggaccaccagctgtcactataccttgctgaagtgtaagatcacttagagtaactagataacaattggtagctttcgcctttatctgaggtggtccaggcatgaaccctgtcagaggagagctgggagttgtgctccaactgtgctgcctgccactgccatacgtaacgttgttctttgatgcctgtctcagttttgcactgcttcagcgacttggcctgactaaggcagcaagagaatgaagaccagacagacacatgcacccagaaaagctggggtcgggtgtgctgcactctgtgatggagaaaccacagaaccccagaagcttagcatgtttactctatacagctgatcagagaggcagcattacttaacacggccaaacaaggaaactcagatcaacaaggaagcagggtttattgcctatagctgaacaaggaggcaggttagtctcacaggcgctgtctctgtggggagcagtcttcaggctgtaaacatccaggaggaggcaggtcagtggacattttcttcacacactatcaacagacacagaccaaaaggaagcattttccatcctcctgagcctcaccaggagctgaaagattttggcattctcatgggtttgaggctagggtccttgacatggttagcccaagtcattatcaaacagcacacatagtcgcccagagcatcacacccccaaggcttcctcaactcctcacagatgccaccattgtcactgggattttttttttcctctctctctttttaaagattatatttatatgagtacagtgtggctgtttttaaacatatcagaagagggcatcggatgctattacagatggttgtgagccaccatgtggctgctgggaattgaactcagaacctttggaagagcagtcagtgctcttaaccactgagccatctctctccagccccagcactggggattctttagactgaaaagttctgaaacggtcctagtacatgaattcattcattggttcactggtgtgtgtgtgtgtgtgtgtgtgtgtgtgtgtgtgtgtgtgtgtgtgtgtgtgtacgtacattaaggagataaatttccatctttcatttagcatggtcatatttttattatctttttctgattctctacaatgttttttagttagtgtttgcttagtatacacattagggagtttcattatgccaattccttgcatacattctgtactttgtttatattcgctaatacttccctcagacctttctcttcttgctgttttctttcctctaaacagtgcttcacctactttcatgccatataaatgtatgggtaaataattaaatatagattccgtttgaaaaaaaactttgaaacattttcttttttccccctaatccttttttttctcctccctttagactgattccccttccgtcataggtccctccatctatagtcaaaccttgattgagcatacagttgaacataggcaatcatcgtctctgtgcacgtagcttattttgctgaagcaggataacctccagttccatctgttcccctgcacatgacatttccattcttctttatgactgaaggaaacagcatatgtatgtgccatgctttctttatccattcatctgctgaggaacatctagattccagctcttagctgctataggcagtgccataaaaaaatccatgtatttccacgcttggatccctgtaggtatgtatccaggtatgatgtaactggatcataaggaactcctgtttttagtgttttggggaaattctatattgccttccatagtggctgtatcactttatagacccactatcccctgtaagggccccctcttttcctatattctagtcaacattttttttcttgtcattggcctcttgatgatacatattttgaatagggtgcttagtgcagttttagttttgatttctgtcttagggttttattgctgtgaacagacaccatgaccaaggcaacacttctaaaggacatttaattagggctggcttacaggttcaaaggttcagtccattatcatcaaggcgagaagaatggcagtgtctaggcaggcatggtgctggagaaggagttgagagttctgcctcttgttctgaaggtagctaagagaagactggtttctaagcatagaggaagaggttttcttttcttttttttttttcttttaatttaatttaatttaatttaattttttaatttattttttaaattaggtattttcttcatttacattcaaatgctatcccaaaagtccccccaaaccccccactcccctacccacccattcccactttttggctctgcccttcccctgtactgaggcatataaagtttgcaagaccaaggggcctctcttcccaatgatggctgactaggccatcttctgatacatatgcagctagagacacgagctctggggggtactggttagttcatattgttgttccatctatagggttgcagacccctttagctccttggatactttctctagctcctccattgggggccctatgttccatccaatagctgactgtgagcatccacttctgtgtttgctaggccccggcatagtctcacaagagacagctatatcagggtcctttcagtaaaatcttgctggtgtatgcaatggtgtcagcgtttggaggctgattatgggatggatccccgggtatggcagtctctagatggtccatcctttcgtctcagctcctatttgtctctataactcctcccatgggtgctttgttcccaattctaagaagaggcaaagtgtccacactttggtctttgttcttcttgagtttcatgtattttgcaaattgtaacttgggtattctaagtttctgggctaataaccacttatcagtgagtacatatcatgtgagttcttttgtgattgggttacctcacttgggatgcccttcaggtccatccatttggctaggaatttcataaattcattctttttaatagctgagaagtattccattgtgtaaatgtaccacattttctgtatccattcctctgttgaggggcatatggattcttttcagcttctggctattataaataaggctgctatgaacatagtggaacatgtgtccttcttactggttggaacattttctggatatatgcccaggagaggtattgcaggatcctccggtagtactatggccaattttctgagtaactgctagactgacttccagagtggttgtacaagcttgcaatcccaccaacaatggaggagtgctcctctttctccacatcctcaccagcatctgctgtcacctgaatatttgatcttagccattctgactggtgtgaggtggaatctcagggttgttttgatttgcatttccctgatgactgaatatttgatcttagccattctgactggtgtgaggtggaatctcagggttgttttgatttgcatttccctgatgattaaggatgctgaacattttttcaggtgcttcttagccattcggtattcctcaggtgagaattctttgtttagctctgtaccccatttttaatggggttatttgattttctggattccaccttcttgagttctttatatatattggacattagtcccctatctgatttaggataggtaaagatcctttcccaatctgttggtggcctttttgtcttattgatggtgtcttttgccttacagaagctttgcaattttatgaggtcccatttgtcgattctcaatcttacagcacaagccactgctgttctattcaggaatttttcccctgtgcccatatcttcgaggctttcccccactttctcctctataagtttcactgtctctggttttatatggagttccttgatccacttagatttgaccttagtacaaggagataggaatggatcaattcacattcttctacatgataaccgccagttgtgccagcaccacttgttgaaaatgctgtcttttttccactggatggttttagctctcttgtcaaagatcaagtgaccacaggtgtgtgggttcatttctgggtcttcaattctattccattggtctacttgtctgttgctataccagtaccatgcagtttttatcacaattgctctgtagtacagctttaggtcaggcatggtgattccaccagaggttcttttatcattgagaagaatttttgctatcctaggtttttgttattccagataaatttgcaaattgccctttgtaattcgttgaagaattgagttggaattttgatgggaattgcgaggaagaggttttcaaattcccctgccccccaacagtgacaaacttcctccaacaaggccacacccattccaagaaggtcacacctcctaatagtgccactctctgtgccatgcatattcaaacgatcacaagagttgagacaatgaaaaattaacgtttttattgacagaggtattctaattcttgtaattaaaaaatggttaaatgattgttcttctctttctcccctatttacattgaggttttactggttttctgttataacacgatacatttctaggtttttgtccagacattcctctcaataatcctttcctgtgctttcctgagattgtttttctcccctgggtgtgtttagaaatcctttaagtaaatttctgtagtgttttcttttgtgttcatgttgaaatattcttatttctctatcaaatttaaacagataattttcctgggcatagccatcttggttggaaattattggctgttggggcttgaaatatacacttttctaatatcttgaaatatacacttttctaatatcttggctttagatgacttttttgagaagtatgatgtctttaaacatgtttacttttgtgagttagcatttttctcttataccttttaatgttatctctttgtttcaatgacattttaagtacagagtatcatggagaagttctccagttatgcctttatctaaactttgctttgatattcttttctttccctagacttgaggaaatttctgtgatttcattaaatttttctgtgcctttagtttttaaaaatatctcagcttcctctataccatcatctatggttgatatagtctcctacttatattcaatagaatttgaaatttgtagccatgctaatttttatttgatatttgaatgtagtattccctctaccttttccatgtctctggtacgttttcttctgtttgatcaagtctgttggtgtcacatttccttgtgttttctatgtgattcattgttttcagtgtccacattttctttctttccaccccctcccccatctcaactctctagtttgcatttcttacttattttgctgatgctctcatctatgtttctggttctgttccacaggactgggattttttgccttccttcattgtatcttcttttatattgttgattatttttataagtaagcatataaactattcttctggcattttaggaatcatattgtcttgccttgtcatacttcttgaatttctgtgttatagtttgtgcatttgttgctttggatgtctcttccagtttaattggagcattttagtgagtagcttgctttttagtgcttaattctcagtgccatccactgggggaaaccggctattatagcaacaacatcaaaatatagaaatatacttaaaattgattaaagactggtcatataccagtaaaaaagcagagagcggagcatgagcagagcatatgataaagaacacttaggggaaatgtagaaataccagctgatgaggtaaagggtgagggagaaggggaagcaagggaatagaagaagagtaaagaggagttttatagaagaagaggaaagttctcaaacttgaagtaaaaattttctaatagtggaaaaattcataagcaaaattaatgaaagaatgcaagtcatatataaaacccttaaaagataaatacaaggtatcagtaaaggtgtggtaaaagaggtggacaaaaaacggaaatgaaaggttcacaccacgtgatggctattattatgaccaactagagaggatcgagagtcatctaagaaacaagtctctgggtgtgtatgtaagggagttcaaccaaccctgagcatgggcagcactttcctgtggactgggtttctaggctaaataaaaaggagaaagtaaaggaaacattagcagttacagttctctgcgccctgactgtgggtgtcaaagcatggctgcttcacactcctgctgctgtgagttcaacactatgatagactgtaacctctgtgagctcaaatggccctgcctcccttaagtgacttttatcatttacttttatcacacaataagaaaagtaaccagtagacatgtttcaacaaaatcggaagggatgacaaaaaatttgaaagtctctctttttaaaagagacataatgtagaaacactgctaaaagtccactgaatgtaacagagaaatgctgcagtgaagggagtattgaaaatgcaaagcaagggatggtctattggatgtgtgcagtcttgtccattgtatggcttatgctagagttgagcccactcaggtgtcaggtgtcctcagaactgtattcatttcctgtctttccttctttgtgtaccaagagattctggtagccacattaactgtgtgtttttgaccgagccatgttctcagatctttccaaagatgggtcagtctaatccaaagttctggaatgatcaggttgggtccagctggtggcacagcatcctcttgttatctttactttctgagacacgcctcctgccacctgcttttcagagtctggcttttctgctttctttaactgcctcgtctatgtgtctctcattgggactgtatgattaacttcaggctctctgacttatgattagcctggtgttcacaccctcagctctcttttaaacagtaggtccccacaaagattgtgtctatgcatagaactctggccaaggggtgaggtgtgacatggactttccctccactcctggacagagccactggaatagtcaatctcaaagaaaactataactggctttgaattttgtgaggactgtgggcttgactgttagaggggctgtgagcctcttttcattagagccactaggctctaatgataaagtttatgcctctgcaactccacattacagaactactgtcctggagctgtgtgtgtggtgcctttggctgagtcacccttttgtgtgtcagcacctctcaactgtcttatcacccaatgccttcttgaagtgtcttatttcattgtttaagaatctagtattttctttctaacatttatttattttgtgtgtgcttgtatgtgtatgtatgtgtgtacaagaaaacacatgtgaaacaaggacaacttgttggaatgggttctctcctttcatcatgtgggaccctggcaagcgccattgcttgcttatctattccaccagtcagtagagaaggatgattctttccatagctgacacagttggaaatatacaaaaatagaagacacacacatcttatacaaacaaaacaaaacacctatagttctaacctatgagagatgattcacaatacttctgaaatagttgtgaaaagtcatgttctatttgtgtggcttcctgtaatttttgactggaaagcacttttagctcttggcatttcctctcctcatattgtaccgaacacaccaaggcacaaatgctggtctttttaaacaggtgttaaaaaatgaactttcttcccttccagagggtaggatccagagtatagaatcttcatggctatttttccatctttggttttgcagattgagaaatggcatgtaacgcacccaaccaaagacagcggactttgtcaacatcaggagaaagtctatatgaaattcttggtctgcataagggagcatcatgtgaagaaattaagaaaacctacaggtaccatggatgttcagtggggacagttcccgtgctactgttggtgatttctggtgactggctagtggtaccaaattaaagacataagcttcttaccaagaccaggtgatctgatttctggacccatgtttcctattatgtagtatcaacagttcagagtagatagacatagcagtgattttttgaaagaattgctgtatgatgccctgcctgaggaaagggaagttactagtctagaccagggagagagagtgtttaggaagtaggagggaggaaacttaagcaaatcagtagctgaactttaactcatgggacactagatctggtataaaggtttgtcacaaatgctgtactgtcaaccacactggcctttagtttttctcttttcatagctgacttgcttctaatagtaactataggggaaaactgaaatatcattttatttaaaatcctaaggatcagaaatacatatcacatataaaatacctctctaattttaaactatcaaaaatgaagaaaatgtgcatctttaatttatctaatttttacggagagtttgtttccttcaccctttgctgtgtagattaggcagcaaaggattaaactgtccttgtctttagtttccacacatctttctttctcctaagtactggaatgaaaacatcttcatgttattaaatatactgttttcctgtttgtagcctatggttattctcaatgtatctagtcattttaaaagcatttattagttaacatgggagttattttggtttccttttatgcttaatatcctgtacataaattgcagtatgtgtttctaattgtttcctaatagaagagcaaagctgcacttttataagacaaaatgaattgaaacatgtcttgaactgtttttttttaagcttatagttcttttttaatgtatggaatttaaatttttgaaatagaattgttagtaatttctgtaatgtctttgtcctacttgtcatggctaaaaagcctctctcgattacattattgtaaacatatcagcttccttctcctttccgtgcatctatgatttgctttgacattaaatctttgatcttttcagggtttactttggtataagggatgaggcaagacttcagacatggttttgtgaaattagcagcccaccaatatttattaatgtctccaattttaccaataatgagacctcctttgtccttgagcttcaccatgtgataaactatgggagctgatgtgacccccaagaagcttatccaagtggcagtccttcaggctgccatactttttttgaaagtggtggaggctccttaaagccaatgtggatcttgtaacacgtttcacctgcagtgctggggacagagaagaatttactatttattcggcaccagaggttcacaagtgtgcctaggagtggctcaacccacaacctaattggaacatttctgaacttttcttaaagcttcagaccactgttgtgaggttcttggggatggaaatcagaacaattgcattttaggcttagtaacaataaaaatgtgctccaaaatgagaagtaaaaaagctatatcaaacttccttgccattcttaaagctcaatttacaaatgtgacttttaattgcctttattaattttggaagctgagatttcaggtcatatcctaattacggcattaattatgccgtgctgcttgcaagtttaataatcacaacagaaaatcttttcatgtaatcagtgtcttgccattaattttgttttaatgtcatacaaatattattttttcagctgattagggcactagcatgctacccagagcatctacttctacctaaattagacatttgtattctgcaagttattcaaaatgcaggagcaggctgaaaatccactgagaatattattcctatattcagaggtctgcattgaaacagtgaccacatagtgagcttaaagccagtgagatgtaataaaattactgactgttggtccatatgctgtctgaccacaggtcagtagatgggataaagttactgttagtgacctttcttagggccttttgtttgttcctcttgaaagcaagatagagttagaaagtttcttctcttacctttatccaaaatttctgatagatattaaataatatattcatttgaatacatgcatgttccaggtcatcttctcagaggaaacaatgttattaatttcttgcatacgtttctaaagaaagctcatgagcagatagaacttccagactgggcaagatggagtagacatatctctcactgtaccttctgatatgtttggctgaaattcttgagaatgacacaagaggcatttaaaaagaaatctggtagctagaatggggtgaacaggctaatgatctcaggaccaaaggagtaatagccataaaacatcttaggactcttccacttcttacacaccatagcataactgagaaagggagttttcttagttgtcacccagtcttccagcagaactaacccagctgaccttaatctttccccaatttgacctacacatcacccaataaccctataaagtcctgcataatagaaagattgtcatttggaagttccttaacaataaggacaggggaaacactttcaggtctatagtctaggactttgcctttccactcagcctccgtctggcagagatcccatctgacaagatggattcaacagtaggcacccagttgtggaagtgaacttttgtcagaggaggttggagattcccttccccccacgggaaagcactcagccaaaatgaagtccctctcagttttccccgtacgaaaaagaatgctgaaaggctcatgtgaggatagagagatgactcggcagttaagagcactgtctgctcttccagaagacccaggtccaatgcccagcaccacatgggagcttacaactggttataactctaattccagtggactcaatgccctcttcttgcctcagtgcccacagtaggcatacatagacatacattcatgcagaacaaccatacacataaaataaaaacaaacatttaaatattataagagaaaggctcataggagacaaactagtaaaacaaagtagcaccatcaaaatagcaccatagaggctctgaaaaatcagacgcttatcggaatcacctgcaaaagtaaactgagacccacatattaaaccaaagcaggtgactatttgttataataaaaaaaaataaatagaacccaaatatctccagtcaagatatccagatattttttaaatcacctatcataaaaagaactaagaaagtgacaatcggctgactcccatactgacaggagacagatactggaattgcctgctgactattgaaagtaaaaccataggcatgtgggaaagggctcgacacaatcttcaaattgttgtggaacaaatgaagctgcaaaaatcacaggaaagaaagctcatagcaaaagaatcaagtgaattacaacagagaagtagcagaaatcatgctaacaggttgacctcagtaacagtgggaaggactcaaaaaagaatccctggagttcaggatgaaccagtaaaatttacccagtatgcacaacagagagacaataaattaaaaaacaatcagattttagaaatccatggcttaccaacagattactatgcagcactgaagtctcgggtggatggaagagaaaaaacagactgagaatatttggagaattaatgactgaaatcttcccaaatttagcaaaaatcacaaaccacagctagtgaacccaagtgaatacaaataggctagcaaaagaaatctactcccaacacaacatcaaacttttaaaatctaaaaccaagaaaaagacttggaagaagaaaaaaagaacaccatcctatctactgggcaacagccacttgagtctcaggtccaaagcaacagaatctgcagggaagcagacatgacatttttcaagtgctgagggagaatttcaaatatggcatctcataaaattgtatctcagctatcagggcaagttaaggaagttaagaaatacacagacaaaaggcatccagaagaatttggcagtagtagatctattcttagagaatggcataaacttgtgtgtgcccacacaaatgtgaacacacacatacagacacacacacacacacacacacacacacacacacacacaatctatgccacatatgcaagcacatacacaaaattaaaaaataagtactccaagaagtttttcaaaatacaggaaattacaaattgagtgtcatgcaatgaagaaagaacaatagagccagctgaaatctggataaaataagactaccttctccatgggcttcctaaagtgtgaactactggacccaaagttatatcaccacgtgattcttgattgtcctggatggcagtgagacttatacactttgctaaaaccagaaaacacggataccaatatattcatagactatttgaaggcacccacctcaaatgactaagaaaactaagtaataatactataaatagaacaatatataatcctaaaaaaatgctcagataacccacaggaagacaaaaaagaaaactgggggtggtggtggggggagaaatagcaaacagaaacaaaacaaaacaaaggaaagaaaataagaaaaacacttattccctaacataaaatggattgtcagggccgggaagtggtgttgcatgcctttaatcccagcacttgggaggcagaggcaggcagatttctgagttcgaggccagcctggtctacagagtgagttccaggacagccagggctacacagagaaaccctttctggaaaaacaaaaaacaaaaacaaaaaacaaaaaacaaaacaaaacaagacaaaacaacaacaacaacaaaaaagatggattgtcagtagcccttttcttaaacagttcgaatatactatccatcccatttcatttgttacaatttaacagtatatcccagaaatgaccagcccaaaaggatcttacacgttgactttactgccagggcacagatgtaccatgagttcatcaactttctgttggcaatcatggttttaaacgtaccccaaagcttttttgtttggaaaagttggctcacagatagtggcattgttttggaaggtcatagaacttttaggaagtggagctcaggtggagaaagtgtcattagaggtggcccttgaagttatgtagccctgtcctacttcctgtctactcactgattgctgggtgcagatgcagtgtagccaaccaccttatactcctaccaagttttaagccaaaatgaactcttgctctcttaagctactatttgtcgggtatttatttgctcacaacagcaaaaaaggtaactaattaggaggttacgcttcaaggctgccttttaaacagtatttgagcttctcatagagggaaacctcattgccacagaaagttagggaagagtagaggaaataaaatagttttggtttccattctcttcctagttatgtgtgttctgatcccaaatcgctgaaacaaagattcacaatatccaaataaaccatttgcttactcagtttctatttgtttctaattagggatctgaaattacagatagccagtgccaataaacaaggacatgtagcaatatgaaaatgagaaatattctttaagagaggggtgtacaaaattgggaaggagatttttggcacccttagtcttttatgccttagagaattaccataagttactgcttcaaagaccacataaatctctctgatgtctgtggataaatccatcacagggtctgtgaaatgtcttttcctttgaatttctgaaattgaactatgcttcattaagtaactgttctagtagagttccctactacctcaaaggacgggggtggggggaaggtgacaataggaaggcttttagtgtgtcagtctataagctacttaagctcatgacttgttgggattttgtaggaagaatgagaccattttcttaaagaacatgaaaccctttgtgaaaaggcacaatgggaactgagcgaacagccccatcatacttctcattctaaaattagcctgccacttggttctactgttcagaccatttatccctcttgtacaaggtgaattttaggtcgtatctaaagtgacctatcatagaatgaaactcatagcatctctcctggcactctcagtaaggaagaaactgcctccagcactgcagtgctcattccaaagacattagcatccaaggttatttaatcagttcttattgctgattggccaagtcatttcatccttaccagtatttgcagttgagcaatgtcttttcttgttattccgaacttagaaatcttaccgactacttaatgtattgttggaagaaggctctattaaaatgcttgtgttccagaaagccaaaggctgatctatattcctgtcatttgttctcactttacattagcatgttttgccttcctatcttagtttctctgagtcaacatagttcttaggaagctcctgaatgaagctggtgaaggaagagggagagaggtggtgaaatgtggggtgggtagacaactgaggagttaatagggacttgaaatgaggggcttgaaatgagggacttgaagattttcaactgacccttccaactaattcaagaacttgagtgtcttagggtttttctgctgtgaacagacaccatgactcaaggccatgacccaactcttaaaaaaagaatatttaacgtaattggggctggcatataggttcagtccattatcatcaaggtgggaagatggcagcatccaggcaggcatggtgcaggaggagctgagagttctacatcttcatttgaaggctgctagcagaatactggcttccaggcagttaggatgagggtcttaaagcctacattcacagtggcacacctactccaacggggccacaccttctagtagtgctactctctgggtcaagcaaatacagatcatcacattgagttaaagtttctaccaactgaggtatttccagagtctctgctgggaaagtctatagaaccaaaggaaccaggtcattcccattcagtggttcctctaagccacattttcaccctgacagtgataccagtggcccagtgggtttgtctatggccactggtatatccatccctggctctggtctgcgacttcagctcccctactgctcagttggatacagctaccctgcatctgtactgtatcgcccatgcatgacaggcaggtgcagctgctccctactagccacactagtcctcaagtcctctgactactctggcccagaagtctcatgtactgttgaggcttgagccttcaattcctggtggtgagttgagacatcaggaggcatggagtttgatgtcctcctcctcttgcgttctgctgagctccctcaggggtcagctctcattattctatgggactattagcagaattccagttatctctgttcctaggtcaaggtcatcatgcccggttctttcatttaggctgattcttttccagatttcagttacatgctttgcttacgtaagcatcttcccaattgttcaccatgttctcatttgaaggaaatcacagtgggtggtgggttagattcctttttcaaggctgttgcattgactttccaaatgtgccctgatgtgttaaatttcttgtagtgagtgacaagaatatgtgcaatgactcaaagatgtcatctaaactacacagttctacacgaaggcaacctgaaatttgccatctactgctgctctaaacacattgcaagtgtgattagagtctctttttattgatactgattagcatataagcatagttactaaatgaatggattaatgaataagtgagcattacaactgttctattttagcatgctgatgctcatagtattgtgaaaatcacatactttgcatatttcatagctttttttcaaactaagctaaaaataataaatttctcaaatttatttcaaggaataaccaagcaaaaggagttagaactcagttgaagggattagagaaagaaaatggaaggagagagagaaaaggaacagactagatcctccctatctggctccgaggtgctcagcaggtcccttttctgtgaagcagagcactttataaatattccatgcctggctgtcctgtcctatcaggcacctgatcaactttttttccctttctgcatctcccactccatccaagttcttaagggaagattctgcctctcccactgtgctcccagggccacccccatgctaacatttgcagaaagaaaaagtgaagtgatcagcaagtatgttttgattgtgtggttctggctgctctctccttgattgtgtttttattttaagctcttcagaaccatttctcaaatgatatatttaatcatcttgctgaatgagaagtagtcaactggcccagcaaatgcagataggggcagatggacaaggaaaggccttgtcttctgtttggtacacagtatattttctgtgacttcagacctttgagtgagacacaaaggatgagggaaaggacacagagccaatttagagactgtaagttttaagtgtgcaaagtctcacgtgctggtgtggtgtggctcacacttgtaatcctactgtttggcaataggaggtagaaagaatgctgcaaattcaaggtcagcccaaattacagagcaatttctagaccctgcctcaaacaaaaaaagcaacaaaatcttataggttacgtaaatgttaatttaaaatatttaactagtttgtgtacatgtgtgtacctgaatgtatgtgagtgctccatgtgcagaggttgtggagttcagacgagggcattggatctcttggaactcaatttataggtggttatgaaccacgtggctgctgggaagccaactcagccaggtcttctgcaagagtgctaagtgctcttaactgctgagccacttctgcagccataaacattagtttttatctacaccaatacttatactttaaaaaatatacagaaataagattaagaaattaaaaataatatgtgtctatgtcatgtccgaacaaaagcctaacaaaatattgcgccactgatttgaaattacacaaagatctagctctttattagctcaccaaggaccaccaaattagaggaagttggttttatataccctatatatatatcatcacttaagtccctgagctttgtggatcagtttaacttcttgttgacaaagcagcaggtaattaaaacattgcttctaaacactgcttctatttcattcactgctacatggaactttctggaaaaattacccagaatttgaaataatgagtctcctgagtgaaccaaaatgaggaaattgctagtttcacaaggagcaggaagagtataatttctgtagcaaccccaatctgtggtgtttttgcccatctttattagcaattataggtaaaaagggaggctgcttatgaataaagagttactgtcaggggaatgcatagctaatggaaaaattgtaaatatttacaaggcagagtgatgattcaagctcacaagattaattgaaattaatctctatcaggcaccaatttgtttcctgagttctaaaaccttccactgagaagtatgtaaggccatgttggagatgatttccaggtggctgtgtgacctcctttctcctgaatgtcttcatctatttcattctcttgactctttatggagcaccaacctgtcctcagcactgagatcattacaatcaatgtcatttccactcactcagtgtttattccttatcacatgcttatttacgttttactggggagaatatttaatttttcatcagtctgaaccctacatatcacttcagcttatcatggtctcactgatttttatgcccaattttgctcattatggaatatatgtcttgttaaatttgtttttgcacagtaagctctttaaatagaaggaactccatatctacacactcaatggcaaacaaaagggaggcctcattagtagagaagaacaaatatcatactaattaaaagcaaatacttcccattattcgtctctattctacacacttcgctagatgctagagaaaaagttacaggaatgtaactgatagtcataattgaatactgggaaaaagtagacttttacttttaagtcaagagctttgaaggaaagagagtatataacaaagatagaaatctaccctagaggttagagacagtttccctataaagatgagtacaatcttaatttcagtacaggaaaggctagtttatattaaaggtagtcaaaaaaaaaaaaaaagccagaagatacacccacagtgatggctgcacacctcagctaccaggatctgtttctgcaggattttaagtagcttttggtattcatggggatgggctgtgcatccaatcattacagcagtagatctagaagggggcattttgcatgatctatggataaatgcaaacatgtaagtgtatacgaataagtcagtgagaaaaaataattcttgtcttcaagagaactcatgcagcaggcatccagccaagtgatttaatgcttgatggaaagaatcaggtgagccccagcagtggagggaacaaaagtatttgacccactgaagatgatgggagatctgtaagtttgttctgtgtaggtccgtcagtttgtttctgtttctgttgttgttgttaagacaggatctttcttgatagactacctatgcttgatcttacaatcaccagacctctgcctcccagaggtatacctctctgctggtatacactaccactcctgggctgtctgtttttactgttattcttgaaacaaaagaggaaacaataaaattctacattcagtgacatattttctatagaattttctgtattttattatttgtatagatattaaaactatgaagaatggaaatgcttatgaaaaatagcccagttcctcatgaaaggagctgaaatatgtcaagaattatcatgatcacattttatggaatctggaaattaatggagttcttgtcaaaacgaagaggcatttatttgcatgtgaggatggagatgcctgagtgtcccttattttatgagttagtctcgctgacctacaagttagcaagtgaactagtgagtgagctcggggtatctcctgtttctgccttggggctaggattactctgactggaggccaggattagtaggaggaagataactaggaagaggattagtagtaggcaccagtgagacccagggtttttccttttttgggctggctctggaggtaaacctagattcttgtgattgtaagggacatactttgtgaacagagctaccaccccagcctttgctccttgggtcagcagtgaccttaaaagaactgcacaccattccaattaccactatcaagttggataccacaatgatcaggaaaaaaaatattgttgacaaagaagtattcttgattgatttgtctagtgactgaaggacttattagaatccaacaaatctggttaaacaattaaggggatgaaacatgggggctgtggaagtatttgtaggcgactgatgtcattgcatctctgggcaatggaggcagctggaacaaaaggtggattcactaagaatcatggaaggaaatgttgagaatgaggtggtctagggaataagactctggaaagttctatcatgtcatagtcttcattaaccagaagttactcctaagcctaaagttgtgctcacagttaataaagatccatgaagaccttcagctctcacttgtgactgatttgtgtcatgctctgagcaagcaggatagacaaagatataaactgtctaggtgagtgtcaaaggtgtgtctaacacacacaagaccatctgcaaggactgcgaagtttctagttcttagtatatatagaattccatatctgaccttttacctgattagtacatctatgcatacaaactttataaattaggtcagaaaagtgactttaaacaataacagtaacaacgaaaatcatggggaaggagagagtatgggttgttgagttgctgcaaatatccagtttgaaatgtccagtttttaaagtaaattataagaacaggtgtgtacacagggaaaattcagctagagaatagggaggagagctgtgccataggagagctgtgccatgggaaagctgtgctatgggagagctgtgacatgggagagctgtgacatgggagagctgtgccatgggagatctgtgccatgggagatctgtgccatgggagatctgtgccatgggagagctgtgccatgggagagctgtgacatcagacaactgtgaaatactgtcttctagatatgctatgcctgctgctcatataaactcatgaaagccatggttacttgcacaagatttgaagaaagttaagccagtcaacactttagtgtaaatgggagaaagctttcttaagctccatcccaagcccaggagctattgccagttgatggctgctgagataggaagttacttttctgtatggttactaggatgttgtccttgccccactggatgctttcacaccaggctcatatgccagcactaagtagactcaatataaaataatagcaacgaggacaacaacaataacaacaacaagaagaagacaacagaggacatgacattgggaaagagaagggttgaagtggaggctcctgggggagttcaagggagatagtgtggctatgttcaaaatactttgtatatatatgtatatatgtatatagccatagatgttgaaaactatcatggccatgggcaaatgataggcacagagaactatagtgacacaaaattgccagtctgttcttggtcccttatgagagacagccctaatctggtttaagggcaatgaatacaaactgttttggatatttccactctcaaatcgtagttcctggactctgggttatttgatggtttgtcccattctctatttcactcacagtgtgctggccacttggcacaaaacactgcttttgctaaacttggctgcaagagctcctcatatgtcttgtgcccaactttcctgttctaggctctcaagccaaacccagaaaagaactgaaaagacactcaggatgtctagagaagaaaggagcagtcatcaaatactacaaaaaagggtcaagtacaagacagataaaaataagcctgtgggatttcatccagagcatcatagaaggaagaggaagtttgtgagagagctgaaaatagaagtcaggttatagtgagttgaaaaggaaatggacatacttacctggcagggaagataccatgatcacgaaggtggttttcccagggcgaggcttatccattgcactccagatgtgctgacccctgcgatttccccaaatgtgggaaactcaactgcataatttgtggtagtgggggactgctttagagctctcctctgaaagaaagagaagggaatgggcattgaagagtaacctttttgcatgagagaagaatgaagttaaaatgcaaaggaagaaaagaacatttataaacaaggggaaagatgaggaagctgggcctgacggcatgggtctataattacagctatctggaaagctgaggtaggaagaccatgagttcaaggccagcctgggataaatagtgagttcaagactaacttgaataacttactgagaccatacctcaagaagataaaagggcaattcttgggccacagtttggcagtacgccatgcctagagcttaaaacacaagctaggggatccctgaggagatgggagtagcaaatcactacagaaaacgttcgagttgggagtgggggctggtgatgctttagggtctgcaggcgaatagatagaaggaacacaagtgggaagaggacggagacagtggtcttattactcagaagtgtacaggcagaagattgttctttccaagtcagaagtgggggtgtctgttgagggaattggaaagagcaatcaaggggggaataagaggtttggaaattttttcttggggacatgaaaaggaatttactaaagttgaacagagacaggcaaaccacaaaggagacagccaagggggaactgtatatttttatagcttgttgttcacaggggtgtaaaatcttgtctgacaatgctgctaagcctagaaataggagcaggggccatagtcatcttctcgtgggcaggacaggaaatcttttaaggaacttggtagaggttgagaatgatttaggtacatgcctatgattcaaattaaaccaacaagaccccagcctgtaagaaaaggccctgttcagtttaaaaagtgagtttctgggaggaacattttaagtgacagctgggccaagagatatataagaagacagtgtcatatgtttttgcactgaaaggatttgaagaagagagactgaaagtttttgagtgtgacagacattcctaggacctgcaaggagataacgtgcagctaactgtcactgcagctcgacccagaagggagcagcggttctggcctgctgagaagtctcaccagacatgcagcggtggggcctgctattggaagcaggagtcctggctattgagctgagaggaggtgtgcccatttctcctccatcctaatgttcttgtaccttgctagtcacagttcaggagaggcagtcgacctgagaaaagaatgtactttccttccagaaacagtgaagttagaagcccagaaatagttgttgggagcttgttccgtatacaaaggtagataagcagatgcagccccgggactcctagagcaagctggggcaggacacacccagactgtcggaacttcaggtgtccacctttttttaaaattaggtattttcttcatttacatttcaaatgctatcccgaaagtcccctatacccttcccccgacccgccctgctccccaactcacccacttcccttcctggccctgccattcccctgtactggggcatatgatcttcgcaagaccaagggcctctcctcccattgatggccaactaggccatcctctgctatatatgcaactagagaaacagttctgggggtactggttagttcatactattgttcctcctataggattgcagacccctttagctccttgggtactttctctagcttcttcattaggagccctgcgttccatccaatagataactgtgagcatccacttttgtatttgctagcactggcatagcttcacaagagatagctatatcaggatcctgtcagcaaaatcttgctggtgtatgcaatagtgtctgggttcacttctttttcagactagtacttctattgccatcacagcaagaggcttacagaattggcctcggatttatctaatacacttacacggataatccagtgtatttattttatcaaggaaagtaaagacgtggatctgagaaagccacagaagacttggtagcaaacagaaaactgaaactaggcaccactaacgggcatttaggcttccataaaatctgagtattgatgcattttttaactcttataaattaatatatatcaaagtacaatgcctcatgaaaaagttgagatcctgaacatccctggtacagtggcaacaccagccacgagagggcagcacttgactcttgatgcagttctgcaggcaagaagagagctgtctgagaggcagcagagtatctatctatctgtatggttctttcctgtccttgcctcacaccacaaagcctgaaccacaaacgtgatgtgatgtgatcccgcaaaactaggacaactcctttaacactcagctacagtgtctgcaaatgtggggaagtcacagtgctgaataatgtggtctttagtcttttcctgtggcatcttgatggtcaaagcacatgagtcattcgttctggtagcagatgctccagaaataatcacacagccgtggtggggttggcatctgtatctgcaatatgatgccaaacggtgtcctggcctttctatcttgtccttctggtggactttatactgtttccttccttccagcctctgctctgcagctcagaacgttaaatctttttgtgttgagggccactgtccagggtacagcatatgatgtggttgtacttggctctgaaagtttgaggaccaaaactagggaaggtatggccatgatagccatcagcagtagttgactagtacttggacaaggttaaaccagaaataatccttaccgcatgaggtccactcgctgacagctgcccccccccccgtactgaatgacaagggctagggaaccccaagggcagagagagtcggaaagagccatgtacccaggcaggcagttccacccagcccacagaagagtctttggtcagagaactccacagggtcttgcatgcagctcaggaactgagacacagagccctgtggtttgtgtcaatggccagcagatgctgagttcttgcaggctgtgtaaaatagaaaggctccaagtgactaaaagctgcttgtttgggctatttttatataattggatgtgtaaaaatttgcctttggctttggcaggctttgagctaatgggcctcagctgcagtgaaggagggcaggacctggggccattaggcagacacatttgttgcccaggccaggaagctcccagagattagcaggttcctggctaagtactggctaagtacttcctactagttcttcctgccactgagagaaacaggaaaaccaaaaggaaatgagtgtctcaaaagcatttgaaagtgaaaaactactgaacgccattctctgaggggtgtgaggcttcaaggcggcaggcttcaaaccactccagagagagagagaaagaaagaagaagaggaggagaggagagaggagagggagagaggagagagagggaggggagaggggagatagggagaagagaaggggagaggggagatagggagaagagaagagaagagaagagaagagaaaagagacctcataaatgtcctaaagatgggaattctgaaaatttattgagcctatggagtaccacaggacaggactaagagtaccagaagccatctgtggtggaaaattccattggtaggcctcaataattggctttatggtgacttcttgaatcagggctgagtttctgagctttctcaccagtgtatcagaagagattgtgatatgggtttataatcccagaacttgagaggtggaggcaggagaatcatgagttgaccttaatgctattgaattcaaggtcagccttggctaagacagcctatctgaaaataaataatgtataaggctatttcaaaacttgaaatggcctacctgcttctgctttccagtctggtttaaattaacagtgtttatgaaatttgactctttttagtcatatgggaaactcatgtacaggggaggctgagcacttaactgaatgtccccagaaaaggcaaatagagctgagaaaaactggtcctacctatctgggtctgactataatactataagttaattaataaaatactattattttaagggtcctagaagtgggtactactatggctaccactaaactcttagttacctgtgtaatgaagaaaatactggtttattatattgggttaacatggtcccctagacatctaaaagtcataagtaaaatactctgtgatttgaagttatatcctaatattcatattgcttctgggaaatttttaaagtacaatattaatcacacaaagataatgaaagcaaagagagcagggttagaagtgaggtcatggaactatgagaacttgagtagttagaattgtcagataaagattttaaaacaaatatgattaaaaggatgaaaaccaagactgagaatttgcacagagtgtctcggcatcacatgtgaacatgtgtgtttataagctgacaagctgtgtctatcacagacctgcctagacctctctgttccctgtgctgaatgctgactgggaactcagacttgcctgttaccactccaccaccctagaccaaaacttttacagaactatgtgaaggaatttgcttcttagggtgcgtagagatgactaagttgaccaacaggatatagaggattccagaagtcaagaggagagaactttaaaataaacaatagtgttatccagaagataccattaagtaataatgcaataaagggagatgtattcagtgtaaataatcaatgaaagattcatgaggagcacatacagaatattttcttagaccctacaaattaattttaaaagccaaactaaaagttataaaagacagaaatatattatttctaaatgtttctttctacatataactatataaaatatataactagccttattatagatcataatattacatatatagagatatatatgtatacatgtaaaacataaacatatagagactatgtacagaatcagacagacattaagatgctggttcatcccaaatgttatggcactcattttctgtatcttcacatgtgtgtcacccaagtccacgagggtgtaagggccttgattctccgctgtcacacatagcttcagatgttccatggtcacactgttggcaggtttctgattctgccaactgtggctctggcggctcatctctgtatccactattggtctcattctcgccacaggcaatcctctctagacaaaggtctgttttctgggatctaatatgatcccaggcttctctctctttattccaggctgtggctatattctcgaatcatttttttcatacactgtgaaaggtgtatgaaagaacaagtgattgttctattgaaacagggtctgagttcctcccaggtttctctcccaaccctctccttattcctccacactcaatttcatttttgtgttgtaccccacccccaccatacaatgctttctctctctcaaaaactaaattgatacacaaaatacaagaatatttaaaataaacaaaagctcactatgatgaaaaatggcaaacaaaacaaaatgaaacaaaaagcgcagttggcagtggctctgccacagggttctggaacacgggaagatatcagcggctgctgtctcgtctttttagtaccctgcaggaagatttcttctgaggtcaaagagaacacatgtttcatggcccaataaggaagtcaggaagaaatggagatagattcacaataatagccaacattaaaaactgagttcagaggcagaaatgtgctgggtgtggtagtgcatgcctttgatcagagcactcgggaggtagaggcaggtagatctttaaggtcaaggccagcgtggtcttcaaaaatagttccgggacagccagtgctccacagggaaaccgtgtcttgaaaaacctagatagatagatagtagatagatagatagatagatagatagatagatagatagatataaacataaaaataataaataaaaggaggcagaaatgtgttcagcaggaggaaggcagctagagacacaaccatgccacaatagaatgtggctgaggacatcccaaaagctctcctctgacatctcaacccatggagggacagctgggtgagccggtcagaatcagccccaggtgactgagaggctgggatggcagtaggtgggtctcgtctgagagtgttggctatgacatcctgtttttctcccttctagtccacttttgggaagcacgggaatgtttagaaatgaactctcacattctagttgaatatgatgtcccttttacctgtaaaattagaaatggcaagaatacctttaacacaaacaggtgatggttgtatttaaatgctcaacctgagctcccagagaaccttccatgtcttgcttgctctgtagataacccccaagcaggtggggcaccactgagctcacctgcttgaacagttgtgtaattttggcagctgcccctgctttgccatctgtgccaaggaaactcagagccaagagtgtctgccaagaggagtcaaaacactgctgacaaccaggacttggacttgctgcaaatggaggcgttccagccctccaaatcagccaacaccattgttaggggagtgtgataaacggctgagtgcatctgcccttgtgagctgtcaaagttccaacagggtaacaaatgagaggaggccaggcttctgccgttgtctgggtggagcgtgtcagtgttcctctgaagcctggaggcaaggcaaggtttataagaaccattctttctcagggaatgtttcccttctgggcagaggtcacagcccttcccttgggttagacgacacgtagtaccttgaggactaccagaaggaaaagctgcacagtgaaattccaggaagggtgcaccacaaagccagctgcgggaagagtgcttgagggaatgtccctgaccaagaacacgatacatactcagaaaacgtttcttgtatgtttatgaactctctgtgactcaataataggtcacttaaggcaacaaaacctgaattttcagatgtttcaaaagaatacgtcttgtcactggagctttaagatgctttgacaaaaacatataagtattatatacactatcataagcaaaaagaaagcaaaaaaaaaaaaaaaccctgtgatcctaatgtaaagccataaacacttaattctggttattacttcccatttttctatttcctttttttctgctttttaattttttttttttaccattactttcctcctcttagaacatgctttaacacatgtgtatggggttggtatgaaggatttccaggacattgtgtctggtctttctgagtcctgggctttttacagtctgtctgtcttagcattttgagggattgctcctctttgaacatcgtcttcccctggatcccaagactttgcactgtctagattttcccatctatctcactgaaccttgctttttattgcttgttttaaagtgtggtttttgtcttgttttattttgttttgttttgtttgagatagattggctttaggtgtgcctaccctgcatggctgggatttcttaaatcctatctcaaagcccagtctttggacttcttgaaccacttttttggactttcttgtagtttcactattgtaaatatcagcggcctaccaagaacttccaaacgtaggtctcttacagtattttccttctgaactctggactcatggctctctagatttacttatattttaatacacatctcaagtatccaaaatagaaccattagaccccatcaaatcttcagtataagagagccccttgctgtcaaacaaacagtagtaaccaaatctgtttgctaaggcctcaactttgctgtgatcctcatcttttttccttttacccccacatccaaatctctcaaaatataccaagactctgttctgttgtccacaaccacactgcctggatcactgcaagaggccttggaagcaccggcccactttagccttgggcatctttcagattgcgtatctgaaggtaatgttgggtgaactgttgatctcagaatactcaggcagtctctcatatcacacagactgaagcacatggcctgagagtctaattgtgccgtgggcctgcttctcactttagctgtgtgtctctgggcaagatccttatctgtatattctcatatgtgaaatgggataatactaaaaaagcctttgccatgcttgctagaaaaatatttatatcaagctcacaagtaatcacctatagtgaacactgaaaaggttataaaatgacaaacattttgggctaggagcaaaaactttctcatcaattccacatttcaaaaccatgacaccagaagttttggctataagaacttataggtactccaaatatctctgaaagcaaaagacacacacacacacacttttttttttttgataaaccaaacttaaactaataaactctagttattctgttctctatttgttctgcgatgagtggtggaatagattttatacctggatttatattctcaagtattatggtactccctaagcatacatgatctttagctgcatgtaaaacatccatccaccttttaatcagcaaattttaatgcataaaataagtgtgattttttaaaaaataaaaacatttacaatgtaaaatttaaggggaatagctggatgaggacagattgttgacaataatttctaggacacactttacgtacagttttaaatatttttaaactatttgtattagtctcctagctcttttataacaaattatgactataataacatactcggcatcaacaagacagtttagcaagtaaaagcgtttgccaccaaacctaacaacacaagttcaacacttgggatccacataatggaaggggaggactcactcccacaaattgtcctctgatcttcaccgtggtgcatgcccacatgtgcacacattaaataaatcaatgtgaagaatctccttgcacaaggccctgggttcagtcctcaattttagaggtcagaatcctgaaatgtgttttacctggctaaaagcaaaggacatgttcccttgtgctaaagggaacattttctcccagtccctttcctctaccaccactcccttctgcccccacgtcctccatcactcctcttccatttctctgttttaaaaagggaggggtaggcctcccatggatatcaactagccctggcatatcacattgcagtaagactaggcaccccctctcctcttaaggctggacaaggctactcaataggaagaaagggttccaaaagcaggcaacagagtcaaagacagcccctgcttccacggttaggaatcctacaagaagaccagagttgtgtaactgtaatgtatgtgcagagggcataggtcatatgcaggctccctgattggtgattcagtctctgtgagccacttaggaacccaggttagttgactctatgggtattcttgtggtgttcttgacctctttgacgcctacagtctttcctcctcatcttccataggattctccaagctctgcctaatgttaggctgtgggtctctgcatctatttccgtcagttactgggtgaagcctctctgataactgggctagtcactgaactatgaatatagcagaatatcattagaaatcatttcattgattttttttctagtcatgattagttctgtgctaggtctctgggctctacagcctctgaatcctggtgcttcagtcagtgtcaggagtgaactccctctcgttaggcataggtctcaagctggaacagatattggttgacaactcccacatcctctgttctacctttatcctggcaagtcttgtagacaggacaacttatagatcagaggttttgtgactgggttggtgattcaatatctccactggaagtcttgcctggttataggagatggttagttcaggctccatatcccccactgttaggagacttaactagggtcacccttattgattcctgagggtttccattgtactagatttctagcttgtcccaaagatgcaccaccaccctgattccagttgtctaacccatgactctctccttccatctggcccttcctgttcccatcctcaccccccccctcacgtcatgtagacccctcctcccatccacctcctgagatacctattctatttctccttcacagtgacattcatgtgcctcccccttccccttgagccctcctttctgcttagcgtctctgggcttgggattataaaatggttatcctttactttatggctactatccaattatgagtatggactatgtttgtctttctgggtctgagctaccttactcagaatgatcttttctagttctatacgtttgctggcaaatttcatggtctcattgtttttaacagcagagtaattctccattgtgtaaatataccacattttctttattcattcttctattgagggacatctaggtcatttccagtaactattatgcataaagttgctccaaacaagagttgagtaagtatccttgtggtatgctggaatgtcctctgattacatgcccaggagtggtataactgggccttaaggtagaactattcccaattttttttgcaaaaccaccatataggtttccaaagtggctgtacaagttttcactcccaccagtaatgcttcatatcctggatagcacaagctgtcacttctgttttggttttagccattctgacaagtgtaagatgcaatctcagagtcattttgatttgtagttccttgatgaataagggtgctgaacatttctttaaatacttcctggccatatcagattttgctgttgagaattctctctttatctctttctaattgggtcatttgcttttgtgaagtctagatttttaagttctttatatacttcagatatcagccctctgtcagatgtggggttgatgaagatctttttctaatctgttggctgctgttttgtctctttgaaggtgttcttgccgttacagaagcttttctgtttcatgaggtcccatttgttaatttttaatctcagtgcttacacacagttggtgctccatttaggaagttgtctcctgtgctgtactcaaggctattttccactttctcatctctcaggtttagtgtatctggttttatgttgaagtttgtgatccacttggacttgagttttgtgcagggataaatatggatcttttgcattttcctgcatggagacattcagttagaccagcaccatttgttggattctttattcttttaattgtataattttggcttttccccccaaaaaaatcgaatgtccatagttgtgtggatttatttctggttcttcaatttgattccattgatcaacttatttgtttttatgccagtaccttgcactttttattgcaattgcctaggcaggacttgagatccatccccagtcctgtgtgtggaaggggagctgacccccccggtctctgtggcctggactccttgtaaagtgtttgtgtttcttagccattatttgaaggagagagtggcctaagtctcgacaactcatgaaccctggggggggggggggggctgttttttgctgagttttgctttgtattttagtaacactgtgtgctcttgtacttcaaatctaaacttttacagtagcaaacactgtggtctggtgacaggggctgttgaagccattccaagcctagccaatgtaactgcctcgggcacacctccaaagtctttcaattctatatccttctcannnnnnnnnnnnnnnnnnnnnnnnnnnnnnnnnnnnnnnnnnnnnnnnnnnnnnnnnnnnnnnnnnnnnnnnnnnnnnnnnnnnnnnnnnnnnnnnnnnnnnnnnnnnnnnnnnnnnnnnnnnnnnnnnnnnnnnnnnnnnnnnnnnnnnnnnnnnnnnnnnnnnnnnnnnnnnnnnnnnnnnnnnnnnnnnnnnnnnnnnnnnnnnnnagggaaataccatgtgtatgtatactttaaataatgactttattactgtctgcagttcaaattttcaatatgggttttattttcttaccttttgcgaggttatatatgtatgcatctgtagttattcctaatggcattaaacagtgatttgttctaaaagccaaaaaaaaaaaaaaaaaaaattagtacaacttgaaattgggcactgtgatagctccagaagttcctttaaagtacagaactgtttcagttgagtttcttgcttatcgatatgaagttgagtattgttccttcaaggtctgtaaagaaaattgtgttggaattttgatggggattgcactgaatctgtagattgcttttggtaagatggccattttcactatgttaatcctacttattcatgagcacggaagatctttccatcttctgatatattctccaacttctttcttcaaagacttgaagttcttgtcatacaggtttttaacttgcttggttcgagttgcaccaagatatgttacatgtggctattctgaaagatgattttctgatttctttctcagcctatttatcacttgcatatagaagggctactgatgatctttaccaggctatgtaagggttccttggtcgaatgtttggggttgcttgtgtgtactattatgtcatctgtaaatagggaaactttgattttttttttctttctagtttttatctccttgatctcctttagttgtcttattgttctggttaaaacttaaagtattatattgaatagatttggagagagtgtacagtcttgtccctagttttagtagaattgctttaagtttctttctatttaatttgatgttggctatcagcttgctatatatcctgccatcgttatgcttaggtgtcctttttatccttgatcttttcccggcctttattaggaagggctgttagatttcgttcagtgctttttcagcatctgagatgatcactttttctttcagtttctttatgtggtggattgcattaacagattttcatacgttgaaccatttctgaatctctggagtgaaggctacttggacatgatggatgatggtctttgtgatgtgttcttagtttcagtttgcaagtattttactgaatactttaataggtgtggtctttttttcatttagctttacaggttggtttttaagatatgtcctactcttctgttctgcatacaggcttttattacagcactatagtgacacattctgtccagatcaatacagcctatgcacacccaggatggcctcctaagggagaacagtcctgtgggattttatctgagagtcatgcaattggttttttctttcttttttagtggagaaagaaaatgaaggctcaattttgaacacggctttaatcatttgaattgtttcttgacagaagtcagagaaatggctactgtctagtaggctgcatggctaactcattaaatccacttcacgggttgcttttcatagctgaatacacttaacatcaatccaagacatcccactcaagtcagaccacagatgataccctcaggatcagctttatcctccccatgggaaggaggaagagccttatacccacaactgtcgatgcccaggctgttggaagtagaaagatccctgtggaaagaagtcaaatgcatacttggaagcaagagaaatcaatagtttgttcagaaacataaaaggtgataaagacatgtagggcacttatgaaggaaccctaatgtttgctcatggtgatataaagttaagagtatttttatgctttaactttgagactatgtaacatgagattctgccattctagatagctttacatgttctaagtgaaattttagtgtaaactagaattcatgaatacctctatgtgttggagtggactacaatcatcttcatttgccagtagtagggtatctcagccacagcctttatccccttagtgagaattcctttgaagatgtagagggagaagcaatgtaatagtttttgcatactgggaccaaatagcatcatttaatgagaacttagaaacatagcatcccattgaaagtgtacaaataaaggatgtacaagtgagcactgtctttataaagtactgttgtaatttctgatagggagctaatacttttctccttgcttttaatttttaaaagaaaattagccctgcgacaccatccagacaagaatccagatgacccatctgctgctgagaagtttaaagaaatcaacaacgcccacacaatcctcaccgacacctcaaagagaaacatatatgacaagtatggatcgctgggactctacgtggctgaacaatttggagatgaaaacgttaacacatacttcatgttgtcaagctggtgggcaaaggtaaatcacttttttttccctcaaaagcaatttcctggaaaaataatggtattattcatcttgttagaccctatctcaaagaaagaccaaccttccttctgttaaactcttgtaaataaaatgcgacatcgcttcctctgaaagctgttatttggagaccatttttctttagtccatcaattaattatgaaattcaacatgacttaacagacttctagacattaattatatctgagtatggagcttcaggttaattctgactgctcccttcttccccccatggtgactaattaagaactgactcatttttcaaaactaaaaataatttattggtgtgacaactatttaataaattattataagataaatttagccatgtactttactatctatagtataggctacatcagcaaagacaatacctaggaggatgggtggtaattatgttacaggctcagctggagcctgccttgaggtggcagagaagaaaatgagaggaaaggtgagaattaagtggtagaagacaagagattgatagctacctggctaagaaaaaggcaatatgtttaaaacagcacaatcagaattgtagtggtaattttgtttcttttcccagaaatccctaatatatatacatttgctggtggttttatatttttataaattttagtgttctttatgataaaagcaatagttttacatataggacagacattgttctattccatataggattctattgcatatagagttatattacatattacaatatgtatattgtatgtatatgtaatggtacatatagtatatatgtaatattcatatgtatatgtaataatgtatattacatgtaaaatagacatatgttccattaatgtattttgtgggaagttgacattcatgtaagttgtggaaaatactaactaactggagggcaccatcctgagtgaggtaacccaatcacaaaggaactcgcacaatatgtgctcactgataagtggatattagcccagaaacttaggatacccaagatataaaatttgctaaacgcatgaaattcaagaagaacgaagaccaaagtgtggacactttgccctttcttagaaatgggaacaaaacacccatggaaggagttacagagacaaaatttggagctgtgacgaaaggatggaccatctagtgattgccatatgcagggatccatcccataatcagcttctaaacactgcattgcatacactagcaagattttgctgaaaggacccagatatagctgtctcttgtgagactatgccggggcctagcaaacacagaagtggatgctcacagtcagctattggatgggtcacacggcctccaatggaggagctagagaaattacccaaggagctaaagggaactgcaaccctataggtggaacaacaatatgaactaaccagtacctgggagctcttgactctagctgcatatgtatcaaaagatggcctagttggccatcaccgcaaagagaggcccattggacttgcaaactttatatgccccagtacaggggaacaccagggccaaaaagggggagtgggtgggtaggggattgggggggtgggtatgggggactttttgggatagcattgaaaatgtaaacgaggaaaatacctaataaaaaaaagaaaagaaaaaaaaggtctgctttagaaaaggcagaattcatgttgaatagaactttgattagttttctcccacttaaacgccctatattgaagaatttgatcggaaagaggatatgttttcatagtaagcatggatagacagtctgaaccccacagccccacttgtcttctcctaactgtcttgataacctttcacctttctttgtgggaaacttggggtaaagagatggcgctaaatggattttgaccatgtggtgagaaggtacattctgtccacagaatcaatgagggcagactagcattcacacaacacagtgggctttggtggggctgcacgggaacctgccttccagatatgacactaattccttgagaagaaacatctgcagtccagatactcacacatgcttacctgatattgtattttatttgcctaaggatgagaagaaattttgttgttcagggagctgaagaaactgatcaaaatttctatagataagcttcaatcatgcagtagcaaaaaaagatacaacacagagccatgccaggcacggctccttacaaagaagtatactttccttttcttctgtaccaaagctcaactgcatagcacttacctgagtggcattaaatatgttccatataaatgaaacaatatatcattaaaaagtacttttaaaaagtaccagcttggaactaatagttactaatatatattgtatatcacatatggtaagggatgaagtaagactttcccaaaaaagggatttccctggagaaagaaacaggatggggatgaaaaggagattttcagaaaacttatggcagttgcacagttcaaagaaagaggaaaaatataggtgaagaacaactggggtcgtagagggccatggctggggaatgctcacaggggagtcttagaggcaagttgggggtttaaattttccctaaaatgatgaaatcataacgacatacaacaacatgcaaagagaccgtaagtgtgtgtaaccaaaggtcctccactgcaagccatcctgagactccatcctcattcctggagccagaatgagtagtgacaccttgagaaggagaggaggcgaggggtgggtgtcaagcttgaattcttcttaggtcactgaagaaatgtgtgcatacacatgcgatctttatccattgccacactcccagtcactgattatataaagtctgctttaaattttaagatgtacaaacttcatttattacaacaaacttgattttgtttggttgccaaaaaaaaaaaaaaaatggatttcttggaatttcagattggagaagtcaagagaaagtgttttctgtttaatgagcaaatcacttgtgcttatagggaaatcttgatgctatttcctgggaggaacaaaccatttgtttgcgtattattttgtttattcactaattcagtaggaattagacgtctgcaacatgtcaggtactaatccactgggcagatggggtaaaggatgactaatgattgtagcctataagacattcctgtcaagcaatctctgtggcataccatcagcaagaagggattggagatctgagttggtatggcataccgtgggaataaaaaggataggcagccattttggaataggaacaagcaagtcaacataaaggtgatttttgaggtgatcttagacagcaggtgggtctaagctgaacaatggtcaggaatgtttagccatgcaaatccgtatggagtatccagctgtatggcagaaacagggttgtgctagtgctgggagagctggcagcagacgtgctgccaaagcttcagggaacaagggttgcatatagcaagagcagaaggagaatggccaatgaagtatccacaccagagatgtgagcaggatgtgcaaagacccctgactcagatagagaagagagagaggatgtagggatcttttggagagatcgtgcaggacctggttactaacaggcacttgcatgtggcagggaaggcagctcttctatgtggtaagaatttactttcattgaacaagtgagcttggtgagctcagttgaccagggaatatcctatctagtgctggtctgatttttcttttgctcttagctctcttaatagcctaagaaaaagaaggaagttgcaaactgtgttactctggctgaaagtaatttcctctaggttttatttgcacaaacatttgtgagaaaaacttatttcaaaggaacttaagagatagcttacatgggggtaaggataagaatgagtgtgtggcaagcaggggatgttgggtatcattaatcctatgaggtatacacttacagactttgtgtctggggtcatcttgtccctcacgccagtgctcagacttcacttggcctctgtttaccctagaccctgttcatcatcattggcctcttgaccggctgctatttttgttgctgcctttgctgctgctgcaactgttgttgtggacattgtcggcccaaatcatcgacaccagaagaggagttctatgtgtcaccagaggaccttgaggagcagatcagaactgacatggagaaaggtagggtgaaatgagagtagaggtactgggcattgttacctctgactttataccaggtcttactaaagtaaaataaccacacagagccagcctcttctccagactaccagcttttgtgggcagtttaggagaagacaaaggacatttatcttgactgagcatagagaaaggttagatttaacattagagagaaactatgaactgcctgtgttaatgataaacatcatcatggtgtagtttgctgtctctttataagagaaatgagctatgagttcagggaagttagggtaagagtgcccagggacagagagctaaggtagaagtttctcccagaagatacacttcagtctttaggatctttattgaaatacaagggactgacagtcaaccgtggcttttcttcctttgtattattgtgtgatgatttaggaccccttcttcttctggaatgaacaaactctgcttgctcagtcacctctgctgcccatcagtgtgcacacatctctgtgctacattgcttcattctttgagtttattctacccagaaagttaaaaatgtaaaaaaaaaaaattctcagagttcaaataccagagatagtttatggtgtttgaacgatgtctttgtttaaacaagcagggatcacactgccattgtcctggtttctagaagcaattctcactgtctgtttcccgtggagtacattattatcttgggtttcagactttattaactaatcccactcctaagttcccaacaaacagctaaaagaattactggataactgtaagaagcacactgtttccaggactacgagacccagtatggtgtacttctctcgttctctcgtcgtcacacttaaacagcaaccagaaactttttaaaggcttctgtatgccttgtacttcttatcagatgtgaagctaataacatcttgtgtgaatgaagcacccagagtccagcaaaagggtgtgtttaattatgtgactagtactgaactccagactctcagaactgggagttcagagagagtagaggttttgttttgttttgttctatgcttttttttttttcttcctgaaaactgtaatgtcttgcaatgggcatggttattgagctagaagtattcctagacatttcttgttattgatattggaactaaactgtcgactaatggtgaaattattgtacattgaaagtagtgtactctgcactgttttgtatagaaagtaaccaaatattgaatcttttaatacagaatgaacaggcaaataagatcactaacaaatcaattaagcagtgctgattatatggaaaggccttctcaattggcaaacgtgttcacgagtgacaattcctgggcacaggtctcatataatctgtgaaagaggtgcttaagaataatgaagaaaatgctgcatgccattctgtgactaccattcatttttctctgtgtgtaccttaacaggaaagccggaaaagtggctttaataaaactgaaacgacagttcatataaggggagaggtggagtggcatgggaagtctgtgaggtgtggtgtcatgtttttactctctgtaggtgcagtgtggagcccagcatggccttggttggggtgaaaggacctggctcccacacctgggacagggccaacaaggcatgggtcctccatgagtgtgaatggatggctgctgtgggcacagggctcatttgtataatattgtacatattttaatgttcccccttcaaggaatgtcctccctgatagtgtgaatgactccatagtaatcagagatagcaagagtctgggaggtgaaggtgtggctaatgtctttgcaaaatgataaccagtggcaccttcaggacagcccttaatcctgtggaaaagaactctaaaaacatgagtttgaaaatatctcatttctcaactatgcaaaaaaagaatgcaatatgaatatatgaggtgcttcacaaatctaaaagaacaaaggtagctgcaataatgacccagcttctcagaaagataaaaaagcaggcaaatacagagatgtggtggaaatggtaatttcgtggcagagtcccacccagcaagttagtttatcacctctgcttaacaaaggcaggcagatctctgcattctttctcaaggttaaaaaagaaatgtgtgcttgctgttacctaagaatcaaggggggctgggctcaagagatggtgattcgtagggtaatcaaaagaaaacctggagtaaatgactcgattgatatacaaaataaaagactgaacttatgatctgcaagagatgagctgtccggagaaatttgttagaatagcaagaaagaacttcttggagaactatttcaagcagagaagagagagcgagctgtatggagatctccagagaaagcagaacgaagagaaaacaacccgagaagctgtctcaaagagttcccataggccaccagcttggacccacaatttgactttaagtcctttgtttttgccactctcagacaccccttgtctcagaacccctctccaatctgaggctggtcattggcagtgcagcattgccatatcctgtcagcaggactactatatgtggaccaaatgatcaatacccaatactcagccatggacagagcacagagagggtcaaacagtggctatggtgacattgtctttacttttcatctttattttttattttaggttaaatcatctttataatttaaaagtcagaatacaaagtcaagggtctcattgtggtatctcgacttgcaagcctttgcacttctaattcttccttagcttctcatttgtagtaggaaagctaaatctgagtgaattgaacccagatctcccaagtccagcatccatacttacctgaaaaagctgaataaaagctcctgcaggtcatttcagtagaccttggtgtgaagatctctttttctggaacagaaacttagactaggtgccagattctccccagagctccttcctgctgggtgattggtgatgggtctgtgtgcctctggctgttctgacatccagaactaccaactccattgcagaggtcaggtcggtaatcttataccactgttaaaaaatccttaagacaaaggaaaggcttattttttttaaataaacatttgaaagattttatgctaaggtgacccaagttttatggttcttgaaatttatgcaatttggccagagctcgttatgagaataacacacagttctgaatatcagtatttgttttaaattaaagtaatcataatgaattaatgagcttaaaagtggacaaataaccatgagtatgtcacaaaattgaggggaggtggcaaatcagtcatttaaccacctagtttgtctgtggtatattctttgattgcatatccatataacataaatttactatatcattttctgttgaaagtataaaaacaactcttccttttctctactgtattcaaacaaaacttacttgtttattataattattgttattattattactattattaaattataatagtttcatctagctttaaagctcatgtttactatgtatatgtatatataagatttggaagaattttccaaagacaactattttactctgtacatttcagaccatattgatgtcacaacacctgatcctcctggtctcagagcccagaggacacattcagatgatgtgtcacagtctctggcatgggttttaatgtcctcccagcacatgggttggcatagtgagctgtaggagtagcaataactagctatacactgcttgctgcaaactacaaaataagtcccattgaatggaaacaaaacctattttcagttgtgtttctccttatccaaatctcttaatatatttttgaatccattgtcaaaaagagacgtcatgaaaaggtcaatgtagaaagagactgtgctttgtctggttttcatagaatgacttttgtctcaggtctatgcaaatggactcttaaaaggttctgtcttggtaggggtctctatggcctaagtctcattaactgtgcactggaaccaccattgctcacgtaacatctgattgtgagaatctatgcttcatttgtggccagttgcaatagtcaggttcatatttacgttccagtaattcagagacatatgtaacgtactgataattttaatgcaaattaagagcggtaaggaggaaagagcagactttgggggttgttctttttggtctgtggtctgaatgaaggtgctactgaacacatttctctaggaaggagaaagaagaaagagctaattgaggtataatagaacagtgtggagattaatgtgggaactggcagtttatagtaaccattcatctaagtgctatatatgtgattatcctgtgcttggaaatttgacccacagatgaagattatagctggaaatttaatcttttgttcataaatactgattttaatgaaaggcagcatttcttcctcccattatttctttatttagaagtgctaaaatgtgaaatataataaatctaatatgaagatattttccttccagaaaaaaaaaaaaagctaacaactgctgaacttttccctctcataccttactatatcaagcaaagatagaacagaagttaatagtttggacttcatgatatttccccattccccatgataggcttagtcttgtacaggtcttgtaaatacagctgtagcctctgtgaactcatatgggcctgtcatatcagaaaatattgtttctctacaaagtccactacttctgactgttagagtctttctgaccccttcagtgatccttgagcctggctccagaacagtggctctcaagcttcctagtgttgcaaccctttacagttcttcatgtgttgactcccaacaatacacttttttatgttgctactttgtaatgtaattttgctactgtcataaagcataatgtaaatacctgtgttttttgattgtcttaggcaacccctgtgaaggggttgttcagtccgaagggggttgagacccataggttgagaaccagtgctctagtagctgggcttctatccgtgtccatatgggaatctttgctgcactccatgagtttcgaggaaggaaggcacacacgaagcccggagggaaaagtagcttggggagagattggaggagagggaatgctggatttgattaaaacacattatatgcatgtatgaaatgttcaaacagttaaaaaatgcagaaaaggaaaagaataggacttagctcacagaagcaaggggagggaggatgagatagggagtttcgggaggggaaactggaaagggtgataacatttgaaatgtaaataaataaaatatccaagaaaaaaaaaagaaaaagaaaagtgcactttccattgaattaagtaatcgaccacttcaaatttcaatttaaaaaacaaattataaaatgttatatttcttaatttataaaaatccatatttgaaatcgcaaatcctttttacgaatagacttatcttttaaaaaaccagtttgcgggccattctttcccccttctgttcctagtcccccagaagttacagcctgattcccggaggccggagcccttagcctgggtggggtggcgcgggccagaaggacgccatcccggcctaggccatggaggctcccgcactgtccctcacagaggaggacttgactgaagtgaagaaggacgctttaaagaatttacgtgtttacctgtgtcagaaaatcatagctgagagacattttgatcatctacttgcaaaacaaacaaacaaaaaaaaccaaaaaacaaacaaacaaacaaacaaaaaaaccaacaacaactaagtagagaagacacggaagaaatttcttgccgagcttcaagtggaaaacgggctgggaagttgttagactacttacaggagaaccccaggggcccggacacccttgtggaatccatccgcagggagaaaacacagagcttcctgattcagaagataacgcatgaggtgctaaagcttcggaatataaaactggattacctcaaaggcctgaaatgcagcagctatgacccctttgcagctggagccaccaacagcctctctaggtgcaattcagatgagcgcaatctctctaagaaacagagagcatccactattgtgtaccacccggagggagagtcccgcactgctcccttcttctctatggcgtcgtccctgaacttaccagtcctggaagttggcaggactgaaaacagcagcttctcttcagccactcttcctcaacccggggaccctggggctccccctttgccctcagaccttccgttggaagaggggggaagttgtggaaactcaagtgagatgtttctccccttacggtcatgggctctttcacgccaatgatacatcaccgcctagctgttttactagtgatgcaaaatgctgtgaaggaggccatctttctatacaaaccatggtgacaggtcactcacattctatacgtgcctttgaaatcagtgtacacattctctgtaaataggatttgttaggggaaagaagcactctagggtgtaaatcatggtggtcgtgacttttccataacgtcctttcttttttattatttttaggtgtttgcgtattttgaactttttataagactgattttatcagcatatttctcaatttgagaaaacaacttgtggattgggaataatgtttttttttagcacatttatgctacaaattttcagtctgattgtttttcccactgatctggcagtacattttagcagtaagctgttctgtttcaggaaagctggacactgggaaagctgccgacacgctcaggagagtgtcccactccttagttctgagaagccgtcgggttctgaggagacacctgatgccactgagccttgtgaactcagtgggccaaagtttgttttatactcaccccgccagtgtgagtgtcttactttcacaggccttgtgtcctcagtcctatcctaaaggatgttatcctggcagggcatcacttgtaattaatggatgatatttgtaatcgtctaaagtcctcgttctgagctgttcgttctggatctaagagtgctgccacgtggaacatgggtgagcccctagaggaactgacaggatgtgtgcagtgggcagtgtggctttagtgtttgcatcagacagtcaccagctccatccttgtttttactgcattacaaagtttgactaactttacacatttaaaaaatgctgattgtcttcgtttaaattataattttacctatttcctgacatctaactcctatatatttaaaaattaagaaatgaaaatttgctattaacaataacgtttttaattaaaacaaacaaacaaacaaaccagtttgctggctttgactagtgtagaggctggttctgatgttttgatggggaagctgtgtttactgacattgaaagtccttgcctccaattggattttggtctatcaataaagatgccaatagcaaatggctgagcatggggtgggaaactgagagttgctcagatagggcacagagagagaatcagaagactggagaatggaagaaggggaccacagaagcagaggaaaacaccaactagcaatgtgagtttccaggtaaatgtcctctggccactttcctgactggacctggggtagcaagggaaggcttaggagtgcccagtcaatgagtagcgagggcatttcaagattaacttgtgtgtgtgtgtgtgtgtgtgtgtgtgtgtgtgtgtgtgtgtgtgtgtatttcatttaaggataatctaagatagctcctgggcagtgtgcaggtgtgcaagcatgtgacttgtcaggaactcaaagcagtgaaactccacactatatatggtgtaccagcacatggaaagtgagaatctactaataatttaagaaattcttggattacacacatacaatgttatagtttagtatgggggatgaattgatttcttagaggagcagagctgagtcacatgctgcatccagatggtagatgcagcaagtattaagctccacagaagagagaagttggggaaaatgaattaacaagtgatttcaagacacgtgaaaagccttgccgggacaatttttcaggacctttgaacctggttgacacagctataataaaaattagagcctataaataggtttatatagcaagtagaagggaattgaattaaagttaaatagagatatataaatattgaggattttgatcttaaaaaaaaaaagattaggttgaaagcaggaggaggtagggagcctagcctatctcagacagtagaaacttaggccttgagaattatatgtagagaaaggcacatactacaatatgaacccacagagatagtaatatccagagtagggtcaacttaagtttacacagatgtataaataatgaaggccttgctctcatgaaggttggccaggggacagtagaagcactgtcacaacagatactatttgtttacattgctttaattgctttgaattgttttttttaaagatttatttatttattatatgtaagtacactgtagctgtcgtcagacattccagaagatggagtcagatctcattacagatggttgtgagccaccatgtggttgctgggatttgaactctggacctttggaagagcagtcaggtgctcttacccactgagccatctcaccagccctgaattgtttttattatcaaaatgagtgtggttatgagtttggtggttatgttaaagttcctctgagagctaggtcaagctataccctcaatggtttccagttactggaccaagaacatgctattttgggagaaagtatctgttttgtgttgacaggataggagaaaaggctctggatccctttcagagtaatatggatcagatatgacagaggaaggccacctgaagatctcaaaaatttttgagaaaatcaagcaagacaggtaaattgatctactgattcctggatatagaaacagcccagaaactggcttagacataaaaatgtctctagccaaaacttcagctaaaatgagtcaataaatcttattggttatggaatctttaagattctttgtgccctccttcataaggcataaatgaagaattattacaaatggttaccgagaaattaattaataacaaaacagtttttttcacctgctcaaacaaacaaaaaaatccatccttatctgatctgtgcatcctgcacaatccatacaaaaatcttaaaggttctaaaattttggttgtgagaatcatatattacaaaatgtacaactttgacaagatttatcctcaaagatactgaactgacctgctgttcagcctcctgctcttgatgctatccagacacttgtttccagaacagctttagaattgctcctgattccagatcatttggcctcatccaacttttcagatggatccagtcagaacttcagtcaagccctgagccttctaagcatacagagactggataacagatgctaaagctagctttcttaagtctaaccaagtttctaatattcctattcctctctgcccctttaaagaattctcattgctcctaatcagcacaaagaagcttgattccttggatttttggtgtctggatattattattttacaaattagataggttgttattctaagggataatttatgaatggtcataattttgaacatggaggaaatagatggaatggactgctaaatatttgtgaataaaacattgtatagccataatattacattggtagaaattgaagttacaatctcttaaattggtacagaatttatatagtgataaagatttaagattttcattggtatgaatctgtatattgatataaaatttgaaattaatattgttacacttagataggcattgtgcctatgcacctcatttaagaacaagatgtttgtgatggtttgtatatggttgggccagggagtggcacaattaggaggtatggccttgttcgagtacatgtgtcatagtaggcatgggctagaataccctagtcctatcttcctagaagtcagtattctcctaacagccttctgatgaagatgcaaacttcagatgtaactctcagatcctcctatactatgcctgcctggaagctgccatgctcccaccttgatgataatggactgaacctctgatcctgtaagccagccccaattacatgttgtcctcataagagttgctttggtcatggtgtctgttcacagcaataaaaccctaagacagaagttggtaccaggagtggggtgatcatgcttttgtttggaaaagtgtgtattttgggactttggatttgtaaagcagtggaatgctttaaatgggtcttaatgggttatcccagtaggaatatggaggactttcttactgagactgatttaaatcatgcagatatgtcccaagagatttcagtggaaaacatcaatatctgacctagagactgcttttgtggtattttggtaaagattgtcgcgattttttgcccttctctgaagattccacctgaggctaaggtaaagagactcagatgaattttgtattgacaaaagaagtctcagaaaaacccatcatagactttattctctggttaagtgtcaagaagaacattttaaacaagcatagcaagctgagaaaaaaattaaaatatatggttcaagtattgaaggggcaccaggaagtgaaatggagctggatcctgtatttaaggatattaaattgaattttaaaaaaaagtgaccttggggcaagttcccacccagctaagtttaggtctaggtatggtagtaaaaagaggcaaagaaagcatatctcttagttcaaggccagcctagaacagagcaagttctaggtgaagaaaaacttaaatctaggcttggtggaccgcaaccttagtcccagtgcttaggagacaagcatgtggatctctgagttcaaaatcagtctacagagcaagttccaggacagccaagtttaggcagtgaatgagttggaacacagaaagctggtgataattcaatagaacaaggggaccatgttccagacccaacaagcagcagaacttggcagcttcagccacatgattcttgctttagagtccagaatagaagggattactgggacaattgatgctggttagctggagctaggaaattagtggtgattaagaagagcccagcatcactgaggtgaaatcttctgggaagtgttttctgtgagcacaaagaagctgtgttccagaaacagccaaggttgtaccttgtgctgcagctgtacttggtaatatgtaagagtcacacaagtggtactggttttgaaggcatgaaggggccatgaagagcagctgaagcttgtcactgtgagagggcatggaaggccattggtgaaggtacagcctcagttgcagttgatggcccaggactgaaggggtcatgcaaaggatttgaagcttggcaccatgaaaagagcttatgagaggctattggtgaagcctagttgcagaggaagacctcagtgtactggagatgccagtaccatgggatgaccaccaagaacagcagtagcagtggagtggatcaacctgagcttaaaataatacagagggcagagctggtggagcctagaagatcatgtgtggatcccagacattgaagatatcagagctgtgggatctctgctgaagaaatcttctaacagggagtagagcaagcctaggagaaagaagtttgttgcagccaacaaagatgaaaaaggagttggagatctgaagaccactttgacatcagaattggagatggagaggctggaatttgcccagttggtttcatggcttgctttggggattacacttaagtgatcagatgaatctcagaagagactttgagctttggacatttaacacttttgagactgctatagactatgggaacttttgaagttggactaaattattttgcattactgtatgtttaggtatgccccacccccagtagactcatatgttcgaacaagcctataggggctagggagtggaatatgatgatttgtatatgtttgggccagagagtggcagtattaggaggtgtgtccttgttgtagtaggtgtgtcacagtggatgtgggctataatacttgtcttattggcctggaagtcagtattctagcagccttctgatgaagatgtaaaactctcagatcctcctaaaccatacctgtgaggatgctgctatgcttccaccttgatgataatagactgaattttaagcaagcctcaaataaatgtccttataagttctgccttggtcatgatgtctgttcacagcaattaatctgtcactaagacaatgattaaacacgcaagttaagggccaggtggtaaactcatggttaagttagattctcatttaattaaagtactttcaatttatactcaaataagagtagctaaggtttaacagttgaatatactttacatagatattcttcaaaaacatcagaaatccacacaatatgacatttaatgttatttcatcttttttattggatattttctttatttacattttaaacgttttcccctttccaggtctctcctttggaaatcccctatcccatcccctctccccctgcctctatgagggtgcttgcccacccacccacccactccagtcttcctgccctggcattcccctacactggggcatcaagtaccctcaggcctaaggtctcttttcccactgatgtcaaacaaagtcatcctctgccacatatgtggccggagccatgggtctctccatttgtacgctttcatcggtggtccagtcccgaggtgctctgtggggtctgatcagttgacattggtgctccctccatgggctgcaaacccccttcagtccattctccaaatccttcatcagagaccctgagatcagtccaatgattggctgcaagcatctgcctctgtatttgtcaggctctatcagagcctctcaggaaagagtcatatcaagccctgtcagcaagcccttcccgggatccaaaatagagtccaggtttggtgactgtatatgggatggactccaaggtgaggaagcctttccttcagtctctgctccacactttgtctccatatttcctcctgtgagtatttttttcctgcttctaagaagaactgaagaatccacactttggtcttgcattcttcttgggcttcatatggcctgtgattgaatcttgggtattcccaattttgcggctaatatctacttattactgagtgcacaccaagtgtgttattttgtgactgagttacctcactcaggatattttcaagttccatccactttcctgcgaatttcatgaagtcattgtttttttagctgagtagtaatccattgtgtaaatgtaccacattttctgtgtccattcctctgttgagggaaatctgggttgtttccagcttctggctattataaatacgcctgctaggaacatagtggagtatgtatcctgattacatcttggagcatcttcttggtacatgcccagaaatggtataccagggccctcaggtagtactatgtccaattttctgaggaaccaccagactgatttccaaagtggttgtaccagcttgcaattccactagcaatggaagactgtttctctttcttcacatcctcaccagcatctgctgtcacctgagtttttaatcttagccattctgactgatatgagatgaaatctcagggtggttttgatttgcattttcctgatgactaaggatgttgaacatttctttaggtgcttcttggccattccatattcctcagttgaaaattctttgtttagctctgaagcccatttgtaataaggttatttcattgtttggaatctaaattcttgagttctttgtatatattggatattagccctctatcagatgtaggattggtaaagatcttttcccaatctgttggttgccattttgttctattgatagtgccctatgccttacagaagctttgccatttgatgaggtcccatttgttgattcttggtcttagagcataagccattgctgttcttttcaggaactcttcccctgtgcccatgtatttgaggattttccccacttcctcttctattagattcagtgtatctggttttatgtggagatccttgatccacttggactcgagctttgtacagggagataagaatggatcaatttgcatttttctcatgctgaccaacactatttgttgaaaatgctgtctttttttctactggatagttttagctcctttatcaaagatcaagtgaccataggtgtgttggttcatttctaggtcttcaattctattccactgatcttctggcctgtcactataccaataccatggaaagttttatcacaattgctctgtagtacagcttgaggtcaaagatgctgattccaccagaagttcttttattgttgagaatagttttccctatcctgggttttttgttattccaaatgaatttgagaattgctctaactctatgaagaattgagttgaaattttgatgagaattgcattgaatctgtagattgattttggctagatggccatttttactatattaatccggccaatccattagcatggaagatctttccatcttctgggatctgctttgatttctttcttcagagatttgatgttcttgtcatacagatcttttacttggttggttagagtcacaccaaggtattttatattgtttgtgactattgtgaagggtgtcatttaactaatttcttcctcagcccatttatcctttgagaataggaaagctactggtttgttttatttaattttatatccagccactttgctgaagttgtttatcatctgtaggaattctttagtggaatttttgtgatcacgtaagtatagtatcatatcatctgcaaatacttatattttgacttcttcctttccaatttgtatcccttcaatctccttttgttgtctaattgctctggctagaacttcaagtactatatttaatagataggaagagaatgggcaaccttgtctagtccctgattttaatgggattgcttcaagtttctctccatttagtttgctgtatattgcttttactatgtttacatataggccttgaatgttgaattttgtcaaatgctttttcagcatctaatgaaatgatcatgtgtttttttttccctttcagtttgtttatgtagtagattacattgatttattttcatatattgaaccatccctgcatccctcggatgaagcctacttaatggtggtgaaagatcattttgacatgttcttagattctgtttgcttaacttttattgagtatttttgcattgatactcaatattgaaactggtctgaagttgtctttctttttgggtctttgtattgttttgatatcagcctagctgtggcttcatagaatgaattgattagtgttctttcttttctaatttgtggaatagtttgaagagtatgatattaggtcttctttgaaggtctgataggattctctactaaaccaatctggtcctggactttttttttttttttttttttttttaatgactgcttctattttttttaggggttatgggactgtttcatggtttatctgattccactttaacttggtttttttttcagttttttttaattaggtattttcctcatttacattttcaatgctatcccaaaggtcccccatacccacccccccaatcccctacccacccactccccctttttggccctggcgttcccctgtactgaggcatataaagtttgcaagtccaatgggcctctctttgcagtgatggccgactaggccatcttttcatacatatgcagctaaagacaagagctcccaggtactggttagttcatattgttgttccacctatagggttgcagttccctttagctccttgggtaatttctctagctcctccattgggggccgtgtgactcatccaatagctgactgtgatcatccacttctgtgtttgctaggccccagcattgtctcataagagacagctatatctgggtcctttcagcaaaatcttgctagtgtatgcaatggtgtcagcatttggaagctgattatgggatggatccctgcatatggcaatcactagatggtccatcctttcgtcacagctccaaattttgtctctgtaactccttctatgggtgttttgttcccatttctaagaaacagtaaagtgtccacactttggtcttcgttcttcttgaatttcatgcgtttgtcaagttgtatcttatatcttgggtatcctaagtttctgggctattatccacttatcagtgagtacatattgtgcgagttcctttgtgattggattacttcactcaggatgataccctccaggtccatccatttgcctaggaatttcataaattcatttttttaatagctgagtagtattccattgtgtaaatgtaccacattttctgtatccattcctctgttgaggggcatctgggttctttccagcttctggctattataaacaaggctgctatgaacatagtggagcatgggttcttcttaccggttgggacatcttctggatatatgcccaggagaggtattgcgggatcctccggtagtactatgtccaattttctgaggaaccgccagactgatttccagagtggttgtacaagcttgcaatcccaccaacaatggaggagtattcccctttctccacatcctcgccaacatctgctgtcacctgagtttttgatcttagccattctgactggagtgaagtggaatctcagtgttgctttgatttgcatttccctgatgattaaggatgttgaacattttttcaggtgtttctctgccattcggtattcctcaggtgagaattctttgttcagctctgagccccattttttaatggggttatttgattttctggagtccaccatcttgagttctttatatatattggatattagtcccctatccaatttgggatatgtaaagatcctttcccaatctgttggtggcctttttgtcttattgatggtgtcttttgctttgcagaagctttgcaattttatgaggtcccatttatcaattcttgatcttacagcacaagccattgctgttctattcaggaatttttcccctgtacccatatcttcgaggcttttccctactttctcctctataagtttcagtgtctctggttttatgtggagttccttaagccacttagatttgaccttagaacaaggagatagaaatgtatcaattcacattcttctacatgataaccgccagttgtgccagcaccatttgttgaaaatgctgtcttttttccactggatggttttagctcccttgtcaaagatcaagtgaccataggtgtgtgggttcatctctgtgtcttcaattctgttccattggtctacttgtctgtcactataccagtaccatgcagttttgatcacaattgctctgtagtacagttttaggtccagcatggtgattccaccagaggttcttttatccttgagaagagtttttgctatcctcggttttttgttattccagatgaatctgccgattgccctttctaattcgttgaagaattgtgttggaattttgatggggattgcattgaatctgtagattgcttttggcaagatagccatttttacaatgttgatcctgccaatccatgagcatgggagatctttccatcttctgagatcttctttaatttctttctttagagacttgaagttcttatcatacagatctttcacttccttatttagtgtcatgccaagatattttatattatttgtgactattgagaagggtgttgtttccctaatttctttctcagcctgtttatcctttgtatacagaaaggccattgacttgtgtgagttaattttatatccagctacttcattgaagctgttgatcaggcttaggagttactctggtggaatttttagggtcacttatatatactatcatatcatctgcaaaaagtgnnnnnnnnnnnnnnnnnnnntgttggctattggtttgctgtagattgcttttatcatgtttaggtatgggccttgaattcctgatctttccaagacttttatcatgaatgggtgttggattttgtcaaatgctttctcagcatctaacgagatgatcatgtggtttttatctttgagtttgtttatataatggattacattgatggatttccgtatattgaaccatccctgcatccctgggatgaaacctacttggtcaggatggatgattgttttgatgtgttcttggattcggttagcaagaactttattgaggatttttgcatcgatattcataagggaaattggtctgaagttctctatctttgttgggtctttttgtggtttaggtatcagagtaattgtggcttcatagaatgagttgggtagagtaccttccgtttctattttgtggaatagtttgtgaagaactggaattaggtcttctttgaaggtctgatagaactctgcactaaacccatctggtcctgggctttttttggctgggagactattaataactgcttctatttctttaggggatatgggactgtttagatggtcaacttgatcctgattcaactttggtacctggtatctgtccagaaatttgtccatttcgtccaggatttccaattttgttgagtatagccttttgtagaaggatctgatggtgttttggatttcttcaggatctgttgttatgtctcccttttcatttctgattttgttaattaggatttttgtccctgtgccctctagtgagtctagctaagggtttatctatcttgttgattttctcaaagaaccaactcctcgtttggttaattctttgaatagttcttcttgtttccacttggttgatttcacccctgagtttgattatttcctgccttctcctcttgggtgaatttgcttccttttcttctagaccttttaggtgtgttgtcaagctgctaatgtgtgctctctctaatttctttttggaggcactcagagctatgagttttcctcttaggaatgctttcattgtgtcccataagtttgggtatgttgtggcttcattttcattaaactccgaaaagtccttaatttctttctttattccttccttgaccaaggtatcattgagaagagtgttgttcagtttccacgtgaatgttggctttctattatttattttgttattgaagatcagccttagtccatggtgatctgataggatgcatgggacaatttcaatatttttgtatatgttgaggcttgttttgtgaccaattatgtggtcaattttagagaaggtaccatggggtgctgagaagaaggtatatccttttgttttaggataaaatgttctgtagatatctgttaagtccatttgtttcatcacttctgttagtttcagtgtgtccctgtttagtttctgtttccatgatatgtccattggtgaaagtggtgtgttgaagtctcccactattattttgtgaggtgcaatgtgtgctttgagctttactaaagtgtctttaatgaatgtggctgcccttgcatttggaccgtagatattcagaattgagagttcctcttggaggattttacctttgatgagtatgaagtgtccctctttgtcttttttgataactttgggttggaagtcgattttatccgatattagaatggctactccagcctgtttcttcagaccatttgcttggaaaattgttttccagcctttcactctgaggtagtgtctgtatttttccctgagatggttttcctgtaagcagcagaatgttgggtcctgtttgtgtagccagtcttttagtctatgtctttttattggggaattgagtccattgatattaagagacattaaggaaaagtaattgttgcttcctattatttttgttgttagagttggcattctgttcttttggctgtcttctttttggtttgttgagggattactttcttgtttgttctagggcatgatttctgtccttgtattgcttcttttctgttattatcctttgaagggctggattcgtggagagataatgtgtgaatttggttttgtcgtggaatactttggtttctccatcaatggtaattgagagtttggctgggtatagtagcctgggctgaaatttgtgttctcttagtgtctgtatgacatctgtccaggctcttctggctttcatagtctctggtgaaaaatctggtgtaattctgataggcttgcctttatatgttacttgacctttttcccttactgcttttagtattctatctttatttagtgcatttgttgttctgattattatgtgtcaggaggaatttcttttctggtccagtctatttggagttctgtaggcttcttgtatgttcataggcatctctttctttagatttgggaagttttcttcaataattttgttgaagatgtttgctggtcctttgagttgaaaatcttcattctcatccactcctattatccgtaggtttggtcttctcattgtgtcctggatttcctggatgttttgagttaggatctttttgcattttgcattttctttgattgttgtgctgctgttctctatggaatcttctgcacctgagattctctcttccatctcttgtattctgttgctgatgctggcatctatggttccagatttctttcctagggtttctatctccagcgttgcctcactttgtgttttctttattgtgtctacttccctttttaggtctagtatggttctgttcatttccatcacctgtttgtatgtgttttcctgtttttctttaaggacttgtaactctttagcagtgttctcctgtatttctttaagtgagttattaaattccttctttatgtcctctaccatcatcatgagatatgcttttaaatccaggtctaccttttcaggtgtgttagggtgccctagactgggcgaagtgggtgttctgggttctgatgatggtgagtggtcttggtttctgttagtaggattcttacgtttacctttcgccatctggcaatctctggagttagttgttatagctgtttttgtttagagattgttcctctgttgattttgttaccctctatcagcagacgtgggagactagctctctcctctgagtttcagtggtcagagcagtctctgcaggcaagctctcctctttcagggaaggtgcacagttatctggtgtttggacctcctcctggctgaagatgaaggcccaaaacaggatctttcccagaagctgtgttgctttggccaggaaggtggccggttgtctggagccgaagatggcgccgcctcagaagctctgtggctctcgcctgtcccagaaacggctggcctctgtattccacaccgtcacccgtgcagcctgccctccgcggagtcccggagccaaggaggctcccgccggggcctgaggcacaaacctctcggcccgggcagacccctgtgctttcaccaggaaggtggccggttgtctggagccgaagatggcgttgcctcagaagctctgtggctctcgcctgtcccagaaacagctggcctctgtattccacaccctcacccgtgcagcctgccctccgcggagacccagagccaaagcccactttaacttgggtatttggtatctttctagaaaattgtccatttcatcctgattgtcaagttttgttgaagtacaatctgatgacctttttttaatttcttcactttctgttgatatatctctcttttcatttctgattttgttaatttggatactgtttgtctctgtatcctctggtcagtctggctaagggtgcatctatattgttgattttctcgaagaactaactcctggttttgttgattctttgtatagttctttttgtttctacttggttatttcagccctgagtttgattatttcctgcctgtctactccttttgggtgtatttgcttctttttttgttctagacttttcaggtgtgctgtcaagctgctagtgtatgctctccccagtttctttttggaggcattcagaactatgagttttcctcttagcactgctttcattacatcccttaagttagggtatcttgtgctttcattttcattaaacttaaaaaaatttaaatttctttttttatttcttccttgaccaagttatcattgagtagggcattgttcagcttccatgtgtatgtgagctttctgttgtttttgttgttattgaagaccagccttagtctgtgatggactgataggatgcatgaggttatttcaatcttcttttatctgttgagggctcttttgtcaattatatggacaattttggagaaggtaccatgaagtgctggtaagaaggtatattcgttttatttaggatgacatgttctatagatatattagttttgctgtgtctctgttcagtttgtgtttctgtgatttgtccattgatgacagtggggtgttaaagtctcccactattattgtgtgaggtgcaatgtgtgttttgagctttactaaatttttttttaatgaatgtgggcatgcttacatttggattttcagaattaagagcccttcttggtagattttttctttgatgagtataaagtgtccttccttatctttttttgataacttttggttgaaagttgattttatttgctactagaatggctactccagcttgtttcttgggaccgtttacttggaaaatcattttccagcaattttctctgaggtaatgtctgtctttgtcactgaggtgagttttctgtatgcagcaaaatgctgggttctgtttatatatctagtctgtaagtctgtgcatttttataggggagttgggtccattgatattaagagatattaaggaatagagattcctgcttcctgttatttttggatgttatttttatgtttatgtagctttcttcttttgggtttgtgaaagattacttttttgctttttctagggtgtagtttccctccttttgttggagttttccatctataatcctttgtagggctggattagtggaaagatactgtgtaaatttggttttgtcatggaatattttgttttctccatctatggtaatttagagtttggttgggtatagtagcctgggctggcatttgtgttctcttagtgtctgtatgacatctgcccaggatcttctcactttcatagtctctggtgagaagtctggtgtgattctgataggtctgctcttatatgttacttgacttttttctcttacgcttttaatattctttctctgttttgtgcaatttgtgttttgactattatgtgatgggaagaatttcttttctagtacaacctattttgagttctgtaggcttcttgtatgtttatggcatctctttctttgggttagggaagttttcttctataatttgtatgaagatatttactggccttttaagctgggaatcttccctctcttctatacttactatccttaagtttggttgtctcattttgtccaggatttcctggatgtttttttgttaggagctgtttgcattttgcattttctttgactattgtgtcactgtgttttatggtatcttctgcatctgagattctctcttgtatctcttgtattctgtttatgatgtttgcatctatgactcctgatctctttcctaggttttctatctccagggttgtctccctttttgatttctttcttgtttctatatccttttatagatcctcaatcattttgttcaattcctttacttgtttgattgtgttttcctgtaactccttaagggatttttgtgtttcctttttaaggacttctagctgtatagctatgctctcctgtatttctttcagtgagttatgtcctccttaaagtcctctatcatcattgtgagatgtgattttaaatcagagtcttgcttttcaggtgtgttggagtatttagggctagctgtggtgggagaacagggttctgatcatgtcaagtagccttggtttctatcacttatgttcttccccttgcttctcaccatctagttatctctggtgttagctgtctctgactgtggcttgtccctcctgcaagcccatgggtcagtactcctgggagaccagttctctctgggaggaatttctgtatgtagagctgtggcctagtgtcagctctggggtgtagacagaaacctgaaggatcttgtgtcctgatgactctgagtagttccctcttcagccagaaatttgagcagaagtggtggtctttcctgtactcacaggtgtgtcagcactcgggaagaccagctctctcccagtggtatttggatatggagcgctgtggcacaggatcggctcctggtgcaggcagaaaccagaaggcatgttatttcactgttaagaatcatttgataatgaggcatgtatgttcctgacagctttcccattctcctttaaaaaagaattgagtatcttcacctccaggtgaggttatttattatggcaaggtagccacagggcagtcttggcctattttatttgtagaactaatactgtctggggaaatgacacactatgtgggatagtcaattgctaagctctactaagtcagtgtaagctagtccttcatatagtctgctttgcaaaggtctgttagatgatgacgggccagaaggctgaagactggtgctctgatgttattaggaatttgggaactattcaagcaggctgctgtctctacaatttgtttaagttttagaagttaagtgtggtgcttcctattactcaggtgatatttaactcattctcagatttctgacagagttgaaaattaactatagtcccataggcaaacaattgtttagccttaaagatacgatatagaagtaaaaacatggttttcagatggtgttacaggctaaaatctaaacataatgcagggatagaattataactctttaagttaggaatgatgatagagtactttatttaattacaggctaaaatgtaaacataatgcagggatagaattataactctttaagttaggaatgatgatagagtactttatttaattgataaatatggtgtaatagatgctaattgtataacatgctttttaatttacatgatagttatagttctgttaaatttataacttagagaagaggtttttgtttttgttttttctttttaaaattgaacagaaaagttgagatgtagaggctggttctgatgttttgatctggaatgtgtgtttactggcactgaaggtcattgcccccagttgaattttgatctatccatcaaaatgccaatagcaaagggctgagcatgggatgggacactgagagtttctcaggtaggatgcagagagagtatcagaaggctgggaaagaaaggaagggaataaagtagtagagagaaaaaaacaaccagaaatgtgagtttcagggtaagtggcttctgaccacttccctgactgggcctgggatagcacaggaaggattaggagtgcccagttaatgagtagctaaggcatttcaagattaacttgtgtgtgtgtgtgtgtgtgtgtgtgtgtgtgtgtgtgtgtgtgttttctaatcacagatctgagaaagctcaagggacggtgcacctgtgatactggataggaactcaaatagtagacaaaactgcatgctacaaacgagcagaatcacaagtctgatttccttgagaggctctgtccttgcccattttttatgtgcatgcatttcagctcctcctgctgtttgcatcaataagagtctctggagttgtaaacatatgatacaagtctctgtgtagtggtactgggtaggatttgctagtataagagagaaagttgtttgggttattctatttctttaaacaatgttgaaatgtcaactaccatggttaaaaaatgaagtgcagacacttcaaactcttgccagctagagaagtcacaaatgggttctcctgtctgtcttaaagtaccctccccgtttgaaactgggaggatctctgtgatgctctggaaatcagccaatgttaaagagcttatccttgagacggtttggcacttccttgaattttagcctttgagacaataaaactgtaccagtgaaacactatgaagcatcatttcctcttccctcccatattcccattacaaactccactgtgtaaaattttgaacaaaagcctaaactgcagccagtcatttctgaacactctgggaaagcagatcaaaatacaagtgctaaattcagttttttctcttctatgctgaagccaatagaataaatccaaacaaaactgttgaggtaaacactaacaagctcttatggattaacggcttcctttttatggaaagaggtggaacagagtatgaaaaagagagaggttttatagagttgaccttggagctaaagaatatgattcagagcacagagaaatgttgattgcttagctgttattgctagtcacctgaacagaactccaatagactcacaaccatatggttcttgcttccgccaagatctagaaacatgtattatatatactgctcagcattcatcacatctgccactccaggaaaagggaccaaaagagatggaaattcatcctccctctttttgcaccctcattcaatgtccttttccctacaatgagtaatcaatgtctaagaacagtggaagggaaatatcactagaaacctgtgatgcactggagagttgacttagtggttaagagcactgactggtcttatggaggtcctgagttcaaattcctggaaccacatggtggctcacaaccatctgtaatgagatcagatgccctcttctggtctgtctgaaaacagctacagtgtacttacaatcaatcaatcaatcaatcaatcaatcaataaataaatctaaaaacaaagtaaagaaaaagaatcctgtgatgcttcatacaaagacatcatagagcattaaggcaccagtccagagtagaggaatggatgagcagcccacgactgtccccaacaaggtggctcaaagtgtaccttcaatgtttagctgccaagattcagtaaagtgtgtgtgtgtgtgtgtgtgtgtgtgtgtgtgtgtgtgtgtgaactgagaatgtctttctatatctaatatttaaaatgctatgtgcataaacacatagagagctaggcaagttgcagggacagtgaacctatcagagaagaaacacggagcctgggaaagtgaacaggaggggaattgacatagtttcaggcatttttataccttccccagcaaagtcagaaacataaaatttaattcagaaacataaaagagcaagaaatggaaatgggacacatttgaagggatgaatattgatacaggaaatatttagtatagtctgtttgtcagtcctgcagataagatagtgaatggtgttccacatgtcaggcaaggcaggtggagtcatagtatggacctctacaaagcagttttatcactgagttagtgaagcagtttcattaaggcagtatttgcaaaggtcttgggaccaatatgtgtattcaaggaagggctcaacccatcaaaatgaaatatgatcagagggtggtagagtgccttgacaatctgcctgagaagcaccaagtaccaggaacagctatgagagagggaaaggagacaagagagaagctcagagacttggagggaaacacaggtatactctgaagagacaggaacttgaggacgtgatgctaagtgaaagaagctagggtagaaaaaacaagtgtaccgtgtttccagtcagataacacagttcagagcagttgaattcatgaaggagaaaacaggttgatggtcgccaggacacagggcaaagggtgagtaacaagcagccccactgactcctgttttggtccaaggaaatatttgccaactaaatagagatggtgaattgtacatttattttctgaaccccacaccctcatgagaagcacagctttttaaatttttttgctattttattatttatttgtttattttattatttattagttatcattttatttatttatttgctctgtagtacaacttgaggtcagggatggtgattcccccagaagttctttattgttcaaaattgttttggctctcctgggttttttggttttccatatgaagttgaaaatggctctttgtatgtatgtaaagaattgtgttggaattttcacggggattgcactgaatctatagattgattttggtaagatggccattttcactgttaatcctgccaacgcatgagcatggtagatctttccacctctggagatcttctttgatttctttcatcagagacttgaagttcttcttatacagatcttttacttgtttggttagagtcacaccaagatattttatattatttgtggctattgtgaagggtggtatttccctaacttcttactcagtttgtttatcttttgtgtagaggagggctactaatttgcttgagttaattttctatgcaacacctttgctgaggttgtttatcagctgtaggagttctctggcagaattttgggaatcacttatgtatactctcataccatctgcaaatagtgataccttgaatttttcctttctaatttgtatcctcttgaccttttgttgtctaattgttctgtctagaacttcaaatactaagttgaatagataaggagagagtaggcagccttgtcttgtctctgattttagtgggatttgttcaaatttctctccatttaatttgatgttggcttgttggtttgctgtatattgcttatattatgtttaggtatgtgttatgaatttctgatctccccaagacttttaacttaaagaggtgttggattttgtcaaagactttttcagcatttgaatgattttgtttgtttatatagtggtttgtttatatggtggttagggcagggctcctgtgtcccaggttagagcaggtttcctgtgtccctggtttgagcagacctcctaggagacagggaggctgtggggtccagggatagacacaccactctgccacaagtttaggtgggtatgcagattggaagggcaatcgcgtttctactttcaatcagcctcactttgcttcacatttggatcattctaacattcattctctatgccacaggtcctattttgtctagatttcattttgtggattttatttatttattttcaccattataacattctgaaatagcatctcataatttagtatcccttctactgctgatgattgagtagactccactttggttttgattataaacaagtgataagaatgatcttatacttgagtcttggtgcatgagtgctaaggggtatttgtgattatacacaggaatggaatcccataggcaaaggttattcacatctacaatgtattaagtagcaccaagcagttctgaaaacctgaagggttaatttatattcctactaagagttaatgttagtacagaagctcacattcttgctgactcttgacactgattgactgaaaatcaatctagtctagtgtggggcctatggcatagtgccatggctctaatttttgtcttcatttagtggtaaggttaaacacttatatgcaagtgtggtgcatgtacatgtgtgtataggtgcaatacatgtgtgtgtacacatgtgtggagggcaaagtctgatctagttaaatggctcctgaggaataccacctaaggttatcttctgtcctccacacacacttgtccacacaatcatgtatacccacataaacagacacctgcacacaaatgcacaacaccatcaaagatagaagcaagcaaaagaagaaagagatattaatttgcaggggaatccagttggttcttggatcttgaggattttaatagtactttcctttttaaaacatgtcttcctgcagagcatattatagacataggctaagtcttaacattctgttcttcgtacttattaatctcttctcatattttctttttgtgtctgtgttacattctgaataatttcttcaaataggtcttctacttcatgaattctctttttagcttttaaaaactctttagtttttaaaacgtaatttcagatacttcaatcactaggattttgttaatttcaaaatctgatatctttaaatacataattttttgtacacttgtatttaataaatgcaaaaatggaagcctctctgaatcttatttcatcttttgttgttactctagggctttcattcactatacattgtttctctgtctctctttctgtaagtgtgtgcgtgtctgtgtgaatgtgcatgcgcgtttactatgggctcaggtttcttgcaattttatagggactccttagtgcaaagttgaatgtgaagtcattaatttctgctaggttcctgagagtatagcttgtaccgaataactgtatggtgaatgattatcttggtatctgatagnnnnnnnnnnnnnnnnnnnntgcttattggtttgtcttcaaacatttttaaggaagcttcctcagcctaggaccagagaagaatttcatatagacttaagagggagtgtggctaccttggacactacttatgtgttaatgaccccttaggttctccaccaaagcaagccctaggctttaacgtctgctccaacaagaggcaagcatacatttatgaacgacaaaactctaggactcatcatccatagagatgatcttttttcatatttgtagttttcatggaaaatggaaccccaggaatgagcagagtgcaacctagatttatttatagtcctctaatttgcagaatggattcaggtaatatctcataagcatgcttgttatttctccaaaacactactatttgccccattatcaaaggaacatggtaaaaaaaaaagtttgatgattgttgtttctctgtgttttcctccccagatatggactttccagttgttctccagcctacaaatacaaatgagaaaacacagctaatcagagaaggatctcgaagttactgcacagactcttaatgttggcccgtggagggtccacagctcctctttttggttcagccatgtctctgggtggtcatcggggaagtgcaaacatgaaatgctgtgaacatattcacatttgtattttatttttaggttaaggggaagatgattgctacataattttctcagactttctctttgagtagaatcctaatcaaaagcattcagtttgatgaataaaggcctgaagagttgatttatgctgatttcatgaggtaacagggtggcagtggacagtcattatgagtctgatcttaagatgagccagatgttatttcttaaagactaaagttgtactattttagaagaaaagatgcttttccccccttaactaaacacaatagtcagacttgccacaaatgtcataagcaaagcacttagagcagttgagaaggaatttgtgtttgcggagctctttgttgatatttaaagtggttacagaaatatgatctaaaggagacatgacatttactgaaaaatgttgagtaagaacgggagtggcttggtttagtgcatgctgttagattggctttaaaatgacaaaaacattcaaccttagttaattcttagaactgagccaggtagataatcagcatgaacatgacctagctagccccaaacagtaccctggccattttctttgtaaaatgatctgtatccaacctggctggatgagtcagttagagaagagaaacacaggaagtaaggggtgcatctttaccgcggaaaaaaagctgcactgaaaggcacagcgcccgtttggatagaattcattacggaacagctctctgcatgctaggcctagcgagctccacaagcacctctgtatttgcatgtttgactcctttttcttaccatcgcgaaggagccacacgctgtttctaaaatggcagagcagccaggacttgttgcttttcccggagcctgtcttacttctttatgtaagatttcattttcaagttcttgttatagttttgtataacattgcataaaatgccattgtctttttcttttgcttctttttcccaccccaccaaattatagtcaattgctgctaaatatatattgtaagtgaaatccagagttacatctctgacagttttagagtcactaaaactcagctcaaactgtgcagtcactggggtttctccccctacaccgaagcgcagagggacttgatttggaagttatggaaactagttctagcctatgttgtgaaggatccttgtaatgccaggaatagggaaacagctccacaccacactggcagtgtcctaaagacttctcttcggaaacctccaagcagacagagtaggatctgtgtttaagatgatgcatctcaggctgagccaaatgtgaagctagtcagactggttgaaaatagacagcagttccagaacaagtcgagcatacctgctgggacatcttgggcttctctaagggagaagtgccgctaggtttctttacaatggttacatatcagaggggcttgtgcggctctccagttacatctctaaagcttgctcagaagccactccttctctttctaacagttcctaaagacattaatttgtaacaaaagttaacagttgaagtatattttttaaaattaatgtcttagtttctattgctgtgaagagagaccatgatcacttgcacctcctataaagaaaaccatttaactgaggctggcttacaggttcaaaggttcagtccattgtcatcatagtgagaagcatggtggtgtgcatgtagacatggtgctggagaaggagccaggagttctacatctgggtcagcagggagcaagaaaagagagagagagagagagagagagagagagagagagagacatagagcatctgaaactccaaagtccacctccagtcacatccttcctccaacaaggccacacctactccaaagagccacatctcctaatagtgccactccctatgagccttgagagccatttccatttaaaccttcacattccattccctggccccataagcttgtagctatgtcataaagcagaaatgcattcagttcaactccacaagtccccatggtctatcagtctgaaccatgtttaaaagtccaaaatatcttttgcagactcatggcaatctcttaactgtaacctctgtaaaatagaaatcaaaataataataataaaatgatcacatacttccaacacacaattgcacacaatatacattactactccaaaggggaggaaagggggcattaagaggaaatactagatcaaagcaagaccaaatatcagtggggcaaactcttaactctgcatctctatgtctagtgtcaaagtgcttttcagatctccaactcctttcagctttgatgattgaaccacacttcttaatctttggctggttccactccctgttaacaactctccttggcagggatcccatggctctcgaatttccaacatcttggtgtcttcaaggcaatcctagcttcaccttcacaacttcatgcaatggcctctgtaggcctccatgcagggtcaccctgacacatgcctggcctcagtggctttccttggacacagagggagattcaataaccactttcttctgtccttgattttaaagccagaaccaagtggctgaagctgcccaattctgttgctggctgggtttgaaacatgacctactaatcagttacatcttcatcagctttctggtcttgatggtttccttcattacctaagcttagctgtcctggaacttgctttgtagacaaggctggccttgaactcagagatctgccagcctctgcttctgattgcttggattaaagatgtgtgccacccaagggaagggatacaatgtaatgaaagagtcagtcagggaaaatttagcagaaaagataagaattattactgcacataaatcatgtagatacaatagaagttctccattctgaataattaaaaaagtatgtgtgccaccttgggagccctaaactttctttaatttcttttcataagttgtaaacttcgctgtgtggggttggctgcgaagtcaccactcccttccttccacttagcaccaggcttttctttaatctgtttaaacttcttggtgcttcttttcttctaaaactgaatgttttgtatttcttcctgttcagtttgcaccctttcataagagatctgcattagagtggccactaataaccaagatacataatcaatactaggctgtcaggttatctcttctgctaaagctgttaatccatagctctttaatttatcctaaggcagatgttttagaaaatggtagaaagcaaccacattcttcaccaaaacattacaaggaagttctccagactatatatcaatattcttccattcttaaacctcttgaatcaggcccctgaagtttaaatcagcctcattctcattgtcttacatgcttctaccagtaatgtttcattaatctccccatgttaccacaattccctgtcctttcatcctgcttcacctgggaccaagaagcatgagaatacaataaaactccctatccctcccgccctctctctcactctctctctctctctgacttcatgtctactctgacctctaagttgctggggaccagatgatgctcctgtcatgaagaagtttatagaatatcaatcacttagcaaatgcaagctggttttacacaaactaaattgtgcgaaagcagacaaatgcaatgtgactcttatgcatataaactctctcacccaacaagacccatgaagatacccagtattaatagcctcaataaccagcaagtgctgggaatgctgttgccaacaaataaatactactttgtgtttggaggaaacaaaaggctaaatagcccaatctgtgggtaatttgacatttccttcctgtgttctgactacaggaaggcctggcttattttggatggcaagttatgaccataaagctcatcttcccgttctctctcagacatcctttttctttttcatgtggaattttaaacttctgctttccagctttctcaggcatttggtccaaaagtgctactggttaagagccaggcatttggaatcaaagtcaaagggcagaatcaaattctcaaagggtttttggccaatattttcaacccagcttgtttctggctatggtagtatgaggcaaatgcctctgagtgagggaatgagttcctaaggatgtgcctcagcaacagaaaaagcaaggatggctctttacctgacagagatactgtccaaggaaagtgacttgctagacatcagctctgcaatgttcattcagagtcatgtagccttctctcagtagcttctgccttaatcctgacaccatgctcccagagtgggagatttcaaagtctttatattagattatagtcatttaaaatatgtattgtttgagaattttatataacatatattgatcatattcttttccctctctccaaattctcatgatcctcccctcccctttctcatctaactttacattctttctctcttttaaaacaaaacaaaagaaaagaaaacaaaacaaaacaccacaacaaaatattggggtctgatttgtgttggacaactactcctgagcatggggcctcatagttattcattcatgatccttgctgctcttttcataatatccagaaactagcatatatgtccattaactgatggatagatactgaaaatgtggtacatttgcatagtggaatattactcagctgcgaatcataaaacttagaaataatcatccaagttgggtaacccagagccagaacgataaagacgaatatgtatattcatgtttacaaaaatatatatcattgtttggagtaactgatgtgctctttctacattacaaatggtatgtaggctaaagcccatttgtgatgactagcctagaaatctatgtacataaaagggctctttttgggtccctgacttacagagagggtcccaattaagaatgtatgatatctgtgacatgatcagtgggtgatcaaaggcaagctttgaagatggaggcaagaagccatgagtcaagaaccatagtccagaattaggaaagctcaagagaaacagatttttcctttaaagagcccagagagaaacactgttggataaaagctggagattctgtaggttgtataggtgagcagacaggttttagcaaagggtcttttaatgaagggccacagcagaaagggttccgaagtagagacttcagcaagcagcccatggaacaaaggcttacaggcttctaaaggaatatggggctcaaagacaatataaggcctacactaaggggtatctgggcatcagacatggggataggattacaattccagtttcatcaggctgagctgagcaaatgtagcctgaagctgggcttcctttccctggcctatctgcgacctaagtgctctaatagctgcagcagaacatgtggcagggttttatttttttatttttgtttttaatttttggttattttccttacttacatttcaaatgttttacccttgctaggtctccccttctgaaacgctttatcccatcccccactccctgccccaacacactcacccactcctgccttcctgtcctgccattcccctacactggggtaatcaagcacccttaggcccaagagtctctcctcccactaatgtccaacaaggccatcttctgccatatatgctggtggagccataggttgctccatgtgtactgtttggttggtggttcaggccccaggagaccccgggggatctggccaggtgacactgttgctccctccatagggctgcaaaccccctcgatgcctacagtcccttctccatctcctccatcagggaacctggtgtgaggggcggtgggctgtgcacagataccctggtctccagtcgagcaaaggtatggaaccccagtgacccacttgtgaatcccacctgcatgggatggaaggtatttgattctgtctcctaggccccttgcccttgtagaattgcagcccccatagctcccataacccccacagtccccaagggagaggtatgtggctatcagtcatgtaggagcagctaccaagccttcctacatgcaaataaggttttccccaagctctcagtccaagccaatgagcggtatctgctgtcagaccatgaatcacccccaaaactgtgtataaatgctatccagggaattgaaagtgcaagagaactactccatcgaccgagccttttgttctaagagctgtaacacttgggaagaggtctgctctcttgaagtatcacctgaagctcctccgagtgcctcactggccaggcgacctcatgtcagttcagcctgacacagctctgtgcagggcggcacggagtaaccaagtagagtaaccagacatcatggcagagatggaggtagagccaactgtagcagcagaaagggcagaagagacttcccttccctgccagcactcacttcccttcgagggaattctcgaaccagaccagaccatggaaagcctctggggcacaggcccacaatggtgctcagtccaatggttggctgcaagcatctgccttgtttttgtctggctctggcagagcgtctcaggagacagccatatcaggtttctgtcagcatgcacttcctgggaaacacaatagagtccaggcttggtgactgtatatgagatccccaggtggggcagtctctggatggcctttccttcagtctctgctccacactttgtctccatatttcctcctatgagtattttgtcccccccttttaagaactgaagcattcacactttagtgcgtttggtgttttgattataatgtgacaggaggaatttcttttctggtccagtgtatttagagttctgtaggcttcatgtatgatcatgggcatctctttctttaggttagggaagttttcttctataattttgttgaagatatttactggccctttaagttgggaatcttcactcttctgtaccaattatccttaagtttggtcttctcattgtgtcctggatttcctgaatgttttgtgttaggagccttttgcattttgcattttctttaactattgtgtcactgttttctatggtaccttctgcacctgagattctctcttgtatcttttctattctgttggtgatgcttgcatctattattcctggtctcttccctaggttttctatctccagggttgtctccctttgtgatttctttattgtttctctttctgtttttagatcctggatggttttgttcagtgacctgtttggttctgttttgctgtagttctttaagggatttttgtgttttttctttaagggcttctacttgtttacctgttttctattgtatttctttaagggagttatttatgtccctcttaaatttttctatcatcatagtgagatgtgattttaattcagtgttgcttttctggtgtgttggggtaaccagggttcactgtggtgggagaactgggttctgatgatgccaagtagtcttggtttctgttgcttatgttcttgctcttgccttttgccatctggttatctctggtgttaactggtcttgctgtctctgattgtggcttgtccctcctacaaacctgtttgtcagtacttctgggagaccagttctctctggaaggaatttggtaactgtgggtacagggtcatctctggggtgcagacagagacctgaaggatcctgttcccagctgacccttggttcctgtatcctgatggctctatgagggtccctcttgggcaaggaatttgaagagaaggagtgatattacctgtgcttgcaggtgtgtagatactcctgggagaccaactttcttctaacaggactggaaaactcctgtcccaggctgccccttagttcctgtgtcctgagggttctgagggtgggggtgggttcctctgagtagcagtgttgatcctacctgcactcataggcctatctgcactcctgggaggctagctccctcctggcgctatttgggtatggagccctttggcagaggatctgttgcaggcagagatggaaactggaaggctcatgtctgttttctgatagtcttaggagaacctctgtgaaagggtcaaggtcatgacccacaggttgagaaccactgttctatgtaccttttctcaaatgtcttttctgtgagccatcttcagagttcatatggaggcttcccccatttgtccttagtatcttccactaatgtattatctttatactttgaagataaggaacttcgtctttttatgcccaacacatagtaactattcagggaatatttgtgaaatgaggattgaccatgcattgcagagagaaaatatctattggaaataaaatggctaccgcagcacttgctcttaagggacctttctatgctctctttgcaatattcatgttttgtgatagatttctgaaatgaaacagtatagaactgtccactgccccttgactgctggtcagctggtttatggagttttgtttttcaagcacttgagcagcaagtcttcccttactactcattcctctttactcagagttatgcctgtttcaaggacatttcctctaaacagagaaaaaccattgggaaaaccaaaccctcccatccaatatcccttttgccaggttgtacaaaaatatgagcaccaaaacaaaacaaaaccaaaaacttcatctttcccttcccaggaggttttcaactatagttgcaagaatttagacccagtcctgaatctgctaaacctgctaagctgcacttgactcaaaatacctgtgacttctagtcctgtgtcttatagtttatatctgcattttccacagtgctaacaactacgtaggaagttaacacactagcctgttggttatttctttcagcatacgccatttgtgagaaaagcctttctctgaaaggtccagtgacagggaaagcatgatatgagtttctggagttgtcatgctggttcagggctgcgctcaagaagctaaattacgttctgagaatgaaaccagcagttatactcagtcgtcgacacttcctgctcaccactgcctgccagcagagctttccagtagcatagccaaaagtctggtcatgagctaccccagggctgaaaacccgctaggcacaggctcatcctctctctgttgtgttgtttgctgcgatacagcattctcactcctattgtctggatgctgagtttcattttctcagtgtttatttaatcagcagatttttggcttggtgaagagtaattattgttttttcttgaggaatattttcactccagggatagaattgtaacagtttcttagattaaaaagtgatctgtttgggtatgaattcactaatgagaaatattattttagaagcaagctcttgcttgctggcttctaagaaaaaagttcaagaatcaaatatttgttcagtgtgtgaggctgaatatctcagctgatcttcagcctgtgtcagatcctgtggaaacgggctgtagtgacataagggtgagccccagcagccagaatatgagctggccactaagaatgagagccagcaagcagaaagcaaaagctgctttcttccaagctctgtatctaggctgccatgagggaaagcccctcatttagggtcttcccacctcaaatgattcagtcaagaaaaacccatgacagatgtgctcagctacttgagtttttagtgaattccagatgtagtcaacttgacaagaatagccatcactatgtaattcatatatcaaaatacatcttcagtgtaatagctaatagatacagggcttgctatctgacgctgacattttgagcagacttaactgaatactcccgagacactgagacaaggtactagcatgttatcagtctctttcctccacactaagtacaggaagagcaggaaacagccccatcaagctagtatgggttggaacaggctagctgacctggccatgacattacctgctgtgctaaatcctttctccagcatgcttttatctacagctatattagccctccttgaaaactaaccccacactcatggccactcttcctcaaggtccccgattttcctttcacggtctctagca

SEQ ID NO: 1377 - DNA, 911 bp, Mus musculus
agttattgacagagcaggggaagaacactcgtggaaggacccagaaggatcagccagccatgcctccagttcaggtacaagattgagaaatggcatgtaacgcacccaaccaaagacagcggactttgtcaacatcaggagaaagtctatatgaaattcttggtctgcataagggagcatcatgtgaagaaattaagaaaacctacagaaaattagccctgcgacaccatccagacaagaatccagatgacccatctgctgctgagaagtttaaagaaatcaacaacgcccacacaatcctcaccgacacctcaaagagaaacatatatgacaagtatggatcgctgggactctacgtggctgaacaatttggagatgaaaacgttaacacatacttcatgttgtcaagctggtgggcaaagaccctgttcatcatcattggcctcttgaccggctgctatttttgttgctgcctttgctgctgctgcaactgttgttgtggacattgtcggcccaaatcatcgacaccagaagaggagttctatgtgtcaccagaggaccttgaggagcagatcagaactgacatggagaaagatatggactttccagttgttctccagcctacaaatacaaatgagaaaacacagctaatcagagaaggatctcgaagttactgcacagactcttaatgttggcccgtggagggtccacagctcctctttttggttcagccatgtctctgggtggtcatcggggaagtgcaaacatgaaatgctgtgaacatattcacatttgtattttatttttaggttaaggggaagatgattgctacataattttctcagactttctctttgagtagaatcctaatcaaaagcattcagtttgatgaataaaggcctgaagagttg

SEQ ID NO: 1378 - protein, 195 aa, Mus musculus
MACNAPNQRQRTLSTSGESLYEILGLHKGASCEEIKKYKLALRHHPDKNPDDPSAAEKFKEINNAHTILTDTSKRNIYDKYGSLGVAEQFGDENVNTYFMLSSWWAKTLFIIIGLLTGCYFCCCLCCCCNCCCGHCRPKSSTPEEEFYVSPEDLEEQIRTDMEKDMDFPVVLQPTNTNEKTQLIREGSRSYCTDS

SEQ ID NO: 1379 - DNA, 141253 bp, Homo sapiens
tgatgataaccacttgcctctgtgttacgctacagcttacgcaatgctttttttttttatcttatttatcatctgaaatggtctgtaacataaatgaacgaggtattaatccttctttttaaacatgagaaaacagaaactgaagagccaagtatctttctcaaatatcaactattggtaaggcggaaagtcagccttgaaaacaagtctctgggtagtgcctttttctatcacaaaccattgtctttgtcagttgcgagttagtaagtcccaggatatttttttagaaataaatgagaacagattcaagatcatccctatactaacataacttttgtttgcattccactgttgcctttttgaatcagagagaaagttttgggcttttggttaatattttgcagaactgtggccaaacttgcatccccctattgttgtgggttgaactgtgtagctcaaaaaatatatgtcaacgtcctcacactcagtacctcataatgtgaccttatttggaaacagggtaattgcaaatgtgatgagttaagctgaggtcctgctggggtagcgtgggccccaaatccaataaaattgttgccattataacaaagaatgccatgtgaagagacagagatgcacagaagaagatatccatatgaagatggaggcagaggttggagttacactgtcacaaatcaagaaatgcctgaggctaccagaagctgaaaagaggcaagaagaatcctcctcagaggtttcagcgggagcatggccctgctgacgccttgatttcaacttgtagcctgcacaactgtaaggcaatacatctctattgttttaagccacccagtctgtggtacctggttatggcagtcctaggaaactcatacacctatggaagtgcactgtgtttgagaagtgttgttttgaagagaatatggctgggcgcggtggctcctacctgtaatcccagcactttgggaggctgaggtgggcagatcacctgaggtcaggagttcaagaccagccttaccaacatggtgaaaccccgtctctactaaaaaatacaaaaattagctgggcgcagtggcacatgcctgtaatcccagctactcaggatgctgaggcaggagaatcgcttgaacctgggaggcagaggttgcagtgaacctagatcacaccactgcactccagccttggcaacagagctagactccatctctaaaataaataaataaataaataaataaataaataaataaataaataaataaaatatttcttcaaagctgtacagaaatttgtggttgctaactatgaaattttgtgactagctagatgtctgcaaagttcatcatcaacgttcattaagggtcccaatgcctcacccatgtaatccaagtcttgggaaggcttgtgccatcataagatggcacaaatgaccagagtgaccaaggcaagcaggcagtgatgaagggcctgggcaaggagtctgcctccaaagattgccccaagaaaagttagaattgggcatttccagggcaagtgattcctgacttagctctagaattctcagctggaagtgaagctccagtggagcactgggattcttggctgtccctgtatttcaaggacatatcttgggcacagtagatgtcaggacaaaagtacaggactttggggttaatacttgaagggcaagcagtggactgacggtgactactgaagacgcagtggacagacctgtaatttcattaatgaattcatacaaagacatgagaatgggaaatgctggtacctcagctatgggctaagcaggtcacctataggctaacagttgatgatggtattgtttcaaaacagaataatccagaatgtttagcagtttgtctataatttagatcccaagagtcctagtcgaggaaagattcatccctgcaacccccgacccaccagtcagctgagggcttgtagcagtcaggatcctgggagaaaggaggtgacactctctagctgagtaattaaggtgattttagtaaaagtactatttgcaaatgtgtgggcaggatttaaaaagagcaataaaagactttgccctactttaggctagtcacagcagggagccatttccacatctaggtgggaaggtacagaggaagggagaagttaccaaggctgggagacagctgtgtggatgaggctgctgccaggagctgtgcattcaggagaggcctgcacaaaatccacagggcctggatggagcagtgtcggggcaataaatcctaagcctcactctcccctcactccatctcctgctagggactctaattggtaaactccaactagaagtaggagggcaagggaacccatggatgtaatccacacagttagcttttggggatgcagaacaaaatgaggactatggatggagggaatagccaagtaaatgaagataaccagcacaggcaaccaggatccttccaattgcaagtgacagaaccttatcagaaactaacttagataaaaaaggaaatttattggaagttgctatggtttgaaggtttgtgtcctttcaaaattcatgttgaagctcaatctccaatacaatactgttaaatagtgtggccctttggaggtgattaagtcatgaggacagagttctcatggatggattcagtgaccttatagaagaggttaaagggagctcactggccctttcaccatgtgaggacacaacaacaaggcaccatttatggagcagaagacaagcccttaccagtcactgaatctgctggcaccttgatcttggcctccccagcctctagaactgtgaaaaataaatttctgttctttataagttacccagtcttaggcattttgtcgtagcagcccaaacgggacaaaacagaaattggtagtgagaagtggggtgttgctatagatacctgaaaatgtggaagtagctttggaactgggtaacaggtagaggctagaaaagtttggaagtgatgctagaaaaaaactatattgtcatgagcaggacattaaggatgattttggtgagggctcagaagaagaggtaggcagtagagaattcttcaaacttcatagtgattaagaaataattaacagaatgttggtagaaatatgaacagtaagggccattctgatgaggtcttagatagaaatgagaaacatgatactgaagatggagtaaaagccatccttgttataaagcaaaaaacaacttggctgaattgtatttgtatcctagtgttttgtggaaagcagaacttaagagtgttgaattaagatatttggtggaagaaatctctaaggaaagtgttgaggatgcagcttggcttctcttaactgcttatagtaaaatgtgagaagagagaagcaaattaaagacagaattttaaccaaaaagaagacagaacatgatgatttggaaaactgtcatcctggctaggtagtaaagagtgagaaagcatgcctggcagagaaaaccaagggtgtggccaaaagatcatttgatgaggagattagcatgaatgaaggaagccatgtgctattcatcaagacaatggaagaatgacgctgaaggcatttggagatctttggggctgccactcccatgactggcccagagtgccagagccttgagggcagaacgggttctaatggcagagcccagatggaagtgctcgtgtgacctcgaggctcctgcctagggccaccttaagttcctgtcccccactttccagtgtagcgctcctctgctgccccacatgtggctccagtaggcccatgtgcagtgcggtcagctatggccacacctctagagggcaaaagcggtaaaccttggcagcatccacgtggtgctaactctgcaggcacaaagagcttgggggcatggctacctccacctagatttcaaaggatgttctggagatacttggggcctaggcagagaactgctgcaagtgtggagccactacagagagctcccaccagggcaatctctagtggagtcacaggaggggggcacccctgagaccccggaactctagtgttaccatcatgcagtgccagcctgggaaagccacaggcacatgattccaatgtgtaagagctactgcatgggcggcaccaaaccaagccatgagggcagggcttactggagctttggggacccaactgtacccgcagtgtgtccagaaggtggggtgtgtagttaaagaagattattctggacacttacgatttaatgttgggctgggcgtggtggctcatgcctgtaatcccagcactttgggagggcgaggtgggtggatcacaaggtcaggagatcaggacaatcctggctaacacggtgaaaccccgtctctactaaaaatacaaaatattagccaggcatggtggcgggcgcctgtagccccagctactcaggaggctgaggcaggagaatggcgtgaacccaggaggtggagcttgcagtgagccgagattgtgccactgcactccagcctgggtgacagagcgagacaaagatgtaatgtttgtcgtgatggattttggatttgattggcatctgttactttttcttgttttctatttctccctttggaaagggaacgtctattctatgcctgtctaagcattgtgttttgcaagcaaatttttttgacttcacagactcacagcaggagggggaatttgactcaggatgaatcatacctcaagtgtcacccatatctgatttagagcagactcttcagacttttaagttgatactggaacaagttaagacttggggggctattgggatggaatgaatgcattttgtatgggagaaggacttgaattttagtgggccaggggtgaaatgctgtgatttgaatgtttgtgcctcctccaaaattcatgttgaaacttaatctccagtgcaacagcattaagtgatggggcctttaggaggtgattcagtcatgagggcagagctctcgtggatgggatcagtgactttatagaagaggttgaagggagctcccttgccctaccaccgtgtaagggtgcagcaagaagtcatcatattgcagctgagagcaaggcctcacaagacactgaatcttctggtgctccaatcttagcctcctcagcctccagaactgtgaaaaataaatttctgttctttataaattgcccagtcttagatattatgttatcgcagcacagactgaggcagaaattggtagtgagaagtggggtggttgctataataaatacctggaaatatgaaagtagctttgaaactgggttatgggtagagactggaacaattttaaagtaaatgctaaaaaaaaaaaaaaaaaaaaaaaaaaagcctgtattgccatgaacagagcactaagggtgattctggtgagcactcagaagaaaaaagagccttgatcttcttagtaattatttaagtggttctgatcagattgctggtggaaatatggacagaaaaggctattttgatgagttcttagaaattaaaacaaggtattgggaactgggggaacggtcgtccttgttaccacatggccaaaaactgaattacgtccatgtcctacactttgtggaaggcagaatttaagagtgataaactaggatatgcggcagaagaaatttctaggcagcaaaatgttcagggtggtgcatggcttcttttaactgcttataaaatataagaagacgagaaaatgtgagaagagagaaatgatttaaagacagaatttatcattaaaaggggagtagaagttaaagatttgaaaaatgttcagcctggccatgtaaagcatgaaaataagcgtgttcaggagagaacaccaagggtgtggccaagcaaccatttgatgaggagattagtatagacaggaggaagccaggtgctattcatcaagaatatgaatgggagaatgaccctgaaggcattctggagatctttgaggctaccatgcccattacaagccagggtgacagggccttgagggcagaatggtttccaggaaagaacccaggattcccatggaacataggggttcacttaggccatcttaaaagtctctgctcccagcattcttgtgcagcccttctcggctgccccagttgtggtttaagcaggcacatgtggcttggaatacctctctgtaaggtacaggtcataaaccttagtggcatccatgtggtgtcaattctgcagtctagcagaatgcaaatgctataaaggcatggctgcctccagctagatttcaaaggatgccttagcgacctgcagagcccaggcagagaactgtcacaggagcaggggtgccaaagagagcccccactagagacatgcttattggagttaagaggggagggccactgcagaaagtcacctctagggcagtgctcagtagagccatgggaatagggctgcccctgagactccagacctgtagagccaccagcgtgcaacacccgcctaagagagccacaggcacctgactccaacctgtgagaggtttagtgtgtgtagtgtccagcaaagccatggagacgagcctgcaaagagacttggaggtttaacccctgtcccagtgtgtccagaatccaggacatggtgtctaagaagattattctcgagcctctagatttaatgttgtttgccttgttgggttttggtcttacctggaacctgctaccccttattctttccactttctcctttttggaatagaaatggccaaactgtattttggaagcacataaattgtttggttttgcaggctcacagctggaaggaaatttgtctcagggtgaattatggcatgagtattatctatatctgatttagatgagactctagacttcagacttttgagttgatgctggaatgagttaagactttgagaaatggaatgaatatattttgcatgtgagacggacatgaatttagcggagccagagtggaatgctgtggtctgaatatgtctcttccaaaattcaggagttgaaacttaagggcaatgtgatagtgttaagaggtagggcctttaagaggtgattgggtcgtgagagctcttcctctcatgaatgggactaaggcccttatgaaagaggcttcaggccacgtgtggtggctcacacctgtaatctcagcactttggaaagccgaggcagatggatcacttgaggtcaggagtttgagaccatcctggccaacatggcaaaaccccgtctctactaaaaatacaaaaattagccagatgtggtggcacatacccattgtcccagctacttgggaggctgagaccggagaatgtcacttgaacctgggaggtggaggttgcagtgagctgagattgcaccactgtaccactgtactccagcctaggtgacagaatgagactccatctcaaaaaataaataaataaaaaagaggtttcacacagtgtttgcttctcttgcccttatgtgtccagaataggtgggttcttggtctcactgacttcaagaatggagccgcggaccctcacggtgagtgttacagttcttaaagatggtgtgtccggagttttttccttctgatgttcagatgtgtttggagtttcttccttctggtgggttcatggtcttgctgcctttaggagtgaagctgcagaccttcgcggtgagtgttacagctcttaaggtggcgcatctggagttgttcattcttcccgtctggagttattcattcctcccggtgggttcgtggtctcgctggcctcaggagtgaagctgcagaccttcgcggtgagtgttacagctcataaaagcagtgtggacccaaagagccagcagcagcaacatttactgcaaagagtgaaagaacaaagcttccacagtgtggaaggggatccgagcgggttgccgatgctggctcgggcagcctgcttttattcccttatctggcctaagccacatcctgctgattggtccattttacagagagctgattggtccatttcacagagacctgattggtccgttttgacagggtgctgattggtgcatttgcaatccctgagctagacacagagtgctgattggtgcatttacaatcctctagctagacataaaagttctccaagtcctcaccagattaactagacatggagcactgattggtgcatttacaaacgttgagctagacatagagtgctgatcggtgtatttacaaaccttgagctagacacagagtgttgattggtgtatttacaattctttagcttgacataaaggttctccaagtccccaccagattagctaggtacagagtgctgattggtgcatccacaaaacccgagctagacactaagtgctgattggtgcatatacaatcctccggctagacataaaagttctcccagtccccacctgactcagaaggccagctggcttctcctagcagatcctgcaccagagccgcaggtggagctgcctgccagtcctgcgccatgcgcctgcactcctcagcccttgggcagtcgatgggaccgggcgccgtggagcagggggctgcactcatcggagatgcttgggctgtgcgggagcccactgcgggggggttgggcatggcaggctgcaggtcccgagccctgcttcacaggaaggcggctgaggcccagtgagaattcgagaatggcgcaggcaggctggcagtgctgggggacctggcgccccctctgcagctgctgacccaggtgctaagcccctcactgaccagggctggtggcgtctgccagtggctccaagtgcggggcccaccaagtccatgcccacctggaacttgcgctggcccgcgagcaccacgcgcagcctgctgctctccctccacacttcctcgcaagcagagggagctggctctggccttggccagcccagagaggggctcccacagtgcagcggcaggctgaagggctcctcaagggtggccagagtagacgctgaggccgaggaggtgctgagagcaagcgaaggccaccagcacattgtcacctctcacttacaccttctgccatgtgaggacacagcatttctcccttctggggatgcaacaacaatgcaccatcttggaagcagagagcagccctcatcagacaactgaactagtagcaccttgattttggacttcttagtctccagaattgtgagaaaataaatttatcttctctataaattacccagtctcaggtattttgttatagcagcataaatagactatcttaggccattcttgcattgctttaaataaatacctgagactgggtaatttatatggaaaagagatttaattaccttacagttctacaggccttatgagaggcatggtgctgatgtctgctcagcttgtgctgaggccttaggaagcttacagtcatggcagtaagtaaagtaggagcaggcacttcacatggtgaaagcaggaacaagagagagagttggcagggaggtcccacacagttctaaatgacaagatctcataacaactcactcactgtcacaagaatagcaccaaggggatggtgctaacccattcatgagaaatctacccctgtgatccaatcacctcccaccaggactcacctccaacattgggatttacaattcaacatgagatttgggtggagacaaatatataaattacatcgcaggctgagacaaacactctctagtatggtttggctctgtcccccccccaaatcttatcttgaattgtactcccataattcccacatgttgtgggagggacctggtgggagataattaaatcatggggatggtttcccccataccgttctcgtgatagtgaataagtctcatgagatctgatggttttatcaggggtttccgcttttgcatcttcctcattctctctttgcctgctgttatccacataagatgtgacttgcttctccttgccttcagtcatgattgtgaggcttccccagccacgtggaactgtaagtccagttaaacctctttcctttgtaaattgcccagtctcaggtatgtctttatcagcagcatgaaaatggactaatacagtaaatttgtacgagtagagtggggtgctgctgaagagataccccaaaatctggaagagactttggaactgggtaacaggcagaggttggaatagtttggaaggcccagaagaagacaggaaaatgtgggaaagtttggaactccctagagacttgttgaatggctttgaccaaaaagctgataatgatatggacaatgaaatccaggctgaggtggtctcagatggagatgaggaacttactgggaactagagcaaatgtgactcttgttatgttttagcaaagagactggtggcattttgcccctgccctagagatttgtagaattttgaacttgagagagatgatttaggatatctggtggaagaaatttctaaatagcaaagcattcaagatgtgacttgggtgtgttgaaagcattcagtattaaaagggaaacagagcataaaagtttagaaaatttgcagcctgacaatgaggcagaaatttacttaagcaacaaggcacagaatgttaatccctaagacaatggggaaaatgtttctagggcatgtcagaggtcttcatggcagctcctcccatcacaggtctggaggcataggaagaaaaagtggtttcatgggccaggtccagcttccctgagctgtgtgcagccaagagacttgatgccctgcgttccagctgctccagccatggctgaaagggccaacgtagagttcagaccatgtcttcagatggtgcgagccccaagccttggcagcttccatgtggtgttgagcctgtaggtgcacagaagtcaagaattgaggttttggaacatctacctagatttcagaagatgtatggaaatgcctggatgcccaggtagcagtttgctgcaggggtggggctctcatggagaacctctgctagggcagtgcagaaggaaaatgtggggtcagagcccccacacagagtccctactggggcactgcctagtggagctgtgagaaaagggccactgtcccccagacagtgaagctgtcataatccaccgacagcttgcactgtgcacctggaaaagccgcagacactcaacaccagcccatgaaagtgactgggagggaggctgtaccctgcaaagccacaggggcagagcttcccaagactatgggaacctaccttttcatcaatgtgacctggatgtgagacatggagtcaaaggagataactttggagctctgagatttgactgcctctctggatttctgatttgcgtggggcctgtagcgcttttgttttggccaatttctcccacttggaatggctctatttacccaatgtctgtatccccattgtatctaggaaataactagcttcctttgattttacaggctcatgggcggaagggacttgccttgcctcagatgagactttggactgtggacttttgagttaatgctgaaatgagttaagactttgggggactgttgggaagacatgattggttttgaaatgtgaggacatgagatttggcaggaaccaggggtggaatgatatggtttagctctgtgtccccacccaaatctcatcttgaattgtactcccataatgcccacgtgttgtgggagggacctggtgggagataattgaatcatggaggcagttttacccatactgttctcatggtagtgaataagtctcatgagatcttatggttttatcaagggtttttgcttttgcaacttcctcattttctctttgcctgctgccatccacgtaagatgtgacttgctcctctttgccttccatcatgattgtgaggcttctccagccatgtggaactgtaagtccaattaaacctctttcttttgtaaattgcccagtctcaggtatatctttatcagcagcatgaaaatcaatgaatacactccgcatgcaaattgcatcctaaaagtgcaattcatttgctattccctgggaacagcccatgtcaccacgtctggttgcctccttttctttcatctcctacctttcttggtcctactaatcactcgagaccctgctcaagtctcaccatctccatcagaacatccctgctccttccagggggaaggaaactttctgcccctgctcttttgctgtgtatcagaaagctatttacatatctgtcaaggccaccttttcatcatgactagtgatctacatcagtctccctcatgagactgcaagatcctaaagggaaagtctcctatattctggacacactgccatactcacatgcccacacccacacccacgcttgtgcttggcactgggcttatgtgtttttgatggaaggaatcttgggagctgtgggaaggaatgaggacttgactctcattttgcgccctccccccacttcacataccctcactagctttctccttcttctcatgcttcctgtctgctcctggcttttcagtggtttgttataaatatggtcactcttcttatccacattgggatagatttaagatcgaactttggcttttaaaagcatatgcctaagacactgagcttgtaaatctaccctggttaaacatgtgacaagtgttgtaaagcaaatgtgactgtatttccttttagaaactgatgttcctcataaatgtcagaactgaaatattttagggagttatatttttacaagaacttttagaaaagtgttgattattagccacattagtcaaaggtgcataggctcaaacatcatttgcctatccaaagggggagctcagtctgaccttggtagctgtggttgcattataacttcttttgttcagagacattttgctttgaaaatggtttacacttcactgttcagaaacagaagtaaaactgttcatagagtggattgagggtcaacgggctttccttctttcttttttggtgttaaccacagatgtctttaactgaacatggcctttctaaatgaccctttcagtttctatagctactgctttgtggactaaagttcaacagtttgtgggttggccaatttgacttggtaaccccctaagcacactctggaacaaagtaaaagacataacatctctgtgaagggatctgctggaatccaggtaaacaataagccctgagttttatgactaccagttaatagtacatctgttccaggccctagaacaaccaaaatgcagcttctaattattaaagccaccatcttcgtttgtccaactaagtaaaagagagaacgttaacctttctgtcacttccaggacatcaaaaaagcaattccctctccctcttcttttctccatcaaaccaggaaggaaaaagaaaagaaggaaggaaaaagaaaaggaaggaaaaaacctgaatattttctacaatcaaacaagagaaattttaacaacttttcaagaataagtgtaatgtttcccagacaagaatctttaatatagttgagtaaaccagatactctaaactactcttcttttagcactcagcccccataatgacatattattgaatccacattttgacactaattatgataatttttctagaagcaaaatggagcagtagtacaagggatgtgatgacattcaaagtggttgtgacatgttgactgacagaggaccaaaaaggagcattgaagatggctttacaggtttaagcctaatgactgggaaaatgtgtaaccgaagtaggaaatcaagaagggagctagttttatgaagcggttgcttagttcaagtttagatgttgggtttgaggtagagacagcagtatgttcagtggaggcctacgggggcagataaaatggagcctacgggatattggacgtaaagtataatgccccttctggtgctgctccctaagatatattttgcataggaagtgcaatggtctttcttaaaatagggtgtatagagtgtttcagagaggcaaatgatcacatatttatggtctgtacttgtcaaaagtgaggcctgaaaattttggggtttggtaataatggccctgtattagtcattttttgcatcactatgaagaagtacctgaggctgagtaatttataaagaaaagaggtttaattggttcatggttctgcaggctgtgcacgaagcatggtgccagcatctgcttctgattgggacctcaggaagcttccaatcatggcagaagatgaagcaggataaggtgtatcacatggtgagagtgggaataagaaagagaagggggaggtcccagactcttttaaacaaccagatcttgaatgaactaaccgagtgagaactcactcgtcaccatggggatggcactaagccattcatgaggaatccaaccccatgatccaatcacctcccaccaggtcccacctccatcattggggattatatttcaacatgagatttggagggaacaaacagccaaagcatatcagtgccccaaaataagaaattaacactccatgccaagaaggataaaaacacccagaagtatacccccaagccaggaagaagggaatctaagctggataatgctgatacaattcccacaaccacactaggtgttaccaccaacttcagagtgagaaagaagcagcatatccagaatcacctatacatttacattcaagttacttgtttaataaactagatgtagttgtcattctcaacaaatcctttgccacatccctaggttaaggaacctctcttaaaattatgtgaagcttgtgttatacaagggttgatcccatgcacatcatcattcagctggaggttgagaaggtaaggttttcagaagtaaagggaatatctaagtttctcaaattttctgcatggagtataatgtgtttattttaaaacacacaattattgaaaaaagttattaacaagaaaactttctgagcccacaaaataaaaatatacttaaataaaaaaaaatgttaggaggatagaacaaggtgaatgcaatcctccttataatagtgtagttttgttaagtcagtgtgagcatctggccttctttccaagggtttcatctcctcaaagagagtttatctgtacaccaggttgtcaaggcagctgagaaacaagcaataggcttcaaacactggaactaatcatatgaatgccagctaacagatttctttcttttttttcttttctttctttcctttttttttttttttgagatagggtctggctctgtctcccagaccggagtgcagtggcgtgatcccggctcactgcaacttctgcctcccaggttcaagagattctcctgcctcagcctcccgagtagctgggattacaggcacgtgccaccacgcccggctaatttcttgtatttttagtagagatggggtttcaccatgttgaccaggctggtctcaaactcctgacctcaggtgatccacccgcctcggccttccaaagtgctgggattacagacgtgagccacggtgcctggcccagctaccagatttcttttactttgtgtaaaatatatataatgtcctgagcccagcattcacattctactttggcttacattttgaatactgttgtcctttcacagataaggatggttatgaatgcatactaggtatgttcatgtatggagttatacgatccactgctcataaaaaggtgtatgacctacgtatccatgtacagggaagaaagtatgcctctttaaaaaacataaatagagaaagagctgctcaaggaaaaagatcctccaaaacaaacaacaatcatgaaaaatcttgattattcacatttgaattgaaatgaaagaccaaatgttttggatttttctaggcactctcccgcaagaaagaaacaaatttgaaatccacctgaactgagagatttactggaaatgtcattgctttgtgctctggcactttctacaacgagagtacttgtcagttggtgggggtggggggtgggaggcgaggggtgggtagcagaaggctgaggaaagaggatgcagatgaaagcagcaactggcagtgtggatgagaacgatggggccaggagatgcctgggaggtgaggagggcccagtgctggaaggcagatggggtccaattcaggtaatgagtcaggaaccaggcgatccaactcaacgagcaggcatcacccaaattctgtggtgagcaatgcggttcaatcctgcctttgccttttcaacttgtggcctgggcacaacggaaaaagggagatgttgtcctttggccctgacaacaatgcttgaaaactctcaacaccaaaccttgagggcagtggccaagacacaggctgtctcagctcctttcttgccatggatgtctgctgccgttcacataagccccttgcagctgcctgaggtacttggctagaattcccacctcctggggcgcaaacctagtagtttgtggaccccttggcctgcttgtctgctcccctgcctcttcctctctctcctctgaggctggagcccatctccccacaaggccctcctgctcctccactcagtgctctcccatctctctttctgactgaattctcaatcctagctcctaaatctgcactggatcatgaaaatgaagattgtgaggtattgcaaattcttcaacactctacattccttggaggtgggaatgtgtctgtaatgtttgccacacgtgtctagcccctaacagcgtctgcatgtgcctggcatggaggaaacactaacaaaagaatgaaaaattaaagtgagttggttatgtagtatttacagagagtaggaaacttggattttttttttttttttttttttgagactaggtcttaccctatcacccaggctggaatgcagtggctcaatcacggctcactgcagccttgaccttctaggctcaagtgattctcccacctcagcctcctgggtagctgggaccagaggcatgctcaccatgcccggctaatttttgtattttttggtagagactgggtttcaccacattgcccaggctggtctcgaactcctgagatcaagcaatccacctgcctcagcctcccaaagtggtgggattgcagatgtaagccaccgctcctggaaggaaacaggtttttaacatagattgaaacaaaaacatttttctgcttaatgagaaaattaaaataatgagaaactatgaaaaattaaaagaatggaaaaccatatttatggttgattgagatttaaatcccaagtatttcatcctcaaggtccctcaaatatgccaagcagcctcacccttcaaggcctttgtgtttgctgttctctctgcctggaatgtccctccatcaactctccacatagctcctgtgttctgcaatgaagaaaagggaacacacgtacactgttggtgggaaggcagattaatacaatctctatggaaaacagtatggagatgtctcaaagaactaaaaataaaactaccattttatccagcaatcccactactgggtatctactcaaaagaaaaatcagcatgtaaaacagatacctgcactcatgtttattgcagcactattcaccatggaaaagatatgaaatcaatctaagtgtccatcaatagatgattggataaagaaaatgtggtatatacatataaattccatggaatactattcagccataaaaagaatgaaatcatgtcttctgcatcaacatgtacagactcgaggccattatcttaagtaaagtaactcagaaacagaaagtcaaaatactgcgtgttctcacttataagtgggagctaaataatgtgtacacttagacccagagactggaataatagactttggagactcagaaatgtgggagggtgagagcaggatgatggatgagaaattacttaatgggtacaaggtacactattcggatgatggttacaccaaaagtccagacttcgccactccacagcgtatccttgtcacaaaactgcacttgtgcccccaaatctataaaaacaattttttttttttgagacagagtctcactctgttgcccaggctggaatgcagtggcaggatctcagctcactgcaagctccgcctcctgggttcacaccattctcctgcctcagcctcctgagtagctgggactacaggcgcctgccaccatgcctggctaatttttttgtattttttttttagtagagacggggtttcaccatgttagccaggatggtctcagtctcctaaaaataatttttttaattatgaaagaaaatagcctggtatatttaattttattggacttaaatacaaactgaccttctgtttacaaacattgtgacatgggagtacatactcctcattttaacatacccttttgatcttcattaacctattctaaaatatgttactgcttacttactccacaatattttatctgtcggctaaataagacagaacagctgcctcctagatacatagaatgaatcataaaactacatactcaggttatgtgcagcaaaagcaggggtcttcatacacactcatgcttaatctttaaatgcatcttttaatggggcttttgacactcaaatagccaaagtgcatttatgaattaatgcttttaaagcagctcactactcattcatggataattctgttgacacttgtttttttcatatctaatgggaagtttcaagcctactccatgggaaagcatacattgaatttggggatttatcgtggtatcatatgttagacaccagattctagtctttgacttccctgctaagccagagagccctgaaaagtgtaaacacacttgtcattcctgggaggtcactgttcaacatggatataaaaggattataaacaaagatcaggataattggagcaagggtggtgaggggtcaggtctgggaagtgatgatgatctagaatgcccagggaaaatggcataggtcattgaacaggggctggatccacagagtatttttagtgtcccaagcaagatttaaacttttatctttagttattaaaacataaggcagaatctcctgctattttttctcaaggaagaactgttactaaagcttctacaaagaagcctaagacccctccctctcttaccagaagctaaacgtaacaaataaggaccctggtctctggtcagaaaaccattcccttggctggaggagagttactcaacttctctgagccttggtttccttacttgctaaacagagtaataatgtatatcataggttgccataaatattaaatgaaactcgccacggtggctcatgcctgtaagcccaacacttgagaggctgagatgggagaattgcttgagcccaggagttcaagaccagcctggacaacacagagagatcacacctctaataaaaatgaaaaattaatcaggcgtggtgatgtgtatctttgtttccagctattcaggagcctgaagcaggaggattgcttgagcccaggaggtcaaggctgcagtgagccatgacggtgtcaccgcactccagcctgggtgacagagtgacactctgtctcaaaaagaaaccaaaaaaacaaaaccaaatgaagccctcaaaaatattaaatgagataaggtacataaagtgataagcttgggactcatgatttagtaagcactcaagaagctcatattaatgtttacttcttccacattcttcctgttcccttactcctctctgcttcgtttctccttcctttgtttttctctcactgtagagcctgattgtaatgattgtttgtaagtatttattgaacatcaatccattatcattaaataataattcaggagagtcaatatgtatgtgaggatttactaaacaaccctcagaagcaatgggctaggagatacaggtcggagactgtgcgttcggtccccctgatgggtgcacactcccacagtgatgcaatgcagggtgttattccatagtggggggcaacatagcttttggatggctgaaggtggctggccttgataaaaaagtaaaggcctacagtagttggaaggtctgctcccatttggaagccacaggttcctgggtaaaggttttctagagaggggacatgggaagagactagttttactgcttcttagaatccctgagacactggagaacaggctttgtgaactctgaagtggcaactctctgagggctgtggctaagaagagggcataccagggaaatgcctgtgttccccagaggcattctgatccgttagagctagacatggagctggggaggctgcttcatgagccccctctctacccttttccctgctcatacctttgtcctacctggtctgctctctgcccctggccatgcccttcacgggactaccacttcttgcctccatgtgtctacttcagccatgttgaaatccttccagtttcctaaagggctttatttatttatttgtttgtttgtttgtttgtttgtttattttgagacaaggtctcgctctgtcgcccaggctggagtgcatggcacgatctcactacaacctccacctcctgggctcaagcaatcttcccacctcagcctcctgagtagttggaatgacaggagtgtaccaccatgcctggctaagtttttgtattttttgtagagatgtggttttgccatgttgcccaggctggtctctgactcctgagcccaagcaatctgctccctgggattacaggcttgagccactgcacctggccatcttctttatttatgaaaggcagagctgctgcttctgcctttaatattctttttggcctaccttctatttgttgtcaagacccacctctgtgcagtctcccttcatccccatcccttccacaaggcgcccctgcagtgtgcatggtcttggtactgtggccttgtggccctcatcagtcagtgtataattgctaggacctctcactctcctggaagtctgttgagagtagagatggtattcatttctctaatctctgtgttgctaacacacagcacggtgcctgatgcatagaaagtgcttagtaagtgttggtggagtaaactaataagaatctccatcctccctacatcctccatctgaaagtgaactgtgacggcttcccccaaataattaagttgtgtttaaaaagcacaaacttggttggatgcagtggctcacgcctgtaatcccagcactttgggtggttaaggcaggtagatcacctgaggtcaggagttcgagaccagcttgaacaacatggtgaaaccctgtctctactaaaaatacaaaaaattagccaggcgtggtggcgagcgcctgttatcccagctactcgggtggctggggcagaagaatagcttgagcccgggaggtggaggttgcagtgagctgagattgcgccattgcactccagcctgggcgacaagagtgagactccatctcaaaaaaaaaaaaagaaaaaagaaaaagcatacactttcacctttctccttgggtgtcagaaagattaatgtctatttggcaacgaagattttgtaaggagacttagctctttgaaggaaaggggccatgcatgttttaaaagacattaatgattttgatctgtggtgattgccacatctgtcctcgtactctgcttgtggagaatacaagtatccttcactacttaggaaagtggtacaacttttaaatgactaaaaatgaccctatattaccttgaattctggtcagatgaaataatttttaaaagttattctgaccaagtaaaacaaataagatgaatttgattcacttactctctgtcctctaacaggggaggagcaactggtttttttaaaaagaatgtgggctgccaacatttcttttttctatcctgagatatatgttcagacatcacatgtcacattgccgtaggcagcaattacagaagatgagtcgaatacaggttcagaaatgcatgccaaaaaaaaaaaaggtattcactaggtatcagtggctactgtacttggcttttgggaagtccacagggaggtccttgctaagtaattgtgagggtttattgaacacaaaacatcattcctccaacagtttgctgtgccccttaattcctttcaaaataaactcttccacttactcttgttccaaggcaccccttgccattgaagattggccttccctgaatgataataggtggagacagatgagtctaattttgacctacttcctaataatgtcatcacccaggatttgtcaagtaattgctgaaagtcctaaaaagtttgaacaacatggggaaacttcaaagatgagcataaagatatgcactgcatacttaattgttgaaatgcttcttatatccctgagatgcctccaaggaaatgtccttaaaatgtcaccataaagagacaacattatcaccgtcagcaaggaaaatttctacataagtttctaaactacaagattagagctttggccagctaggagacagtgtgattgttgtgaaagaaaagcgtggactttgtagtacaggccaggttcatacccgctccctgacttagaggctgtgtaacgttgggcaaattacttaacttcaggaagactctctttcttatctttacatttgggttcctaactacctcataaatttattgtttattgaatcaagtaattaataaatgtttatttattgagctgggtgctagagatttaaaaataagatacagtgttctccctcaaatatttcattgtctaggagcagaaactgttgaatacaaaaataattgtagcacactgtgaaactgtcttaatgctagtaagttcaaggtggtacaaaggagaaagtgatcaggtctacttgggacaatcaaggaaggcttcaaagaagagaaatttaggcatcatctaatgtttaacagatgaataaaatggaaagacatcaagtgcaaaatcaacagaatgctcaatggcattgtaaacaaattcagaacttcaagagttcaggaaatgtcaagttgttcagcatctctgtatatttaagaagtggaagaagcttggtgaccatctgcaggagaaggcatagcaaagaaaagaatgacattcaattttctgtattgagttgctttgctgagcctgatgtcctttactgagggacataagaggagatggtaaagataaagagataacattgggacgagttgagtgtgagagttctttgaaatgtctgcatgaaatgtcttgtaaacagttcattgtagtgttctggaactcagaagagaaaactgacctggagattcaggctcagaacccagagccttatttctagggccagatgagcacttggatcttccctcttacacaggatggcttcaaaccagcaatattaagaagcctgggttgtaggggtagtgttcaagagagaatccacaggtcagagtcttggggagaggagtgatatgcttgaaaaactccttatccatcttttttttaaatctgaaattcaaatcttttttaattttttttattatactttaagttctagggtacatgtgcacaacgtgcaggtttgttacatatgtatacatgtgccatattggtgtgctgcacccgttacctcatcatttacatcaggtatctctcctaatgctatccctcccccctccctccaccccacgacagtccctggtgtgtgatgttctccaccctgtgtccaagtgttctcattgttcaattcccacctatgagtgagaacatgtggtgtttggttttctgtccttgcaatagtttgctgagaatgatggtttccagcttcatccatatccctacaaaggacatggactcatccttcttatggctgcatagtattccatggtgtatatgtgtcacattttcttaatccagcctatcattgatggatatttgggttgcttccaagtctttgctattgtgaatagtgctgcaataaacatacatgtgcatgtgtctttatagcaacatgatttataatcctttgggtatatacacagtaatgggatgactgggtcaaatggtttttctagttctagatccctgaggaattgccacactgtcttccataatggttgaattagtttacagtcccaccaacagtacaaaagtgttcctatttctccacatcttctccagcacctgttgtttcctgcctttttaatgatcaccattctaactggtgtgagatggtatctcactctggttttgatttgcatttatctgacggccagtgatgatgcatttttttcatgtgtctgttggctgcataaatatcttcttttgagaagtgtctgttcatatcctttgcccactttgtgatggggtttgattttttcttgtaaatttgtttaagttctttgtagattctggttattagccctttgtcagatgggtagattgcaaaaattttctcccattctgtaggttgcctcttcactctgatggcggtttcttttgctgtgcagaagctctttagtttaattagattccatttctcaattttggcttttgttgccgttgctttttgtgttttagacatgaagtccttgcccatgcctatgtcctgaatggtattgcctaggttttcttctagggtttttatggttttaggtccgagatttaagtctttaatccatcttgatttaatttttgtataaggtgtaaggaagggatccagtttcagctttctacatatggctagccagttttcccagcaccatttattaaatagggaatcctatccccatttcttgcttttgtcaggtttgtcaaagatctgttggttgtagatgtgtggtgttatttctgaggcctctgttctgttccattggtctatatctctgttttggtaccagtaccatgctgttttggttactgtagccttgtagtatagtttgaagtcaggtagcgtgatgcctccagctttgttcttttggcttagggttgtcttggcaatgcgggctcttttttggttccatatgaaatgtaaagtagttttttccaattctgtgaagaaagccattggtagcttgatggggatggcattgaatctctaaattaccttgggcagtatggccattttcatgatagtgattcttcctatccatgagcatggaatgttcttcatttgtttgtgtcctctcttatttccttgagcagtggtttgtaattctccttgaagaggtccacatcccttgtaggttggattccttggtattttattctctttgaagcaatttgtgaatgggagttccctcatgatttgtctctctatttgtctgttattggtgtataggaatgcttgtgatttttgcacactgattttgtatcctgagactttgctgaagttgcttatcagcttaaggaggttttgggctgagacaatggggttttctaaatatacaatcatgtcatctgcttttccaaattgaatactctttatttctttctcctgcctgattgccctgaccagaacttccaacactatgttgaataggagtggtgagagagggcatccctgtcttgtgccagttttcaaagggaatgcttccagtttttgcccattcagcatgatattggctgtgggtatgtcataaatagctcttattattttaagatacatatcatcaatacctaattcattgaaagtttttagcgtgaagtgttgttgaattttgtcaaaggccttttatatgctggattacgttttttgatttgtgtatgttgaaccagccttgcatccgagggatgaagcccacttgatcatggtggataagctttttgatgtgctgctggatttggtttgccagtattttattgaggatttttgcatcgatgttcatcagggatattggtttaaaatttctttttttgttgtgtctctgccagattttggtatcaggatgatgctggcctcataaaatgagttagggaggattccctctttttctattgattggaatagtttcagaaggaatggtaccagctactctttgtacttctggtagaattcagctgtgaatccatctggtcctggactttttttggttggtaggctcttaattattgcctcaatttcagagcctgttattggtctattcagagattcatcttcttcctggtttagtcttgggagggtgtatgtgtccaggaatttatccatttcttctagattttctagtttatttgcatagaggtgtttatagttttctctgatggtagtttgtatctctgtgggatcagtggtgatatcccctttatcatttttttattgtgtctatttgattcttctctctttcttctttattagtcttgctagctgtctatcaattttgttgatcttttcaaaaaaccagctcctggattcattgattttttgaagggttttttgtgtctctatctccttcagttctgctctgatcttagttatttcttgccttctgctagcttttgaatgtgtttgctcttgcttctctagttcttttaattgtgatgttagggtgtcaattttagatcttttctgctttctcttgtgagcatttagtgctataaatttccctctgcacactgctttaaatgtgtcccagagattctggtatgttgtgtctttgttctcactggtttcaaagaacatctttatttctgccttcattttgttatgtacccagtagtcattcaggagcaggttgttcagtttccatgtagttgagtggttttaagtgagtttcttaatcctgagttttagtttgattgcattgtggtctgagagacagtttgttataatttctgttcttctacatttgctgaggagtgctttacttccaactatgtggtcaattttggaataagtgcaatgtgatgctgagaagaatgtatattctgttgatttggggtggagaattctgtatatgtctattaggtccgcttggtgcagagctgagttcaattcctggatatccttgttaactttctgtctcattggtcggtctaatgttgacagtggggtgttaaagtctcccattattattgtgtgggagtctaagtctctttgtaggtctctaagaacttgctttatgaatctgggtgctcttgtattgggtgcatatatatttaagatagttagctcttcttgttgaattgatccctttaccattacgtaatggccttctttgtctcttctgatctttgttggtttaaagtccgttttatcagagactaggattgcaaccactgctttcttttttgttttccatttgcttggtagatcttcctccatccttttattttgagcctatgtgtgtcttctgcatgtgagatgggtttcctgaatacagcacactgatgggtcttgactttttatccaatttgccagtctgtgtcttttaattggagcatttagcccatttacatttaaggttaatattgttatgtgtgaatctgatcctgtcattatgatgttagctggttattttgctcgttaattgatgcagtttcttcctagcctcgacggtctttacaatttggcatgtttttgcagtggctggtaccagttgttcctttccatgtttagtgcttccttcgggagctcttttagggcaggcctggtgatgacaaaatctctcagcatttacttgtctgtaaaggattttatttctccttcacttatgaagcttagtttggctggatatgaaattctgggttgaaaattctttcctttaagaatgttgaatattggcccccactctcttctggcttctagagtttctgctgagagatccactgttagtctgatgggcttccccttgtgggtaacttgacatttctctctggctgcgcttaacattttttccttcatttcaactttggtaaatctgacaattatgtgtcttggagttgctcttctcgaggagtatcttactggcattctctgtatttcctgaatttgaatgttggcctgcctttctaggttggggaagttctcctggataatatcctgcagagtgttttccaacttggttccattctccccgtcactttcaggtataccaatcagacgtagatttggtcttttcacatagtcccatatttcttggaggatttgttcatttctttttactcttttttctctaaatttctcttctcacttcatttcattcatttgatcttcaatcactgataccctttcttccagttgatcgaatcggctactgaagcttgtgcatgcatcatgtagttcttgtgccacagttttcagctacatcaagtcatttaaggtcttctctatactgtttattctagttagccaatctttttttcaaggtttttagcttctttgcaatgggtttgaacatcctcctttagctcagagaagtttgttattaccgatcttctggagccttcttctctcaactcgtcaaagtcgttctccgtccagctttgttctgttgctggcgaggagctgcgttcctttcgagaagaagaggcactctgatttttagaattttcagcttttctgctctggtttttccccatctttatggttttatctacctttggtcattgatgatggtgatgtacagatggggttttggtgtggatgacctttctgtttgtaagttttccttctaacagtcaggaccctcagctgcaggtctgttggagtttgctggaggtccactccagactctgtttgcctgggtatcaccagcagaagctgcagaactgcaaatattgcagaacggcaaatgttgctacctgattgttcctctggaagcttcactgggggggcacccgtcgttatgaggtgtcagttggcctctactgggaggtgcctcccaataaggctactcggggtcagggacccactagaggaggcagtctgtcggttctcagatctcaaactccgtgctgggggaaccactactgtcttcaaagttgtcagacagggacgtttaagtctgcagaagtttctgctgccttttgttcagctatgccctgcccctagtgttggtgtctacagaggcaggcaggcctccttgagctgtggtgggctccacccagttggagcttcctggccgctttgtttacctactcaagcctcagcaatggcgggcacccctcccccagcctcgctgctgccttgcagttggatctcagactgccatgctagcagtgagcaaggttccatgggtgtgggaccctccaagccaggcatgggatataatctcctagtgttctgtttgctaagaccgttggaaaagcacagtattaaggtgggagtgacctgattttccaggttctgtctgtcacggcttcccttggctaggaaacggaattccccaaccccctgtgcttcccaggtgaggtgatgcctcaccctgctttggctaatgctcaatgggctgcacctgctggcctgcacccattgtccaacaagccccagtgagatgaaccaggtacctcaattggaaatgcagaaatcccctgtcttctgcgttgctcatgctgggagctgtagactggagctgttcctattcggccatcttggaacctccttccttatccatctttagagcagaactgccatcaaagaaaacctgcccaaacccagtaagcgctgttaaaatagttaaagttattttattttattttatttttgcttgggtttctttaatattttgaatgaatacatagaccatagaaacacttaaaacctcatctctttcccgtttacttctctctcatcacagactgctcctccaacactcctgcacattctgcaaagccttcttctagtcctagcccccacatcgcctgtctctacctccctcccactttctccttattctatatcttgcaatctgcaaagatttcaaagaagtctttggaaatgtttgaaaagaagatttccagtctggtgaggcaagaagaggctttctgaagactgagaaaggagaagaaatgatgccagcaaagtgaggattgttttagaggccaggagttggggaaaggttggaagggctcttccattaatgtttttgttcctgtcacagtggactcaaaagccaggctgatcttctaaataagtcatacatgcaaagaggcttagcagagagcaaggacccttgtaccaggaagtagacggcaaccaaatgaaagaagaaggttctgatcagtgggtgaaagatactgcccagagaaattccctgacctgcagagaatgggtgaagcagcttgtacaggttctagtggtctctagcacaggggaaaggagccactaaagtgctaatgaggcctggacatcattggaagaaggtatagagtgagaagaaaacaagagtcaggacagatgcttatggagcaagtggaaaaaaagagtcaatgaaagattctgatgagaaactgtcaaggatgtggacgaggaccaggagtgtgtggtgtcctggaaattaggaagtattttttaaagagacagtatcaaatatttcataaaggtcaagtttgataaggaatggaaagtatccattgggcgtggcaattgagaagttactggtgaccttaacaaaagcatctttagtggaatggtgggagcaaaaggcagtttgctcattaagagtgaaacatgacaagctccagacatgaggacaagtctcctgagcagcctgtctgaggagtggcacaggacaatagctagaggagtttatcccaccctccctccctccctccctctgtctgtgtctccttccttctttctcttccttctctctacattcataataggcaagacatatacttttttttttgtatgagatggagtcttgctctgttgaccaggctggagtgcagtggcgtgatctccgctcactgcaacctctgcctcccggttcaagcaattctcctgcctcagccttccgagtagctgggattacaggcatgtgccaccatgcccagctaatttcttgtacttttagtagaaatggggttttgccatgttggccaggctggtctcaaacccctgacctcaagttatttgcctgcctcggcctcccaaagtgttgggattacaggcgtgagccaccacgcccagcaacatatacttttttaaaggctgttaagtaggatcttgtgatgaagagtctgaaagtccagaatggaaatggcacagatggaggcattgaccttgaataagagaagaaggaaaggaatatctgttcttctgaggatggagggcatggattaagggaaaggtgtacataggaaggttttgtgagaaagcaggaggtgatcagtcagcaagttgagggagtttgtctgttagcctccaacctccaagttctctgcaagggagctagcaagatcatcctctgagagcaaaaattaggaggcaaggacaggctcaggggacatagagaggtttggaataatgacagtagagaatgggagagagggacaaaataaatggcacagagggctcacatgtgtgggaccacatgtttgtgaaaccaagtatatttgaaactcataatacattttttccctgctgcatctgaatgaggtgtagagatactcatgtgagatgtgctcaggggtggcaggtggaggtagatgaggtgttcagtaagtatctgctcccccactaggcagtgcaggttggtagtacagaaatatgcaactgtgactttccagtgagaagaaatatttccatttgatgaagttaatatcaaggatatgaaggtcttctaaaattgttgatttcaggctgagcacagtggctcatgcttgtaatcccagcactttaggagaccaaggcaggagaattgcttgagcccaggagttcaaaaccaacctgggcaacacagtgagaccctatctctataaaaaataaaaataaaaaaattagctgggtgtgatggcatgtgcctgtagtcataactactcaggtgggaggatcacttgagcccaggagtttgtggttacagcgaaccatgattgtgccactgcactccaacctggatgacagagtaagaccccaatctctaaataaatacataaaaataaaaatatataattgttgatttcaagtttgggaaggtaaacagcaaaatatcaggtggtgctacttggttattggacctgggattgtgactgcccttatcttgagaacacaacagaagtaattaacttccttcctgctctacccaagtcaagggagacaaaagaatttccaaaagatccaatcttgactttgcagataaccttcaaaggaagtaataggacagtaaattttgggaacatgctcatgaagtgtccagcacatgagatcatttattacaataattgcatgaaagcagaaatacctttttcttagaaaagagatctgaattcagataaggcaggagcaagagtaagagaacaagagcctgaatgaaacagtttgtcctcttttgcctggttgagaaagtaaatcaatcctcttgcaggtaggtgtcaaagcaggaaaaggatatgaggaatattggaaataacgtccaaggatatgtggagacggtcatggatatgctacttcttgaaattgatgtttgtgtaagatttcagaaagaaacccacatctgagccagagcttctcttgtgggattgattttgatttgaactggtagcacagctcccgtgtgagtgtgagtggatgaggtagtgcaggcctgttaggaactgggctgcacagcaggaggcgagcaagcaaagcttcatttgtatttacagccgctccccatcacttgcgttactacctgagctctgtctgtggtcagatcagcagtggcattagattctcacaggatcgcaaaccctattgtgaactgcacatgcaatgccatcagatcttggttgggtgctccttatgagatgctaaggcctgatgatctgaggtggagctgaagcagtgatgctagcactggggagtggctgctaattcagactaacattagcgagaggtttgactgaacagagaccataataaatcaattgcttgcagactcatatcaaaaccctatcagtaggtagtaagtgacaattaaactgcatctggtggcgggctttaagtacgaatctgacacttattttagtctgcatgtggtctattattttatttgccacttccatctgtgcctctttcctgcactgaacacttgtctcagtcacagttttggtaagtccacaagctaaccctagccaaaatcagaaaaaaaaaacaaatgccactggagagtttctttgaaaaggggaaagacccagtgatgagacagaagaagactctaagactgccaacaaaaagaaagctgcatttaaaagaaaatactgagtcctacttaaattacgagttcattgcaacaggtgattcacattctccaagcccacttatatagtacgtggtgaccagatatccaatgaagccatgaagccttcaaaactgctttgccatatgaagacctgcaccctgcctttggagtttttcaaaagaaaaacaatgtgaacatgaagaatagaagcaattattgaaggccaacacttcatcaaatgtgtctgcactgagagcatcattcttagtagctaaccacatttctaaacctaagaatcccattactattggtgaagagttgatcctgcctgctgctaaggacatttgttgtgaacttttaggagaggctgcggttcacaaggtggcacatattccccttttggctaggatcataacaggcaaattgatgaaataacagaggatattgaggcacaattgttagagaggattaatgagtaactgtggttcacaatccaggttgacgagtctaccaatgttgacgataaggcaacaatgcttgttttgtgtgatatatttttcaggaggatgggcatgagaatgtgttatgtgaacttttgttgccaaacaacaccacagctacagaactattcaagccgttgaatgatcacatatcagaaaaactgaattggtcattttgtgtcaatatgtgcatggacagagttgctaccatgactggatggctctctggtttcactgcttagaccaaagaggtagcttctgcatgtaagtctatggactgtgtcatctatagagatatgctggttagccgaaaaatgtcatctgaacttaacaacgctttgcagaatgtgattaaaattatcaaccacattaaagtatatgcccttaactcacatctgtttgctcagctgcatgaggagatggacacagaacacacatgtcttctcttatacacagaagtgagatagctttctaaaggtagatcactggccagagtttttgagttactagagcggcaccagagatttcttttagaaaaacagtcaccactggctgcacatttcagtgacacagaatgggtcacaaaatttgcttacttgtgcaacatattcaacctgctcaacagactcaatctgtcactttaggggagaatgacaactgtgttcaagtaggcaaataaagtggctgccttcaaagccaaaatggaattatgtgagtgacgagtgaacattggaatttctgacatgtttcaaacattagcagagattttgaaagagactaagcgagggcctggtgcatgatcacttatcttagctttcaaaagagtttaagcattacttccaaccacaaaagacccccaaactgggaaggaatgggtctgtgaaccatttccaaataagccagatgggtcaactggttgagatcacaaatgacagtgaccttaaaagtatgtttgagacaacttcaaatcacgataccttctatattaaagtcaaggcagaatatcctaagattgatacaagcgcatcgaaaagcttgctgccatttccaacatcctgtctttgtgaagcagggctttctgcagtgacagcaaccaaaatgagattatgaagtagattggacataagcaacacacttcaggtgtcactgtctcccatcacccccagataggaccgtctagttggaggaaaacaagtcagggctcccactgattctacattattgggagttgtataattacctaatcatatattacaatgtaataataatagacataaagtgcacaaaaatgtaatgtgcttgaatcatctcgaaaccatcccctactcctggtccatggaaaaattgtcttccacgaaactggccgcttgtaccaaaaagttggggacaactgatgtagtacaaaggggaaagaaatagctaacatttgttgagcccctactaagtgctaacaactcacttttccccatttgattaacataacactgtgccataaatatgacttcctacattttataggggaaagaatctggggctcagagtagtgtaagaacttgcccaactttacatgcacagaccgtcctgtgcatctcaggtatggaccatggagacaggcagagcaggcctgggatctggctctgccactaaccagccctgtgacttgggaaaccagtgaaaagtagtatccaggatggtcagttttatacgtcagcttggctaagctactgtctccaattactcaatcacagatgctattccaggcatcgctgtcctcaatcagagaacgtgttttgtagatgttgttaaagtccataatcaattgcctttaagtaaggaaggttattctggataatctgggtaggcctgattcaatcagttaaaaggacttgaaagcagggctaaggcttccctgaagaagaaagtccatctgtggaccagcttccctgagtgcctcaaattccagcctgcctttcttaatggcctgccctatggattttggacttccttaaccaaccccacaatcaaataaacctacacataaaaattctgaatatctcttgctggtttggtttctcaggtggaactctgatacagtgcctccctcatgtgtggtgaagattaactgaagtcatggtattaccagatgggaagcatttgacatggtgctaggaacattcaaacaggtttgaaacatggtcattattactgtgaggacttggcaaacaccaggttaagcctacatctaattggctctcaagcctgacactctacccagcacagacttggtcaatagctatagtcaccagttctatcacaaattcagtgggacctaccacaaactcaatgtgaccttgagctggctgcaaactcgatgggccctggcttccttcctgtaaagtgaggggattgtgtaccaaatgatttttgtataaacttccagctctgatgttgtctgggtcagttttgacctaattgatcagattgttattaggccatgtctacttcctccagccaccagacaagatttgttccattactggtacattcagagctcttccttcacaaatggccttctaattactgggtggtttatggcccaagaaaatgcaaactgagtttaatattaacttgagcagagcattcatgtcaatttagttctagagctcccactctgccccagacgatgggccatacaatatattaaaaaagcattaaatctggtccctgcccttaaggagcacagggagacctccaaaaatcaggtcctactgtgagggagtaggtaattaagactaagcactataagagttgatagtaaggaggcagtgagatcattctgggctggaatgatcagaaaagcttagcagaagagataggaatttagataggtgacatgtgtatgtaagaggtaagaaggaagttaaatcttccacttttccagtgcatcatgcatctcaaaatccaatgggtatgattttgggagctctttacattactgtttgtctttgctggcagagaatcaagaagcaaatgccatgagatttcaggctttctctcctattctccctgacatcctcattaaccaccattgttctgcacaaagatgagcatgcacagtaagttcactacatcacacacatttatacacacgtatctgcagatgccctgacagtcccatcatttgtgcatctggggactcccatagtagaataagtttcattaaggtgggtgggtcctaattaatgtttctcttgtctactgcgtatatcttaccttccacaaagcaggccttcaataaatatttatggaataaataaatgaaagtataatcactctccagactatgggagacacaaagggaaagtttccctatctgaaactttcaatggcattaaaaccctaataacggtgagtcttacactttgaagattctttgatttttaatgtcagcccaatctaactccctgctcccacttttaaaaaaatattgcttacatcctaccatcagggcttcttattcaaagagccattgatagaaccacagccaaaaacttgctggagctgaacaacaacaacaacaaaaaaaaaaacagtgggtgtaggtagaagaaaagttatgcttgaatgacaagcaaacaccagaaggattaattttacaagctcacctttgcgatcagataaaggcagcctgactttttaaagacaatatttatttttatcagtttaataaacagctcttagcaacattgatagtcatccttcatggacaaaaacaaagaaggcttattaacttaaatttaaattgttcactaatcttacttcagtttgctgcctctttcatgatgatattttgctaaatgagtcttaaaaaaaaacttggtgatgtgtgtaaacaagccagaaattctcaagactgtggtctaatgaaagcaaataaatagagtttacaaaataattcagaacactgaaagagacagtgtttgggatgtaaatatagatttctacaaacaagcagctaataatcataagtcaacattcataaggatcactctaaagactggaagtgaaaaaaatatcctctggattcagaagtcttctagccaattgcaaaataattctgtccatggagttctaatttgatgattattaacgtttatattccaacagatttctgaaaacatgtattgagcaccagctatgtgcaatgagtagttctcaaaacactgcatccaatcaatgcaaccagtcattacttatttgccaaggactgtactatgagtagtatggataatgtaatgtacatatgctgtttttgcctgatcagcctctatgaattcccccttcttctgttaacaatgcctgaattttcctttggccaggcactctactttattccacacgctgtgctcaatacgactgacctcaccctcctagctccaagggtcttcaagtgatcatgacttgctcagtcctattttggcctcagtgattgatttagagatgggcataaatacagattgaaatagagatgggtttggttatataagcgaggtcaataagactaaattcagtggcgggggatgttgctcaaaaaccttgggcaagagaagctctcctcctgtagcttgcaaactgtgaggctgataagcaagaccctggttaggaagagggtggagagcaagtctgactttgtgatggtgctgcatatcttccactttccccaggtctaccctctcttcctgtctctcggctgactacataaactcttctctggcttccaaatgggagtgctgacggaaaaattgggttatttatttccctctctgtggggcctcctgggactggctgtgtctccctactgaaggctgcagctctctcagggaactgtctccacacagctcttggtcttcaggttccagcagccactcttgctttgctccttcagggttagcgacaacagtgtcccactattacttaatctggtacttcaatatccctcgaatttcctaagccccaccctcatctttgtaagtagtcttctttttaaaacccaactggacggagccatctatttcctgccataatcccaacagatacaatgccagcatttgtgttctggatctagacatgcctaaagatagtgacactcttggactcttttcagtttctcaagccagtaaatgccctttttccttaaccctgtttggtttttctgttgcttacaacagagagtcctaatagagtctgctagactatcgagatcacatagactcatacaagacacttttttaaagggagcgggccttgttatggaccgaattgggtaccccccaaaattcatatgtggaagtcctaaccccaaatacactagaatatgactgtattcggagacaggatatttaaaggggtaagttaaaatgaggccttatggtgagtcctaattcaatatgactggtgcccttataaggagaagtggtttggacacagacatgttcagagggaagaccatgtgaaaacacaggaagaaggcagctgtctatgagccaggacagagacattagaagaaatcaatcctgttgatccctttgtctgagacttccagcctccagaactgtgaaaaagttaacttctattgtttaagccacctggtctgtagtacctttttttttttcttttttggggcagcccaggcagattcatctaggcacctatggactagaactgggggagacacttgtagaggccagcggctgcctccagcaatctgagccagcatggcctcctagctgtggctgatatgtctctccctacattgggtccatttgccttggctactcactggcccatcttctgtatttcccagtccgaagtaactgaaactaactgacttggttaactactgtcattaccactgggtaagacctttgcacaggcccacctcatgggtttctggcaagcaatgcataagctgcctttgggtcctatgcccacatctggttccaccagtggctgccatgtgtcagggacagttccctgatggtcccctgtgtagaacatggtgggggtgctcagcttcagtgtgaaagagatgacagacacaggtggcatttgaaaagtccaacattgggtcccctgagcgagtggcattgctaattacatgaaaacatcaattccaacacaccctgctcagatttggcctcagtttttactgtgcagccaattgctcattccagtcactcacaaggccactctcttgaccttgagttttgtgagattccccagaatccttaccccagccacttggctggcttgagttagtttgatgtgagttgatgttactttgaaacgaaaaaggcttgattaaaatagtttccaaagaaaactgcaatttggtccaggaaagagggatctgtttatgagtaaacatgagtgttacagattatttacagattattcctgacaatgccatcaactgtatgactgtgcgagtagtcaactcttcatctaaatgaaatggaaggaaaaacaaacagtgttttccacatcccaggaaggctgccagaggttctgaagaaggtatctcatgggtcttccactcctttctcaggcaggaattcttttcttgtagttccttgatcccgaaaaggaaaattatttcaagtttcctgaattgatcaattgattaattgatgttttttactgctctactgactttgctttctttactttgttttttctttactcacttcctgacacctcagaagacagaggcatctcttagtacaggatttaagtggatgcaggatttcagtttcatggtccgtggcacagataccatgtgttcgaaggtttaattcatttctgtctttggtcatttccccttttggggagtttgtgggtagtacatggtgttggcctgcggtggaacatgagcttatagggtatttaggctttcaagcctgctctgctgcccagtgacccatccagcagaatgtttgcccagtgggatttcacaagtgccacaaaacagtgactgcttccccttttggcacaggatgttgatttttgttaacctatctctgttccacccttatatgtttagcgggggtgctgttcagcaaatgttctcttcagcaaatgttctctctgtctcttttcctcacctatattaggagtatcataatctctccattgatgttggggctggtcatggagttgttctggccaataaatgtgagcagaggctttgaatgtgcctgcaccctttgccttgacttctcagtcttttgtgttccttcctactctaccattaagaagagcttgccccaggtagccactgttcctccaatgtgggtcccaaaatgagagactcatgggacagacctgagcctcacccacagcacagagcagggctgctgtagctgaccagccaacctgtgggcaagaagtaaatgttttggtactgcaaaccactgagaatttttttttttttttttttttgagacaaggtctcactctgttgcccaggctgtattgcagtggtgctatcacagctcactgcagccttgagcacctgggatcaaacaatcctcccacctcagtcttccaagtagctgggactacaggcatgcgccaccactcccagctaaacccagaaattgtgcaacattatcacaacaaaagctgattaatacagctggtaaagtttcccaaggaagggaggaatgattctatttgggatttaaaactgaggaagtaggtaggaaagaaagttgaagggcttttttggataaggaggcactctatatccaaaatcagattagagtattccaaacaccacacccctgagagatgctagaaatgtttccaaatgactagagtccaataaagtattctttatgcagtgttttatgtcaaactttaacaattagtgatactattaaaactcaggcaatgatatgcagaaaatggaatctggtccccttccttatactatatacaaaaattaactcaagatggattaaaaacttaaaaactacaaaaaaacaaacaaacaaacagaagaaaatctaggcaataccattcaggacatagacacaggcaaagatttcatgacgaaaatgtcaaaagcaattacatcaaaagcaaaaaaattgacaaatgggatctaattaaatcaaagagcttctgcacagcgaaagaaactatcatcagagtgaacagacaacctacagagtgggagaacatttttgcaatctttccatctgacaaagatctaatatccaggatctacaaggaacttaaacaaatttacaagaaaaaacaaccccattaaaaagtgggcaaaggacatgaacagtcacttctcaaaagaagacatacatgtggccaaaaaaaatatgaaaaaaagctcaacatcacggatcatttgataaatgcagatcaaacccacaatgagataccatctcatgacagtcagaatggagatcattaaaaatcccaagaaacaatagatgctggcaaggttgcagagaaaaagggatgtttttacactgttggtggggatgtaaattagttcaaccattgtggacaacagtgtggcgattcctcaaagacttagaggcagaaataccatttgacccagccatcccattactgggtatctactcaaaggaatataagttattcttttataaagatacatgcatacatatgttcattgtggcactattcacaatagcaaagacatggaatcaacctagatgcccatcagtgatagtctggataaagaaaatgtggtatatatacaccaatggaatactatgcagccataaaaagaaacgagatcatgtcctttgcaggcacatggatggagttggaagccattatcctcagcaaagtaacacaggaacagaaaaccaaacactgcatgtgctcatttataagtgggtgctgaatgaagagaacacatggacacatggcagggaacaacacacactggggcctgttgatggggggtcggggggagggaaagcatcagacagaatagctaatggatgttgggcttaatacctgggtgatgggatcatctgtgcagcaaaccaccatggcacacgtttacctatgtaacaaacctgcacatcctgcacatgtacccctgaacttaaaagttgaagaaaaaaaaacacctaggcaaaaattacagtcccagacaaggttctataataaagaaatactgggctgggcacggcggctcatgtctgtaattccagcactttgggaggcccaggcaggtggatcaagaggtccaggagttcaagatcagcctggccaacatagtgaaaccccgtctctactaaaaatacaaaaaaatcagccaggcgtggtggcgcatgcctgtaatcctagctactcgggaggttgaggcagaagaattgcttgaacccaggaggcagaggttgcagtgagccaagattgcaccattgcactccagcccagggggacagtgcaagacttcacctcaaaacaaaacaaaacaaagcaaaacaacaacaaaaaaacaaaaacaaaaacaaaaaaaaacaagaaataccttgggaatcagatagagatatagaatcctaataaatgttagaatcttatgttctagaatgacctatgttagatcatttttatgcagaatacacaagtattaaagacacactttcaactgtgtttttattataaataccttgaagataattgttaaaacagacatctgagacaaaaattaacttttatatttatagaacaagattgaaaagttacttgttcattttttgaaccataagtttgcacctgttaagatgaatatagatataattaaaatccttattataacaaagttattagagtatgccaataatggattaactaataataacattgatatttatttcactctgatacaaactatatatttaatttcatgttaagcaacatttgatgcaacaaaatacctacataatataataatacagacttacccatggagtttgttttcataggagctgatctatgttcaatgactgcaaaccacttgaacaagttttacttgtgtttctaagagacaggttttaaataacatttattttttatttttttcctggcattaactggggacaatcttgccacaattttcctttacaaaactacaaggaaggaacactcaatatgatgttcatgtaaaatataattacctacttttcttcctttacaacatgtactccagagacaggatgacaagccagaggcacataacgcactgtctgtcattaataacaagtacatgcttttgaaatgatttcacagtaatgcttattcaaaatatcatttatttgcttttttgactattttatgaacattatagcccctcaacaagtattgcctgtttcaaagcaatgatataaataggaatttattgaattaaaaagttcaccaggtacaattataaatattataaattttgacatgtacaaagtgtcatctctgcgcatgactctcaaggtggtcatgctggcaggctcatggtgcctaagtcaggattgcggagagctgggagaagcagttctccaccttgccctaaagaagtgtcactcatccttcgaggctcttctcaaagaccacgtgttaaatgaagtctttctagtgtctcctgagaagacatgatcttttccttctttaaatccatagagcatctattttttctctataataatgctaataatagtaaaaatcacactgccttgtgattgagaacttccactatgcttcaaccatgctaaagtctacagccggtgtctttcttctttgcagcactcctgcaaagaaggtatcattctttcctttttatagatgaaaaaattgggcaaggattggaattcaggctataactgcaaaaatggtagtcttaacaatgctgttttcacacttgatttgcagttaagttatgtgtgacttttgtctccctgctctgtgggctagttcttccagcaggtactactgtgaccctttctatcccatgggagtgttttgcatagtaagtagtcaacaaaaataaatactgtatttctttctttcttttttttttttttttagacagggttttgctgtgttgctcaggctggagtgcagtgggggcaatcatagctcattgtaacctcaaactcctgggctcaagtgatcctccttacctcagtctcccaactagctaggactacaggtgcatgccaccatgctcagataattttttaaaatttttgtaaagatgcggtctctctctgttgtctgggctgatctccaactcctggacttggccacccacagtgctgggactacaggcctggctcttgtgtctgcccagtactgtattccatatattccaaacagcagcccctttttctacatttaagcgtctcttaaattggaacatatgttcaattgatgcctcgatttatatagtagtcttttcttgttttcttttcctaaaaagctgttattagttcttagttgtctcctaaccaatttaatcttagaatcaaggagtagttatgcaaataaactgggtagaactcaacctaatgagagactgctcagagaaaagatcaaggtagatttctttaggtttcttaatgctataagagtattaagcacagggggaattcagaggataatccatctgaaaatgaaagggaaggtgatcagaggtggcttagtaaaaatgaagagtcagtggtttcaagggaacatacagataacggcaagatctcatgaggagaggacacttccaaacgcttgctttcctgtgattctaacaccaaggtaagccagaaacacagctggagggtaactggagggattctgagtccatctgaccctgaactacacataatccattccccgatatcctggcaatagcattataatgagaaagatcacattaaaatgctgcaaacagtctttgaggcaaggacatgggtagtctgtcttctagctgtagctgtagctgtagcttgaagaagtcctgggagagtttggtagtgatgccatgaagggaaatgattaagtataaaatgattaacaagcctgtgttcttttgtctcctccttgtcttgctttagacatcggccttatggcttgaaaggaaatgtagtagatcattttttttttccattagcttagcttggaagagaagagagaactttaagtagctgtgttggggagagcggcttggggttcagggaggtttcatgtttttataaatagaaaagacttgagaatgtttttatgctgagaagggagagcgagaaatgagagagagagagagagagacagagacagagactgtggtagaaattagctaaagggaataattgaaggagcaagttctcaaaagtagcagtattaaatgggggctcaggtcacatagagaggtattatccttggtctgagagagaatgcctttccactgagctgcaggaaggtgttaagagtgggcacagatgtggatgtatttagagtagggtagggttgaaattgaaaaagggaatagttaatggtttctgagttttttgcggaggagatgaggctcaccactaagaatgagagggacacaaatgaaaggcttccagagattggtgagagtttgcaatgagtgtgcagtggacagtgagagaactgccctgtgctgagggcataattgagattggagactgtcttggtccatttatgctactatagcaaaggaccacaggctgggtcatttatatataacaggattttgtttctcacagtgctggaagctgggaagtctaagactaaggcactggccttggtgaaggctgctctgcttccaaggtggtgccttatggccacatcctctggaagggtcaaacgctgtgtcctcacatgacagaaaagcaaaagagcaaaaggggctagtttcttccagcccttttataaggcactaatccattcatgagtgatatggtttggctgtgtccccactcaaatttcatcttgaattgtaatccccataatcctcacatgttgtgggagggatccggtgggaagtgattggattatggaggtggtttcccttatgctgttgttgtgataatgagtgtgtctcatgagatctgatggttttataagcgtccggcatttcccctgctcccactcgctccgttctgccacactgggaagaaggtgcctgctcctcctttgccttctgccatgattgtaagtttcctgaggcctccccagcaatgcagaaccatgaatcaattaaacctctttctttataaattacccagtcttgggtctttcttcatagcagcgtgaagacaaactaatacaatgagtgatttagtcactctgcaaaaggccccacctctcagtactaccacaatgaagattaagtttcaacatatgaattttgtagaactctcaggccacagcagagaccacttgtacttggcgtggtctgtatggcattatgtgtttctgcaattgtgactatttgggggtaaagaaaaaggagaagagacagatttctatcatgggtggagaaagtagaaaagttttctgagacagagactcactgggaaagttagaccaatattagcagcagtcttttggaatgtaggtcttcacagtgtgtctcatgtttggtttaaagcacttccaaaatatcagacagttatgtctgaatggaatcacacaaatgtatcacgaagtcaaatataattttttttttttttagtttctaaaatgtgtgggttcttgttcctatatataactttctgttcttcagagaagagccacatagaaagggcaggcattggtcttatagggatcaccttataggatctaaaccaatacatgccttacactttacttacaatacagcataaaatgcctctgctaatgacttgagcattgtgtttcttggatctgtgatcacttattattttaacctttcaaagccaatagttttagagcattcaactcaaacgacttttattggcctggaaatgttttattgcagtttggctgacattttcttttaataatgtcattagcactccttaaaaatgaattctgttggggtatatagtactacctttgttttgagaaaatgttatgattttgtttgtacatgaggtgggtcccatagctacaaacattagcaatatgtttctgattcaacagaaagatctttctgattctacaggcacgcttccatttctattaagcataaatagtttggttggtaaaaagacccgaatttagatgtactttttcagaattaagttgaattctcaacatcttttaagagggagtccagcttctgagtcactaggcttaattaaaatctctagcacttagtcagtttatatgccttacctattttgtaggtttagctctcgtaactgttgttatgctgacactggtttccagtgggtcactgaaatcaaattaatgcaggcctctgaaaagtcagacatcaattgtgttcattcattaagattcccatattttaaaaggtacaaaataaggaaaagtgattctgtttaaccttgaagtatcctgaatggatggacatagactacgagcattttagtggaaaaataaaaattatttgtaagaaaaatcctaaagaacaaaaaccaaaagcaaaataagaacaaaattcctttctataccaattcttttctgaatacgtaaagactcaaggtccaaactccatttcctaggcctttggaaatgcttttagagcgtactcaatactgtacattctgtactactatcgagagcactcaatttcttgtgcattcaatttcttggtccaagtgcggtagttctcaaagtctggtgtccaccatcaggcctaggaacctgctaaaagtgtcaagtcttgagcctcactctagacatcccaaactagaaacttgatgggtggggcctgcaatttgtgttttaacaagtcctcagccgggcgcagtggctcacttctgtaatcccagcactttgggaggccgaggcgggtggatcacgaggtcaggagttcaagaccagcctggccaaaatggtgaaactccatctctactaaaattacaaaaaattagctgggcgtggtggggggggtgcctgtaagcccagctactaaggaagctgaggcagagaattgcttgaacccgggagacagaggttgcagtgagctgagatcgtgccactgcactccagcctgggcaacagagtgagactccatctcagaaaacaaaacaaacaaacaaacaaaaaacaaaaacaagtcctccaggcactctttggtttgctctaaagtttgggaacttctggcctagagcattgttctcaagtatttgtgtacacctacaccacaagctcctggagaagcttgacttaacatgagtctctcactcaggccgtgagatttggaggcagtaaatgcaggaagctgtgtgggaatctgtatatatatatatataaagtaggtgattctggtgcaggtggtctgtagaacacaatttgagaaattctgccttgaagtggaatttaagtgttgacaaaattagcatttccccccacaaaatcctcctccataactaagcaaaaacctttgaactctgacttacaaatatctatagctttcacttagcctgcagagtgcctgcttctgaagagctatgcaggcttccctcatcactgccataggggactgaagcttctgtgtgctccaggtgtgaggctttgcctgcctctgctacaggtgtgcacctgtttcaacacagggatgtatgctcaaaggatgcggcataacccacacctccacagaatgtacagtattgagtatgctcagccaagacaaaacacaaggagagatgtcatttttatttgccctgagatgatagctggaggaagactgctttgagcaaagaggtttgatccctgcatatcctgccagaggaataccctgttctaagcaaggtgacctttcaagcaagttttgagaattactgatttagtatgcaaggtatgcataaatatatctaactgtgatttggggtcagacacacactgcatatcttttttccattgaaccttttatagatcagaggtgaaaaaagagattttttaatgcagaaaggtgaagtttgtgatggcaaaaaaagggattacttgtgattttattaaatcagtcatatgttttcttcaaggtattgggaccaaattcatgcattaataacattactttgttttcattgtatttgtttttattgtcatctgacatttaaggcaattaatactgtatttctacttatgttaataataaaaaatacctttaaataattttattccagtaaaatgtatgaattaatttaaaggaaaatgttaagtaaatattagtgcagatggcaatattctgaagatgccacatgaataatcaaagtgtgggaaaccctgacattattttcatgagttcagcataatccattttaccacttttccaatgctgagctttatatttgttttctgttataaacagtgcttcaaaaaacctcttgtagctaaatatttttcatatccataatggttctcttaggagaattcacagatgtggaattgttggaagaaagggcaataattatattattttaaagtttaaaattagtgtccattaaccatttccctaagattttatgaagacatttaggaagttagtaaagcagtatttatgacctacgggaatactttcttccttgttactcaaagggttgcttaaggcagtggccttcaagtgtgttctgggaccaaatgacaatttctccccaaccagcaaagccctgtggtggggaaaaggcttggtggaagatctggtttgtagttaatgttaagtaacctttccacttaattagctttgtgatctcgtgcaagacacaacttctctaagctataattttctcatccagaaaattatactgaaaataatactttgtttatctcaccaagttgtgaagattaaatagagtgatatgtgtgaaaatagcttgtaaatgaagcatgatgtaaaatgttattggtattatgaaagcccaatatatgttctcctcttgagagattcttaaagcacaattctctgacttcacagatacgtcgtctgatgcaatacagatactttttagtatcatatggggttagcgtctagaaaaagtgaagggtatgaaataatgaagaatgaaattccagtgagactctatttctttacagattgctcctccctgtcccttactcaacactagaacctggtatagcgctgtaatcaatactctgtgtgtgtgtgtgtgtgtgtgtgtgtgtgtgtgtgtgtgtgtgtgtgtgtgtgttttagacaaggtttcattctgccgtccaggctggagtgcagtggtgcaatctcaactcattgcagcttcgatatcttgggtttaagcgatcatcccctgtcagcctcctgagtagttagaactacaggcacgcacaactacgcccagctaatttttgtattttttgtagagatagggtctcactatatagctcgggctggtctcaaactcctgggctcaagtgatcctcccacctcagcctcccaaagtgctgggattacaggcatgagccatctcgccctgccaacactaactctggactttcatttgagctttgctgcttatcatcaaatctcaatgaaaacattagttgctcagaagtcaccttacttgttaatctagaaatggtctggtggctcaggatttctgagtctgggctgggaccagagccagctactcctggcacctgtgttgctggggaaacatgatcttcactgagactctgttctcttcccataatgtacattatccaaatggtctcttgttgtgggtggattcgggtaaaaattgtcttcaccacgtggggcctcagtttcctcatctgcaaaaaaaaaggagttagatgagaatctggtcactagccggtcttctaggtctctccccacagttaagatcccataattctgcaggtcagtttatgacctgcaaagggattcttccctgagggccctcacaaggttttgaatggcagagcaaatggaaatgggggaatgtccttcccaacctcccaccatgggcaggagaggaagtgttgtccaagagggcctcagctggaccatctggaggagtgaggattccactctgtgacatcacaatatccagcccaggtttgaccttgacaactgggaaggagaaataacaggaggcgcagttactgatatagccaaggtgggacactactggagggagctagaagggatcagccagccatgcctccagttcaggtacttggcattgctaagctcagaacaggacttgccagtgtctagatgaaaaagaggagagatctcaaggtgagtgtgtctccaagcttaagaagaatagtataagcacagacggcttgtgccccagctgcgttagggtaatgtaaggttccacacgagcagaagcagagctgggcgcatcttgccaacagccaggctgcttgccatgaagccggacggtgaggacatttccgaggctgtagtccacttgtgctgctggtgatatatttctatttagaggtttttttctttcaatagctcctccccggatgacagggtagagtaaacaaaaataagttaactaaggaagtattttaatagaagccagtacaaaaacaaacaaaagtaataaaaggtgcaaagttgtattatgggttagcaagcaagactgactctaaggtcaagttttgaaagttcaaatcttgaaaggcaaaaggatacccctataaagagtaaaagagaagggccttttggttgagaagtaagtaaaacagctctgctggaacatataccggaccccccaccccgcccccagcaactcctgccagtgaaatcattgctggggatgcggacagttctgttttctttaccttgccttggggttttggcttctacaatacttgtttcttcctggagtcttggggccctgagaggctctgagtgacggcaaagaactgttctgtttaccagtggggcggagcatggggccagcgccaggccctgactcatccccatgtggactcccttgggtcttagcacactgcgaccccggagttggagcacaggacagctcaggcaggcacgctgagctctgcctgcaaggtcagagttgatggcgatgctccctcagtgggagtaagagtccatgttctgacaggtaggtcagttacccacaggggaccccaacagccatcgacaagaagaggaggagatggattctctatccacaggacacaactctaactctccttggcctccaacacatcacgaataaatatatcacagcagtaaggtcaatactctcacactctatgaaagtagtaatagtccccaaagcatgtaaaactgagagatccagataaaagcaaaatatacttgcacataaacttcatagcacacattcaacttctgtacagaagtcactgtgattttcacaattaggttatgatctaatcataaccacttaagacttgaacattaaaatctcattggcccagtttttaggcttccttcattgatagccattgaaaactaagtttaagctgaacctcagataatacccacaaaacacagaatgtcctaactcatctccatttgcatttgttgactgtaacgttccctgacccttgtgttagtcacatgctgctgcagcctgtcgcatactgcagaattttagagtcggaggggaactagaagatcatccattccacagcttcgtttccaggagaaaccacacagagaagtgtctcagctaagggtatcaagctagttagtgctggggactaaagtttaagccccctcactcttagcctggtggcctctccaatacactctgccccacaatgaatgaatgtattggttcatatttgaactaactctttgattttctaagttagaatattctaaaaggaggaaatctcatttatcaccttggtgtggttattggtaaaagcagatattctcctagcctctgcacctccatacaagataagctttggtcaatgacaagaaaaagcactgaagaccccattcaaaacactgagataacagtgaaaataaaaccagggaaattgactagctactgtaaattgagggctgattagaagtaatcctttttttcttaaaaaaacatgtatacaatttaccagatttttactttataataaatatacggtcttcctgtggccttgtcttttcctgtttaggtagataatactttgtttatgaatgtgtgtgtgtatacccttgaatgtacagatgagtaaacactttatctggcaggtgtggggctggctattacatccatccgtggtatccgacctacacttacttacctaatatatcttctatatgagccttctgtgacttatcccatgaattaatattctatttggaattaacatgatagtgtaggaggagcctccttagacttgtccagggtttgacatacatgaagctatatatgtcttgcatccgtaattaatctgcaagtttgagcccaggcagtccctgggtgcaggtagtcagcgtttttccaattaaatttattgcaaatgtactaatatcagcccaaagatccaaattctgaaagaaaatgaaatgaaatgaagaatttttaaatataaatagagacctaacttttatagtcatcagcgccatcattaaccttagagatgtctggtaagtattttctaggccattagattgttttttagccaactaaaatgtgtacttcctgtaaggattttccatatgtttctggtattacatgcaggttgcctttaataaaagataattatgaagcaattaccaacaagaaggagcataagaaagagcattccatcatggcataggctttacacagttgttgtaataactttcagcttccttattaattttaaaagttgtgtaatatactgagtaattttacacacactacagtgtataactgcagaagaaagctaattgtgaaaaacagagggataaaagaagttttagtttcaggattctttttttttttttttttaatgttttttttttattattatactctaagttttagggtacatgtgcacattgtgcaggttagttacatatgtatacatgtgccacgctggtgcgctgcacccactaacgtgtcatctagcattaggtatatctcccaatgctatccctcccccctcccccgaccccaccacagtccccagagtgtgatattccccttcctgtgtccatgtgatctcattgttcaattcccacctatgagtgagaatatgcggtgtttggttttttgttcttgcgatagtttactgagaatgatggtttccaatttcatccatgtccctacaaaggacatgaactcatcattttttatggctgcatagtattccatggtgtatatgtgccacattttcttaatccagtctatcattgttggacatttgggttggttccaagtctttgctattgtgaatagtgcctcaataaacatacgtgtgcatgtgtctttatagcagcatgatttatagtcctttgggtatatacccagtaatgggatggctgggtcaaatggtatttctagttctagatccctgaggaatcgccacactgacttccacaatggttgaactagtttacagtcccaccaacagtgtaaaagtgttcctatttctccacatcctctccagcacctgttgtttcctgactttttaatgattgccattctaactggtgtgagatgatatctcatagtggttttgatttgcatttctctgatggccagtgatgatgagcatttcttcatgtgttttttggctgcataaatgtcttcttttgagaagtgtctgttcatgtccttcgcccactttttgatggggttgtttgtttttttcttgtaaatttgtttgagttcattgtagattctggatattagccctttgtcagatgagtaggttgcgaaaattttctcccatgttgtaggttgcctgttcactctgatggtagtttcttttgctgtgcagaagctctttagtttaattagatcccatttgtcaattttggcttttgttgccattgcttttggtgttttggacatgaagtccttgcccacgcctatgtcctgaatggtaatgcctaggttttcttctagggtttttatggttttaggtctaacgtttaaatctttaatccatcttgaattgatttttgtataaggtgtaaggaagggatccagtttcagctttctacatatggctagccagttttcccagcaccatttattaaataaggaatcctttccccattgcttgtttttctcaggtttgtcaaagatcagatagttgtagatatgcggcattatttctgagggctctgttctgttccattgatctatatctctgttttggtaccagtaccatgctgttttggttactgtagccttgtagtatagtttgaagtcaggtagtgtgatgcctccagctttgttcttttggcttaggattgacttggcgatgcgggctcttttttggttccatatgaactttagttttttccaatgctgtgaagaaagtcattggtagcttgatggggatggcattgaatctgtaaattaccttgggcagtatggccattttcacgatattgattcttcctacccatgagcatggaatgttcttccatttgtttgtgtcctcttttatttccttgagcagtggtttgtagttctccttgaagaggtccttcacatcccttataagttggattcctaggtattttattctctttgaagcaattgtgaatgggagttcactcatgatttggctctctgtttgtctgttgttggtgtataagaatgcttgtgatttttgtacattgattttgtatcctgagactttgctgaagttgcttatcagcttaaggagattttgggctgagacgatggggtttttgcggttttgaagtttcaaatctctccagtaaaatgaaacacaggtatgccaagcaaacttttgaaatgttttctcttgaattaccggagaagatgcagccttgacaagttttatttaagaggcttggaaggaaaaaaagcaaaaggaagctacctctctgaagatcctgagagagcagagtctcctcttgctgccgtcccctgaggcgccttggcaggcggccacactggatctccgacacgcgcaggacactgcctgtcatcccagcccagcccccatgcccactctcccaagaattgtgcaacagggcctttgtaacctgaggcctgtgaagtctgtggaggaatgtgacccagagccaaggggcgttggtgccaccagggctgagaaggagctctcctgctgtttaccctgctatcccatgggaacctcagaagggggaaggttatgctctaaaatgcatggggagtcaagtccttggcacagctgtgaagcaagcactctagttagtgtcttttcccctcatctttgctgacctccggaggcatgcttcatgctgctccagagagtagaacccaatgtgctttaatttttattgtatttgtataaatatatggggtacaagtgcaatttttaaaaatgcatagattgtgtagtggtcaagtttgggcttttaggatacccatcacctgatcccctcatcctcctttcaagccactcctcgtcctcctcctcttaattgtgtctcctactgaaagctacaagttgtggtcccattattccaatgccctgtaagggtaaagggtatcctgctgtctggggagcagggatccatattaaatgtgatgtggatggtagagtgccaggcactggtggcaggacagccccggaaatctttgagattcattgatttacaaaaccagcttcctgcctcctctcctcacctcttccatagacatcttcctccaatatgacaagtacacaatctggccaccataatacttggggttgtcccgtctcttctgcctggggaaaatgttacgagctgagtcatgaatactgtccttttaagttacccaaacatcatgatggccacacaaatggagctctaaccaaaaggaagtgaaagattcactctcagtcttgccatttaagtggtgtggagtactatggcatgtaattcactataaatgaaagttccacatttttatattaccaatattgttgtcacaaaaggtggtctcaggaaaacagacgttttagccagttgagaagacaacttacttggcaactagaagaccagtattttcgtcctttcaagtatatttagaatgcaaaatcattattattacgagagggaaagcctttttttaatgttaggatatgttcctctgcatggtaggaactgacgctatctccctccccgcatcaagcttatctcctctcatactatgtcctttcaaggaggttgttttccacactcctttctatgccaaatgaattcaatgtcagtttcaatcccgtttgtatttttgaaaacttaatatgcacctgggactgtactaggcactgtgacaacagcaaaataaaatgtttgacataagttgggctctttaagagttaagaatttagttgagacaagatgtacacctgcaaagagttcaaaagcaaagaggaaactacaaaactatgtgaaaaatgtgcgcactgtgaacttcaaagtgccccaggggctcagagcgaagaagcagtgttgtctggagtgttcaggttgctcatgagggcaggtcagcactgggacttgggaggaatcttgaaaggaagagaaacagactatgactgattgacacaaacttagggagaaaaacaatttcctagtgaaaattttggccccggcacaaccgctcttctcttactcaccggcgctcatgtccactctacctgcgctttgacaactcattcttggcgtgcaaagcaaataattcactttgcttcattgggatatgaaaaagaggagtcatggaaacacaaggacaccaggaagaataaaatgaactctaacaggtggtttctgtgaaccgccctgcatgctgaaaccagggctgtgtctgattttaattaggcacgagggcttctagagcctacaccctgaagtcaacatgttccaaaactaattcattatctttggcaaacctgttccccctttgtgattcccacctcagccaacgggcctcaccatattcccagtttctctggcgaggatctcaggtcccctctgatccccgagtcactctctactgctgcattcggtcattgaacattgagcctagggggttggatctccacatctttcccgaacccatcacctcagccagttcttcctgctgccaccctggtctgggccctcatctcctcatcttcctctaagatcactcatctctccaacctcatttctctgcactcgttggccacgcctttctaaaatagaaaccggcactccccagtttcaagtttttcccgttgtttataaaacgaggactaaactcctttgcttggttttcaaggcctctcaccttctctagcttcactggaccaagcctctccccttggctacccatttatccattcttccccacctcttatgcaccaggtagatctgtctgccttcaattttccagcttgcccaatacttttcttgcctccatggtcttgctcatgcaatttcttcagcttttctgatagttgaactcctaatccggcctcctccaggattcctgcttcacatggaccactgctttcctctctctgcttcctaccttcatcatttgtgacattctcctgacatttaaaaaatttgaccctttgcgctgaaggagtgagccaggtgggattgggagaccagggcaaagggagtagaagaatgttttgagacagggaacagcatgtgtaaagactcagaggacagagacaatggtgtattcatggagctaaacagtgtatagtagttagtagaaactgggtttgagtggacaggatggcattgggaagaagtggcactggaggaagaggcaggggcaagtccgtggggctggccctgctaagaagctggacttttagctaaagatcaatgggcaagtttgaagagttatcagcagggcagtgatgagataacatttgcatttgaaagggatgtagtatatggggaccagagaaagactggagaaaggactgtcagttaggaggctggcaggagataataagcttggtcaagggtagtgaccaagttcactacctctattcaagaaacagaggaagagagtggactttagagctttagaaaggagatgtgattaggcctggttaattgatcggcctggtttaaatggagagggtgagtgaaaggagacacctgggtttctggcatggcccagaaatgaaactatccatgccacagtatcacttcctgctgatgccctctaaagagactggatctctctcccttctcagagctgaaacttttgacagtgagggtgggggtggtcgagagcccctcagacatttgctttggagaagacacttccagttgatatggggcctggatctcattcatttgttacagtctccagggcaactagttattcaataaaccttggtgaataaacaactgtgcctataaatactgttcctggtagtcttcctgttatgttttctaaaaaatattgggcattttatcttttattgcccttcatagtgtaaatgtaatggagcctgtcttcctccccaactcagatttcagttgaaagtcttcatcaggaggcgagtcttctgccagccgggttatttgatagacttcgtagtcttcatggtgctccttgatggctatttaatgtctggtagctcagagtcatgaccagaaaatcaactgtgtcctttgacaccttcctgggccaatgtccatttcctacatcttcttttctcttcaaagtcatggcctgtacaacaaaagattaaaatcccctggagacctatgtcctttattcctacctagaaccttaaaggaactaaacataccatttcttctgactgcatcttttcttatgaatcatttcaaggcatactcatgttgtcagaaagtagttcatctccagaatcatgggtcacaatggacttgctgtgtccttcccctgccaccactgcccccttcctctactggtaagcccacctgctagagtggggagatctccttctcttcctcctccacctgcagtatgtgcttttgtggcatgttctttttttttcttttcttttttctgagacagtgtcttgctctgtcactcaggctggattgcagtggcaagatctcagctcactgcaacctctgcctcccaggttctagcgtttcttgtgcctcagcctcccgagtagctgagattacaggtgcccaccaccatgccctgctaatttttgtatttttcatagagatggggtttcaccatgttggccaggctggtcttgaactcctgacctcaagagatctgcctacctcgtcctcccaaagtgctgaaattacaggcatgaatctttccttattcacatcttgaggctgctcacagtcctcccttgtgtctggaatctcatagtgatggctttctcctgggcttatgctcgtgagagcccctcaccacctctataagttgcagaagcaatcattgagcactttcttcagccactttagcagacagtcaggtttgcatatcagtgatttcatcataactagggaatggtaaaatcatagtacaattaatatgattctttaattttaaagaactatacaaatagaaggtagttatcaatataaatttaaaaatgtctttcccagagtttaaggtaatgatattgccacaattgatacacacatatgttattataaatgctcattttagaagatgaaatataccatctgaatggcatacaaataataagtgctacttaggtcattattggcatttcctcctacctcttaaacaacataatttcaatcagctttacatttagacatcatttcttgcttagttttgacataacagaattagcaatcattaaaagcaacctattttttttaagcacctactgtattagtcagggttcttcagagaagcagcaccagtaggagagatggatatatgtgtgtaatgtatgcattttgtatatacacatatataaaataaggagttggcccatgtgggtatggaggctgacaagtcccaggatctgcactcagcatgcctgagacccaggaagagccaatgtttcagtttgagtctggaggcagaaaaaaaccaatgtcccagctcaaagcagtaaggcaggagggtcaatctttttcttccattcaggccttcagctgattcgatgatggccactcacagtgagggtggggtggggggcagcaacctgctttactcagtcaactgattcaaatgattcaaatgttcatctcacccaaaacacccacgcagacacacccagaatcatgtttgaccaaatatctgggcactctgcagcctagtcaagttgacacataaaattaatcattgcacctactatgtcatcagttggcctagtaattacctcatttaattgccacaaagacctcccatatggaaagtagtcttattcccatttactccacagctgtttatttaataaatgtttgcacattttagagatgaagaactgagcctcagataattgaagtaacttgtctaaggcagcacagctagtaaatggcagggccaggatttcaacacaagtctaaaacactcagctgggtactctgaaccagtatggccactgcctcccagcactggtgctgtgctccccacaggccctgagggttcctccttaggatggagaagagctgaaggcattggccgctggccaacactcagggcagcagcagggcaggcacacctgaacatgtgggacctgagtgcagctgggagcctggagaaggctcccctttcctttgcctttgagatgacccacagagcatgaatagttgctggtatttgttgaaagctacgtgctcgtgctttgtgtggatattattatttaatattcacaacatttctgttcttctcaccaccccactctgcttgggagggaggcagtgacagtgcccccatgaggcagccatgggcaaggactaggaggcatccttttaaactgctgtcctcagagccaccaagagtgccctaggttgccttaaatggccccatgggccagtccaatcctgttccatctctcctcaaaatctgcccatcaaaactgcttaaaatgtgcatgaatcaatgattccgcaggtgcgtgctgcctgctgattcacccacgagcaggcctgggctttcccttctttttatttgctcctcatcgcttgatacattgctgttcctcattttccatttccactagagcttggcaaaaacactgtctagttctaaacataactatgagcccctaaataaatcttgtataaaaggagctcctttgtctttgactccctgcagcactctctgtttgctctacggagtccccttcatcgtgacaacataagcagtcctcatggcattgcccagttagcttcgcccacagcaaaactctcattttgcagaggaggaatcggagactcaggagagcatgggccttccccaagttcacacagttagaagccaagccatccgtatcccagtccagtgcttctggtgtatcccacagacatcagttcttatggggtgggatgggcaggtcaaaaagcaagacatctggaggtggccttgcaggaaggcacgcaggctggcctggggccacacaggaggtcggcacctgttttgcatatttgcctccatgtacaaccatgtgggtgcaacacaaacaaaggtactggaagaggaactgggatagggaaatactttttacattggcagaagcagatcccctctggtgtgcatgctttgctggaaggcccgggaaagagctgagattcctaattgactagaatatgactcacttaggactcccattcccagaggaagtggctttggctcatattatgtgtttacagagaatcatctcatccatgtaagccctcagcactggatccacccagcggattcttctccatgacatcttggtgggtctccagacacgcatttggcttccatgggatgatgtttccagatcagacccttgctctgctcccgagctgtgaaccagatcacaggagcagagggtgaactgtcttgtttcagcctaggactctgagaatactctaccagccgaacacttccacaaggaaacacaattggtggtaacaactctcagaggaaagggaaataaaactgcttcttgctttcaagatcattccgctttttttttttttttttttttttggtagcataaagggtaaataaactttagatgccttgagagcaattgaatcatagttgagaaggcagcacaccctagaggtggaaagagaatttggatggtgtccagagatgtgggagctcgttctggatacgaaggtctcactggtaaaatcactgcaacgcttgacctgggatgctcagaattgggagacccatgttcctacccttgctccgttaataactgtctgatgtgtacatgaaacccctctgagcctcagtttcttgatttataaagtgggaataataacacttgccctgcctacctgtcccaggtgtgtgggtcaaatgaccctatgtgaacacactttgttaacaagggagtattctctctattgttgttgttttgtgtgtgtgtgtgtgtgtgtgtgtgtgtgtgatgtaagtgggaatgtcttttgctggaagtgagatgggaatgctgaggagtggtggagaatggtaaaagatcttactgggacacacagagggtgctgggtagggttgcagccccctagcactggagaccctgggtctgcagtgccagcattcaccccaccagcagatggacatacagtccaatgttggctggggtggtggatagagttaggagtattgacaaggcagcagttacaatggtgatctcagagatttcactgaacagggaaagagctgaagaaagggacccagcagataggcttggggagctcggaggtatcagagaaatgtaagcatcacgtgcatgagggagttgttggcaaggtggcagtggtgggcagaaaggcaaagctggagtttcagatttgagaggtggagggcatccaagatctgacaaggaaggcggtgctgaagggccccaggccaatcacaaggttggaatggagagagtagaagctgagtgccagggtcatctcaaagaatatggtggagttgtcacacctagggagatgggaaatctgtgagtggtcaggacatcagaggtgggggcaggtgtctggaagggctgggaggagaaggctgatgctgctttagggtaatggaggcccagaaaacagatctgcctggacgcatgctcagatttgaaattggatatgaattacatacaaattggtcattttacacatagataaccaaaagttgttgggtcatcttgtcctcaataatacaaaatatgcattaaaaactgtgctaaataactccttttagctatcgacatttttcataaaatagccccaagggcatggttagtatcaatgaaagagagccacacattgctgaattttcaggagttttgcaagccaggtgttatgttgatagcttgaaataggcctcgaagggaaatcagcaaacattacaaaccagggcttccctccaataatgcccccaccatccctggaaatctagttattaaatatttcccagcaccactgcctaggcataaataaaatctccaaatctgcccaactttacaatcctgttgtggactgaatgtgctgcgcctgtaaaagagacatgtcctaatctctggtgcccgtggatgtggccttatttcaaagcagggtctttggagatgtcattaagatctaaattaagatgaggccttactggagtagggtgggcccttaatccgatatgactggagtcctccttagaaaaggagaagagatacagagagatacacacagagtggggaaaactatgtgaagacgcagacccagggcagaacagcatgtgacattggaggcacaccacagtgacacaaaccaatgattgctggcggcacaagaggccaagagaaagacatggaaccaactcccctcagagctccagaaacaaccaaccctgcagacaccttgacttctgacttctgacttctggcctccagacctgtaagatgagacattcctgttgctttaagccatgcggtttgtggtacctcgttacggcagcctggggaatctgacaaccctgtcacagcctcatgtttgggcaggagggcatggaagttcttccacatgaacagcaaagggaaggtcgacttttacctttccctgtctctgctcctaggggaccttccctcttcccggcacctccagcacatgttttctttaccatgatctggtccttcccattaggtgccaagtattgtgggtcatgcttcatgctttcccttctaaatggcaatcaggggttgtaaacgcagatgcccctgtgggtcagagttgttcagcgtgatgcagggagaactttttcaaattggaaagtgcattctgtatttaaattaaacaccccaatgagctggccaaggaaaacctggctgagacctgacattttgggaactctttgacgtgctctgagaggtggaggacatctcttagccttggcattccccagcagcccccggcagcatttattcactgctggtgaactggctgattgtgtctggctggttcctgggtttttgttgtcatttgctacctggatctctcaggggtcttttgtcttgacctagctgaacagcgaatggagtggagatctcagaatttccacagttgctccaatgtttctcccttcagacagaagccttacaaaaaaaccagattttgtaggttataaatcccccaacggacaagctctgggatgctattgcaaaactctagtttcagaagaatgcaccaagagggcggcgtcctctccagacatgacctgccccacccggatatttccaggagtgttttcctcggcagctctcgtcatcttaggtggctgggggacaggcatcaggcacatggaaaatcaaggttgatttggggtgagaaatattttgaagttgtaactcctgtttacagtttctttctttatgaacaccagagggcaccacagtcatactgaatggtgggtcggccttgctttaggactgaaatcctggtacccaaatttttttttctttttaatttaagaactaagaagtgctgaattgaatatgtattcatttgaatattttgctcaggcttctaagaaagttgcagaagaggcttttggggccacttgctggatgttcacgcccagggcctggggcagggggacctgtggggcagcactccttgcctgccctcccacccagtcctgagattgtccagctctggtcggttctgcggcagggctggaactgtgtcccaggccagagctacctcgtgcagggacccagctcgttgcttcctgggctcatccttttaaactggctctgtgagttgttccacttagcatctggaggtgaggcctggccctgggggaatggaggattccccagggaaggttgagggattgctgaggttgcacagttgttgcctcaacagcagtggggctttggcaacagggaccagttgactggtgtgtgtgtctggggtcttgaacagtttcccactgatgccctctggtagcttcccactgacagcagagcattcatggttctggagaaatatagaaaattttctgtaggctcctaaaaggctctggaaggagcaggagcagagctactgagggcatgagaggcttcgtgggtgctgggggctctgtgaaggggtagctgggctgacctccagagagacctgagacctgggaggagagaccacgtgggagaggtgccttgccagaggtgggcagcagagggagatgctaccagcaccatctcctgtctaatcgtgagtgtctgggccccaagagggtgtgtgtatgcttgtggaagaatctgtaccagatgacacaactcattcagacaggggcttttccattctaacctctgggacggtccactcagtgtcagccatacggttttgggaaccttccgatgacactcagcagagagcaaggctgttcttagcaacagcatattgtaaatagcaaaggagcactcgatctgcaggaaagcagacggctttgcagaccagaagctctactaatgagttgatggcaatttagtgagccttggctgtttgtatgaaagagaaaacttcaacaaaatgaggggagaacgtatatctataaaagagagtatgagggcatggctgtgacctccaccagcaagttgaaacgttccactgagaagatccactgtggataatgggaactagtgcaaggccatgatctgcttggtgcagtgggcccaggaggcaggcagagggactgccctgcttccaagaccagtgaccgctgcagggtctacctggccacgagggggttccctttgtcatttacaattcacttgctccattcagtctttttatttaactgggatcaaaaaggatataattggtagcagatcatttggattccagttccagatttgtgaccctcatgagtgatgttcaggcttggcagaagtcacatgatcacacctaacaggttacctttcttaaaatgggcacctattaataatatcaaataatggatatgatatgacctgtgaaggcacttaggaattgatccagtgtgacataggtggtgtcattaatctcaggagggaatctttagcatttctttctctttcaaatatgtgtctgttacttgggctgagtgaggctccatttgaaggaggcttatttagagttaagataaagatatatcttcaggcctatgcttttaccatcaccaaacaaataggattggaaagtattttgggttctgggtactcatggctttgtagactgcttagccacattcagacaacaatttgcagagcaacttccatattagaactttttgtgaaaaaacacaaaataaaattcagtttaactcaagaagtatccaaaaacattcactaaaaaggactacttttgtcctgagcagggaataccatccttgtttttgttttctacctttttttaagctaacgttagagacatcttgggctaatgggaacagggaataactactggcaaaatcagggatcaaggttctgtttatgttttgtcaaacaaatacatctgtttgacctgaagcctccttggtttattacagcaattgcttactgtaagtaagcaacaaggtgtttaaatttcacacatgtgaaatacatattatgttgcctagcaggggccaagactcagtcaatatttttttgtagcacagttctcagattctgagctttacttaaccaaaagtttacttaaccaaaggaagcaagttcttaaccttgacactagaactgtgagttagactttattagtgaacacacttattggtagttccttgtttaagtccattaccacaatgtttttctttagctttaacacatgcaccatttggcacagtcatagaccgataagcaagggaatatagcaggcagcagtcccctggaattacaagctcctgaagcaaagctccgtaatgggtgacagcttgagctatggaatcaaccagcctgatttcaaagccagagtccactgttcactggctggttaccttgggcaattcactcaacctcctcaatcttaaattcctcctctagaaaatgagtgcataaaaacacccacttcatactttttttttttttttttttgagatggagtttctctcttgttgcccaggctggagtgcaatggtgcgaccttgcctcactgcaacctctgcctcctgggctcaagcgattctcctgcctcagcctcctgagtaggtgggattataggtgcccaccaccatgcctggctcattttttgtatttttagtagagacggggtttcatcatgttggccaggctggtctcgagctcccgacctcaggtgatccaccagcttcagcctcccaaagtgctgggattacaggcatgagccactgcgcccagcccactttatactttttagggcttcagtgagataatctagtcagtgttagctactatcactaacatcatcatcatcatcactgcctcttagtctcctaaaatacccagtatagtgccttacactgtgataaagggggaacaattcccatttgttgtataactcattccatccactgatgcattttaaatttggaatgaaatctatcaggattacagattcaaattcttaaagctcttccaatgtactttgttcccattttggggggcagggagagagtaacttcttaaaaattttccaaacttcaaccctagaaaataatctatgtatataaacgttcttagtataattcttggcacatcgtagtagacatttcataaaagttctaagagataaaaagtaaaatgggtttatattttatgatgatttttaggggagacataggcttcaagaaagtgacttgcggccacacacagtggctcacacctgtaatctcagcactttgggaggccgaggcaggcgtatcatgaggtcaggagatcgagaccatcctggccaacatggtgaaaccccgtctctattaaaatacaaaaaattagccaggagtggtgacacgtgcctgtagtcccagctacttgggaggctgaggcaggggaatcacctgaactcaggaggcggaggttgcagtgagccaagatcgtgccactgcactccagcttggcaacagagtgagactccatttaaaaaaaaaaaaagtgacttgcccagtgtttaagaaataagaatgtttttggatactcattcttgagttaaactgaattttattttatgttttttcacaaggatgccattatcttcagtaaatgttttcttgggaaactcaggcagtgggaaattcctctagagagttgctggtcggcaggtgttttccacattacttgactggagagctgtcggcagtcagatctctctgacatggggtaaacagcggctctcgatccaggcagctctttagaaccgccccatgagccttaaaaagtgcataagcccagccccactgagccagatttttgctttgggatagtctgggtgggccctgggcgtcagaattcttaaaatctttccaagtgtttctagagagagttataaatagttctctctgcttagccttcgataattctatgttttatacatgtttatagatttcagcacacattaaaattctctcccctttgtaacttctctttaaaagggactttttttttaactttgtaaaatgataaaacataataggaattaaccagtttgttcttctgaagaaacatataagcacttgattttacagaagaattgccagaattgttcagtagctacatcttagatagagtggtagtgacggctttttcattttatacaatcaaagcaaccacctgttttttccctttcccaagtaagttaacacaatgaatcttgatcagatgatttatctctttgaaatttacaagtgatggcttgagtttcatatattgcatactaataacataaatgatgtagagaggtactaaaaataataatattagtaacaataatgcctttgttcatcatgtccttgcacatcacatgttcgaaacaagtggtgtttgagcctgctgagatatgaaatttaaaagaaagactatgtaaccctaatgcttatgtgttagatagcttgggttgaatattcaaataattgatctggtacctgctgcagattctgtggtagtgcaccagtcatttcttaaaatagccctaaccatatgtggcaattgaaagaggtgtataaggggtccctaggagcccctaagggaatggtgaagacctcacaaatagagaaaacaagggaaattagcaagtaaaaccctcctcccaatcatggttctatcttaagtttcctgcctcagagacaggactttttggttcaatcttggaagatatactaagttctttttttcaaaacataaatgatccacttggcaatgcttttacaatacatttagtgcattttgaatcaaggaattgtttaatgtgcttaccatgagttatttccttttacaaatatcatttgaaactcaccatttctagaaagcctcacctggttacgtggaatatgatcccattgatctctggctgtatcttttgatatcagaagccatatgcttataggcatgtaatgacgtcctatgtatgacagcacacatcagaatgtccctttaatttctccgacttaagcacgtaggacctttgaacatgctcttccacctgcttggaatatatctgctactaccagcaactcctttatctagttcttttcagatctctgcccagttgtttttgttcagggaagctttctctaatcttcctctgttcactgattttacgttcttgcagcatctctccaaagtctcacttttccacttttttgagtgaccatttgattgctcactgcctgtcttggaaggctgtaactctttgactcacacacccagggtctgtgttgacttttgtttatcagtatatttctagaagttagtccagtgtttgaattcaataggtgactaattgttgaatgaatactgcactttctctttgaaactcagctacagtttcactttgctgaagagttctgcactacttaactttttgaaactaatgttctatgtaatactttaaagattaatggttaaggagagtgattcattgtgcaaaaagaatgacttttactaaaagtatttcttattagactaaatttgaaacataaactaaaacatacatttttaaaaagctacccataagctcaccatatttacatagcaactatttttatttcatcaaaggacactgtccttaagctgaagtcatgctggaacttgggtatttcattctaaatttgtttgtgtttcttcttcttcttcctcttcttcttcttcttcttcttcttctccttctccttctccttctcctccttcttcttcttcctcctactcctccttctccctcttccctcctctctccccctccccctcccccctccccctcctcgcacccctcttcttcgtcttcttcttcctcttctgtgatgatgggcagcttcataaactctggctggaaatccgaaggtatctaaaaaactctcaactagaggtgagagtgctctgaatcattcacacaaaattgcctgaagctgggctacctgtcttggtaaacagcacacttaaactactccttcagcctccaggaccccactgtgccaaattcaggaataacacctgtctcatgtaaaacttttttagtctgtaggatcttactctaaatcataggaattgttgtctcacgagactttttaatgtctgtgagagtatggacattagcaagagatgccttaactcttaaaaccacctcagtcagtactgtgactcaatgcctcttaactaggcgagggttaaatatgcagatttgaaaatattgggttaataaatagtgagcagttaaagtttcccccttattagtgttgcatgttctttccagtaattttaaatcaactgatcagtagtagccttagatcaaaaaggaaatgaagtttgaaggaacccacttcacatgtaaggagatgagcttatttccttaatggagagtcccggtggagacgctggaggcagttcctcagtggtgtttggttgaaccaagcaccagtcaacaaaggatcaaaagtgggctgcagcatatattttggtatcagtggatgccttgtaattgcaagctttacggtcatgcatgtttcattctctctttgttgtgttttccagagggataaccaattggctggcaaagtaacaaatgaaaagtaacctgactctattgacctgcttaaccctgcatgggggggaaggatggaaaggagcagctgtttgctttgaaacggtggaacaggtatggaacagcagcttttgctgttgccttcttttatttctttgcacatctatttccagaccagttgaaaacagcaagttgttcctgtttgcggacacagaatcggggttccgggttccaggaacaggtactgtggtttactagtaacattctgacttgccccatcttcaggttgccatttatataaggattagtgcaatgaaaagaaccttttttttttttttttttcctttgagatggggtctcactctgtcacccaggctggagtacagtggcgccatctcggatcactgcaacctctgcctcccaggttcaagtgattctcctgcctcagcctcctgagttgctgggattacaggcacccgctaccacagctaatttttgtacttttagtagagacagggtttcaccatgttggccaggctggtctggaactcctgacctcaggtgatctacccgcattggcctcccaaagagctaggattacaggtgcgagcccggccaagagcattgttttcaaatagcaaataagtaatcctgctagggagaattattacttttaaacataggatttgcattttggaagttcatttagctttaagatacattatttgggcttatgggaattttgctccactaaacaaatttctatgaaggaatcatagaagtaatgacaaagcagcaaaacttgttgatttccccagtgaatgccatggaaagtgtgtttgctgtgtttaatgatctaatctcctctgcccacattcattttctcagttgtgaagggaccctgccaagaaaggcatagtttgactttttctattttttcaaacttcacataatagatataggtgaagcttcttttgcttcgaaatgaagatttcatttcaacacgaaagatttagaaccacacccgtaggacccctggaattagaatctttaaaatttttgttaactttgagtcagtgcctattgtcattggggggttgtaccttctttcagttacatccattatcaagaggcacctgagcagtacctggtttggtagtcactctatagaggtcaatggtttttgtaatattaatggctttgtcgtgcagctagaaagtaattttaagttcagaagattaagtatcatgtactagatgttcaaaattaaatcacttaatgacttttctcgacaagatttttctccccattggatgcctgatagatgagggactatgaataaataataaagacttgaaatttgcataggaatattataattcaaaaggttacagaaaaaagagttttaaaagttgtattttatataaggaattttaaaaggttatgggcccactatttaaggttatttaaggaagagattttatgttattatgttctcaggacataacatctttacagtcattaaaggtttcaatgtattactctattgaatctgaaactaaatatcatagaaatcaataatatatgaagaatctggtttctagcttaacaaggaggcagaaaaagtagtgtgttgttgctgcttgaggcacaaagcagctttctggtcttttggttccttcatgtttcagtgtgtagagtcagccaactacttcccacattgaccaactatcttttgcttgcattttaacatgatgcaaatggactttttaaaaaagtttcttcattaaaagatgttgtctgtctgaaaggaaatatttgggaatagggcaaaagaagatgaaacagacaataaacactctatactacccattctgaatattgatcaatgcatattatcaaacaagttggctactggaatttcatttagtgggaatagattataatgtgattcaatttttaaatgaagtgatgattggaaaaaacattataaaccaaagaattagctagctactgtgtcttcccgggtgtgagtttttatctatgaaactcttcgagaaatggaatctgcctttttttttcatactagaaaagggagggtagagaagcaaaggcctggggcagagaaagacaggctccaggctgtttccaggactgttctctggaaggggctgggagcagcccctgcctgagcccatttctctttttccacacctgggataattttgaaggagggagccttggagaaaaccatcctcaaagggcaccagagggctctgcaggctccccagggctgctttcctcacacaggaaaagatactggacaggattcaggcaccctcaactccagaaacctcggagtcttcctttgtgaaaagcatgaatgctaacgttaggctgctttgctcacagacattggtgtacccagtaaaagtgctgcccaacgccaaacctaacatgcccccatcctgtcaccacccagtcagcagggaaaataagaaccaggagtttgggaatggagaggtggtaggagcatgtttaacaagactagaaacgctcagggctatggctcatgtggttcctgtagccctgagccacagggcttcctggaaatcctcaggaggttttgacccagagaccaggaatcttctttcctgtgtggcttacaaactgggctccctgcagaagttctgaaattcttgcataacccacacattcctctacttccaggtaactctactttcctaactaaccccttcaggagctccctcttagtccacgtgcaggctcagtggctgcgcagagggaaaacacttgccaccatagcccttagatcccactgcgccttcctgtggcccctcaccgtggacagagctgcagggcccctcacgtcctgcagctggacacagtgcaaggctgcttcagttcagtgtcaccactattcagagttcttgtgaggattagatgagatactagttgggggaaattgtaaattgtaaagtatcttagaaatgtcaagtgttattcaatatgacactccagtaagaacatgggctttagaaccagatagctctaaattcaaaacttgcctgtgtgaacctgggcaagttgctttacttcagggagactcacttctctcatccataaaatgagattgcaaaggagagaggtatatgcccgctgcccctcgggggctacaggctgcttgtcttctaaagacttcatatgacagtattcatcaccatatcatgaacttaccgtggtcaaaacagtgaaaggctgtccagttctcagccttggaagctcaaccagctgagatggcggcagccagagagcagggccttgctgaaggccacactccctgcagccacgttctccggatggtgcacaaactttggatgtccattattttatgaagggaaatagctatccttggatgaagaccacttgtgtcaacatgacccattcatgccctccttgtgggtggatctcagggcaagacaaatcatcaacagattccaatttattcatttaccaggagatagaattgtccctgagaccagtgaaaagaactgaatccatgtgaccagtgcattctcttccttgaggaagacttatgtaggacgccagataataaccaaaaggagacttgacagcatggagttagattagtcgaattttaacaatgagggccaaaattgctggatgggcttctctcaagagcaaccgtttggccaatggggcctgagtccttttcctccttccttgcaatagtgcttggatggcccagccagcattggcctccgcatttgtttttctctgcctgcccatgtctgctcatcctcctgaataaccgacacaagaagaacctgacactgtcagttacgattatgcagttaatcaggttctatcaggtcttgcaggcccaggagccatttatctctttaagatgattttataagatagcttcttcctgatccagcatgcactgatctcccattttaactctcagaaaaccgttttatttatcttactcctaagcttttgggggtccctctctgatgtccctaagtaccgataacaggattaaatgacaccatatacgaaagttgtcattctggtgcataggaggggctcagtaaagcctaattccctgttctccttccctttcatgcaatatgacagctcttaagacttttatggaacatagccctgtgctatgtcagttgtatttcaaagattaatataaaataggattccagcccctgaggagctcagagtatggtggtgcagggacatttaagtgaataatgttttgttgagcataaaaaccctgttgttgccaggcccactggctgtgggagtaaatgtagccttcctggtattcatgtattcattttgctatgctgctagacctcacctgtacaaatacagggccccgcctcctgcagaatcctcccaaagatgtgccagtgctcagggagagttgcagagaagagctttagtgtccaccctttatcaccattatctccattagcattagtccacaccatgcccattttaaaatttgaatcaaggatgttttcttaactccagctaaagtatatgcaaagcaacctgaaggccccccactagccaccacccagctgctcaccctcactcttcctgccccttgctggtaccctttcctacactgtgattctggagcttccaaacaccccacatatttctgagtatccctagagggtattgcaaatgttttctgaaatgactctgggccttctgccaccagcccttctcctatcaggcctggggtcgggggaaagggcaggcagcagtgtcagctttctgccatgttctctgtcgctactttcttcgtaggaaaatgttggcccagcctggcctgggtgctgcctctccctatgaaacggtttcaaagttgcagatctttgttccctttagtctttacagagggcttatgcaaacatctcttcagtctctaagttctcccccagaggaactcaaaaacacattattgggtagggcaggggaccagtgggcatcatctggtctaaactcccctcatcttctctctgagctagatcccaatcaaaatttcctccctcgtctttcagtccccaaacccagaagtcctaattcatgttgatatatgcaaatagatgaccaagaaagtcactggccaccaagaccatacagatctgaggttagacttagatagaagggcaataatagaaaaatatgaaccaagttctactgcagaagcaagtggtagtgttgctttcggttcaggcttcaccttttctgcgaggccatcccctcccactctcactcaagttaagcacttgctcttgaatcacccagcggacatttgccaatacctaatatgtgccaagcacaaagcgaggcctctaatggcatggttcccaagcagaatcctgtcctctatgagatccctcgtctgtttgatctctatacttggtacttctctgaccctgaacactagtttcattttggcttatacatttggatcccatattagtctgcaacctctctgaagacctagcccacactttaggcttctgaataaatactgtcatctgaataacaacattttggtcaatgtcagactacatatacaatggtaatcccagaagattgtaatggagttgaagaattactattgcctagtgacatcatagttgtcataatgtagtgtgacacatgattcatgtctgtgacaatgctggtgtaaacaaacctactgcattgcctgttatataaaagtgtacaatgacctaggacttcatattcactcattgcttactcactgattcagaacaacttccagtcctttgagctccatttgtggcaagtgctccatataggtgtaccaatttttatctttcacactacatttttacggtaccttttctgtgtttaggtgttaaaaagtcgcctacaatactcagtacagtaacacactgtacaggtttgtagtctaggagcaataggctataccatatagccttggtgtgtagtaggctctattatctaggtttgtgtaaatacactctgtgatgttcacacaatgataaaatcccctaaagatgcatttctcggaacatagcctcatcgttaagtggtgcgtaactgtaactgaattgtcggctgtgggtgttatcataatccgtgtagtagattatcttcagtaacctgtatatctctttcctggattagtgacagcaagatccaagtaggaagcaatcaaagtgagtgagtcatagagcacgatgctcacaagcatgaaaattatgctcctctgtgccttgttaaaattgattttacaactatctgttgatttatgggagtcatgacatctcttttattttatgacatagatgatgaagaggaaatacatttttccctcaaattgaaactatcaaaatggtttcttttggatgttgcatatagagaaaaatcgataaagcagacataactcttcttatctgtactagaaatgtcaacacaatacatttgaatctgttgggtttgaatatcttagtttatcactattattttcccaaagtattctttcccaagtacccagaagccacattcaacttaaaggcagagtaggtgcagtgatttaagaaacatccacaatagttagtctggcttgaccatgctcagggagctgccactggtgtttaattgagagagtataatagcacttaggagtcctgggtgacagtgaccaaaacctagctgaaacacacaagaaaaaatatgcatgtacatttgtacatggagaggaattttattggctcaacccaaggaagggttgatagacaagctgttgtaaggtaagagttgcaggtggacccaagaacaaccggagccaggaactgaaccccactgaggctctcactctctttcaccctctcttaattcaggccagccaacaatacccaaatgttcaattgtataggtttcaccatctgatagatagttctatatttttaaaatcctagggaaggattctaattggtctggcttgggtcaggtacttcttcctggtggactaactgagatcaggtaaggccgaggcaggtctcaggaaaagcacaagatgcagtggggacctatgcactccccagaaaaagaaaagctaaacggctaataggaaaattatctacgactatgatctctggccagaactccccaaaaggcatttgttaagatggcctagatggcctctaactctatattctttagtcctaggatttgaattattatgttgatttgttcatttatttgacaaataaaaattgtgtatatttatggtgtacagtgtgatgttttgacttatgtgtacatacatggtggaatggttaaggtaagctaattagcatacacagtagctcatttctcattttgttgtgtggtgagaacacttaaaatctactccctagcgattttcacatacatatataatatattgttattgactattgtcaccaagttgtacaacagatttcttgaacttattcctcctatttaactgaaatttagtataatttggacaagatcccccagccactgcttgtcccatatccaccacttccattgctggctaaatttggaaaatatatgaaaaagaagttaagcaaattccagaaaaaaatgaaagaccaaaaagctctacatttgcctggcctttgaggattgattctcaacaattctgaattcactgggtgtttagatgacattttgcttctatttaaccgtgtggagaaagccctgttccatttgcatggctgcctgtattctttaacaccctgattcagagctctgcttttggctctcctaacccttttctcccctctttttgtagttggtacacaaatattcttcaaattgtcattttacaaaaggtcaaaaatgagctgtcttcccctttagagagtgggaagtagtgtgcataaccttcatggctattttctcccctttagttttgcagccttagaaaatggcatgtaacatacctaaccaaagacagcggactctgtcaacaacaggagaagctctatacgaaattcttggtctgcataagggagcatcaaatgaagaaattaagaaaacctacaggtacggatttcaatggtgacatttcttctgctactagtgagttattttgtgactggcagattcctccattaaagacataagcttctcgctaagaccagtaatccaaattttagatccaatgttccctgctctacaacataggagttaggaatggaaaggcatgacagtgattttatgaaagaactcactgatgatgctgggccttaggaaagggcagcctgtgtcttagacctgcagtgaaagagagagagaaagacagagagagaaatgagtgaaccaaccacaaccaattgctgtcatttttttttttctttctttgacagagtctcactctgtcgtccaggctggagtgcagtggtgcaatcttggctcactgcaacctccgcctcccagattcaagcgattctctgcctcagcctcctgagtagctgggattacagacacccagctaatttttttttttttttttttagtagagatggggtttcaccatgttggccaggctggtctcgaactcctgacctcaggcaatctgcccacctcggcctcccaaagtgctgggattacaggcatgagcaaccgcgccctgccaatcgctgtcatttaacccatctgatatagcatcactgagtcagaggaattcttttttaataaaaggagtttggtggaatgctgtatttgtaagctatacttctcaagcccttaattttgatcttttgtggtctagttccaagttagctatttttggaaaactttgaaatgtctttttattttaagtccaaggaataaaaaaatgttgagggagaaatgccattactacaacccaaacatatgagagaagctgtctgaaaattaaagtcaaaggggcaaatccccaactcaaagcacaaaaaaaatcatcttcttctacaccgaagtctagaaaggcctgtcagtgacagaagaagcactggtttggggcttcctactccaggagactttctgcactggtgctatagtatgtcagtcctctaagaattccatgatgattttaatgaatttctgaaaactctgttatttgtcccacctataaggcatgtagcctatctgatacttgtcttgacaatattttgggacctcttagggcattttgaggtatttaactgtctcttggctagttggaggaagaaagatgtgtggaccttaaccaccttctggacaggagagctgctttcagagagagaaaatctttccaagagagtgcttgtttgtttgcttgtttgtttagagttagggcctcacttctgtcacccaggctggagtgcagtggtctgatcatagctcactgcagccttgaactcctgggctgaagcagtcctcctgcttcagcctcctgagtagctaggacttcaggctagctactcaggctatcaggaccaccatgcctaactaattttttaaaattacttttttaaaaagatgggatcttgctttgttttccaggctggtcttgaacccctgattcaagtaatcctcccaccttggccacccaaagtgccaggagagctttgacagtttcacattgaagtctaaatttgctaagactcaggctctttcttacatatagttttaagtagatgaaacaaccagaaacttttgacttgtgatactctaccaggaaggacatggtgataacagaaatagtggaataatttgtgcttgtaaacatttaagattcacctgtgggttttggtgactgatgattaaactgttttccaacttgcaaaaaaaaatgttgagtacaaaattaatttgcttactgtagaaattttgcaaattaccaaaaatgaaggcaataacatttatccataatcctacctccagtaataattatcattaatattctgtttccttctagtctttttttttctatctagaaaagacatttaaaaatcaggttgtattagtctatattcttcaactacctttttttttttttttgagatagagtttcactcttgttgcccagactggagtgcaatggcgcgatctcggctcaccgcaacctccgcctcccaggttcaagcaattctcctgcttcggtctcccgagtagctgggattacaggtgcctgtcaccatgcccggctaattttgtatttttagtagagacggggtttctccatgttggtcaggctggtctctaactcccgaccttaggtgatccttccgcctcagcctcccaaagtgctgggattacaggcgtgagccaccgtgcctggcctactaccctttttttttttttttttaacaaggtcttatcatgaaaatatcttgatgttattaaatagcctgatttttaatggctgcggcctacggttattttgtaatttatttagtcacattgcaagctgttattgaacatgtaagttcttttacttattccttatacttaatatacatatattataacacatattttcaattacttattttcttatgcggtataaagctatgcctttacaggaaaaaaataatcaaaatataaataaattttcagattttaatcagttacttcttgatttagtcttgaattaggttttataaacctaagtgctttttcttactgtacagaagtttaaaattaggcaaatttgttagtcatttatgacttttgttttactattatggttaaaagacctctcgcaattacaacactataaaaatattcaccgtatcttcttctagcacatttatgattttgctttgacactaaatcttgatccaattggagtttattttggcataaggaatgaggtagaattccagatctgattttttcccaaatccttagcccactaatacttattgagtctctatttttatctattaatgggaaattctttgggttagggttggaaccttcaccatgtggcaaattgtaggaactgaaatgcctttaagaagcatgttttgaagaaaaaatggcaatggtgtgaactgcaatttggaaccaaatagttacatgaaaatggtagagtctgataaaactcaatatcaatcttctagtttatatttcccttaaggtgctagggagagaaaagtctttgctgtttcattttgccctagacctatccagaggcgcgtgcctgggagctgcccacacctgttggtggacgtccttggctgaagatcactgaatttgactgaaggcttcaggctgggacactgtgctggggtaggggaggtgggagggaatgccataattgcattgtcagttaatttttgtaatatctacaaaaatgctccccaaaatggggagggaaaaaagtgacatccaacttccttgtaatttttaaaatccactttactttacaaatgtgactcttaattgtctttattaattttgtaagccaaaatttcaggtcatatgttaattaaggcattaattatgctgagttgtttgcaagtttaataattacaacataaagtctattcatgtaattagtgtcttgctattaattttgttttaatgtcatacaaatattattttttcaggtgattagggtactagtatgctgccaaaagcatctacttctccctaaattacacatttgtattctgcaagttattcaaaatgtatgagtaagctggaaatccactgagaatattattcttatattgtaggatctggatcaaagcagtcacaatatagtgaattaaaagtcagtgaaatttaataaaattaccagctgttgaatctatacaccacttggccactgttataatatttggctgtgctcttgaaaacaaggctgagttagaagacttctttcttcttttgcattttatttttaaaaagataatctttcatttgattaaaaggaaaacaggtatataaaaaagtctttctcttacctcatatcacccaagtcactttcccaggggaaacaatattatcaattctttgtatacccttctagagagatcttatgtctaaataagcatatatagaccaggcacggtggctcacacctgtaatcccagcactttgggaggtcaaggcgggtggatggatcacttgaggtcaggagtttgagaccagcctggcaaacatgggaaaccccatctctactaaaaatataaaaattagctgggcgtggtgacgcatgcctgtaatcccagctgctcgggaggctgaggcacgagaatcgcttgaacctgggaggcagaggttgcagtgagccgagagccgagatcatgctgctgtactgcagcctgggtgacagagtgagactgtgtcttggaataaataaataaataagcatatattcagaacttccagtctaagaaagatgatgtagacttttctctccctgctaagcacaactaaaaaccttggaaataacacaagagacaaccaaaagagaactctgaaaggtagaaagagaaaggttaactggtcagaaatcccaggtcacagcagcagggcattttataatcccctccaccccaacccaacaaaagataacccaggcccagcttttcccaatacccaatctagcagaagaaggcatccaggtagtctcattcttcctccagattgaacagaagtcctgccaacaacattagacaagccccacagaaacagcaaggggcaccaattgaaagctccccatcaacatcttgctgggaaatgctgtcttttcccaccaccagtctgggactcctctctctcacctagagaccccacttgacagaggaaattagtagggggattccaccacaagcacccagcccaggaatgcttttgtccccacaggctggaaaatcccttcacctaaaggcacctggctcctcagctactaccaacaaggagtgttgggagcctcagaagcgggagacaaaccaaacaaaccaaagaagcaccgtaaagactctgaaaagtagattgttattggaaccactcacaaaagtaggctagaacctgcatgctaaacctaaagggggctgcctgctaaaataaaacaacttaaatagaacccattatctcccaacatgataaccaaaatatccagatacaaacaaaatgacccatcctacaaagaagcaagaaaatcacaacttgaataagaaaagacaatcagctaactcctgtgctgagatgaaccagatgttggaactatctgaaaagcattttaaagtaaccatcataggctgggtgcggtggctctcgcctgtaatcccagcactttgggaggccgaggctggcggatcacgaggtcaggagattgagaccatcctggctaacacagtgaaagcccatctctactaaaaatacaaaaattagccgggcttagtggcaggcgcctatagtcccagctactcgggaggctgaggcaggagaagggcgtgaacctgggaggcggagcttgcagtgagccgagatcgcgccactgcactccagccagggcgacagagcaagactgtctcaaaaaataaataaataaataaagtaaccatcataaaaaattcaacaagtaacgacaaattctcttgaagcaagtaaaaaaaaatggaaattctcagtgaagaaataggaattaacaaaaaagaaccaaatggaaactatagaaccaaaaaataacacaaataataaaactaactggatgagcttaatagtacagtggagatgacagagaatagaaattgaggacagatcaatagaatgttcccgatctgaacaaccgataaacaataaactgaaaacagagtctcagaaacctgtgggacaataacaaagatccaacatttatagcattgacatcctagaaggagaagagtgaaacaatgggactaaaagagtactaaaagaagtaatggctggaaattccccacatttggcaaaaaatagaaacctacagattcaagaggctgagagaactccgacaggataaacccaaagcaatcaatgccaagaaacattataattaaatttctgaaaactacagacaaagaaaaaaatttgaaagcagccagggagaaacaatgcatggccaaacacccatttgaatggcagcatatttctcatctaaagcaacagcagcctgaaggaagtgacaaaagatttttcaactgatgaaagagaagaactgtcaacagaaaattctgtatctggtgaaactatatttcacgagtgaatggggaaatacgttctcacataaagggaatctaaaagaattgtcactagcagatctcttcttaaagaatggctaaaggaagttcttcgaaagaaaggaaatgataaagaaaggatcttagacgatcaggaagaaggaaagaacaagggagaaagcagaaatatgggtaaatacaaaagactatccttttcctcgtgagtggtgtgtgtcctcccaccctcgatggtggtgtgttctcgctcctagcctgtactttgtattcccttaacagtatatcttaaagataattccaaggaaagatcagttcatgaaaggttttctcattcttttcttattaccatgtagtattccacgacatggatgtcccatgacttaaatagtttcctattgatagatattcaggtagtttcccatcaagtctgtctttttttctttaaaggctgtctttttaaaaccaactttttgcttctcggagagggaaaccctgtagtccagaaaggtagatagaggtggggaaagggaaacaatcttggttcctgatcccttttccatatttgcatgtcctgatcccaaactcctggagcaaagatctcatggacccagccagatcagatgcccattcatgtctaactagctctgattcagggaatcacaacttcccactaccacttagcaaggaggtgtgatccaacttttactggacgggaaagggacagtgttctctaaaaaaggggacaaagttgggaaagaaattttcagtatctccagttcttcattcttttacagaattaaccataaagcagcctcaaagacctatctcagtccctcctgtgtcaatttgtagatctttatcatagagtcttcctgtgcataaagcacctttttcctctttcatctgaaattcaaccatacttcattagtcagctgataaaatggagtccccagctacctcaaatgacagctgggaaaggtgacaagaggaaggcttttactgtgccaatccatcaggtattgaagctcttgccttattgacattttgtgaagagaaatgagatctttttttttcaagggatgccaagctctttgtggcaaagcacagtgaaaatatcaggtactactgtggatgaaaaaatatccaagtctaaaattatcctgccctttggtgctgctgtttaaaaaccatttatctagcataagatgaatttgtgatccaagtcaaaagtgacatatcacagggtgaaactcatggtatggtctcatccagggccttcattatggaataaatctgcctttagtattgcagagcataatcatcccaaaggggttgaagtctaaggctcatttaatccaattttatcattgctagatcatgtcacttaatctgaccagtgtttgcatgagataagcaaatattttacctgcttctcccactgcctaaaattcttaagtctccccttatcatgctgtctgaaggagacttatttgagttaatcttttaaattcagataggcctagaagaagtcatccatcattcatacatttgcctgaactttaaactggtgtgtcttgcctttccacctaatttagatatcgctccaagagccaacaggaattttgagttagaaagctagtgtaggagttgaggaggagggagagtcactagtggacagtgggacgattgaacaattggggagatgggagactgctgaaataagaaactcaaagctttttctctacataacctcaatactcaggttcaagaccctttaaagtgacttgagaacttgggttcactgaagagtctctgccgtccttcttctaggggtctcctctgcggaagtctcccagggcgtgggaggcagttcatctccatgtagtggcattgtccaccaagccatgttgccaccctgtagctgatgctgctttgccatttgctgtgtgggcatgtccacagtcactgctagacataaccttgggtgctagactctgctgctgcagctcccctgccactcagctgcatcaccctgccaggcacggtaggcacagaaggtgctccttgccaacctctcagtccccaagtcccgaccgctccttcaggcccagaagcctcttctgctgtttaccttgagagccgagggaacaccaaagcctgctgggctgtacctctggcaggattgaggctgggcatagtggatggctcctttcctcctctttgtgatatgctctgttagagccccctatgagttcaaagcatggtagaaaagctccttccagttttccttgtagctctgtttttctctaggacccagacacatgctcagggggtgagccagacactagcagtaatgtcgctctgcttagactctagatctcatccaacagacccccctcctcttgtgtcaaggtcatcacacctggctctttcctaagatgcattcttttccagaagattctacagttccctccccagactaagagaggtttgtgtcaggctgtaccactggttctttagacgtacccagctggggctgtcacagccgtggcttgtattcctttctggaagcctcttcagctctctgggacttctgggaggccactgctaccagctttccaaacacatcctgatgtgccctaaccccgtgcagtgaacaatgggcgacaatgactcaaagagcagccctaccgtattcctgcagcaagtccacctgattctgtgttgaactgggtaaataaagtgtattattttactgtttgttgctcagcaagaactgtgggtgtgtgattaggtttcctcttttcttgttggcacataaaggaccttcactccaaagtcattagattgttgatccatactgctacctaatgatagcagaagccaagaaggctgatcagagcacgtagcaaccaccagtatgtctagagtctctgacactatcaatggctttataccagcaagtctggttcattattcaacgaatatgtattgagcaccgcctctgtgttggccactgtcctaggtaaaatagcagtgaacaaaacagacctgcttccttaaacctgttttaaatagggccaggggaagggggaggcttaataatgaacacataagtaagacacacaacatatcagatgttgctaaatgctaggaagaaaagcagaagagggtagggagtgttaggtaggagtatgctggaagttttacattctctttgagatgttcacataaacactaaaatcactccattgaagtgtattctaaatataatgtagcagttaagagcacagggtatttctgagtgtggtggtgcttgcctatagtcctagctactcaggaggctaaggtgggagggtctcttgagcccaggagtttgaggctgtagtatgctatgactgagcctgtgaatagccaccgcactccagcctgggcaacacagaaagatcccatatctaaaaatgagtgcaaggtattcggaaagacctgaattcaactcacttttctcagcctcattctcttcataagtaaagtgcagataatgatccaatctcagagggttgtggaggattacatgagatgatgcatgcaaaatgcttagccagggtttggcacatgggtactgggtgctacaaaggatatacaagggcctgagaaccaaccatacataatggcagtttccaaactcagctagggcacgggtgcagggtgacgtgccaagaagtgttgagtatgtgaatgagaaagaatggatagagagagagagagagagagagtgtgtgtgtgtgtgtgtgtgtgtgcgcgtgtataaggggtacttagattatgtgacatttagattccattgaatacatttaaaagaatgttacaactgttttattttaacatgctgatgtttataatatgctgaaaattacattctttgcatctgtttaatcttataaaaatttttagatgccaagttaaaaatgttgaagggacacagtttctcaatattattttaagaggtgtctaagcaaaaagaattgaactgggggtggggaggacagaagaaacccaaacatcccaccgagagtgatgacaaggaggcattcaggtggcttcggggagtggcagcctgtgggggcgcagccgagccccttcctgagggctttcctttgcttcctggcccactgcgctgtcccagcagagcactgcagcctcacagacagtagttcccttgctgcttttctgcctctcccattccatcagttccttgagggcagacactgtgcctggtctctcactgtactttcagccctagcaccatgctagtatttgctgaatgcaaaaaagaattagaaaatagaaaatgtctggaaaatgtctgttttctcctcgattatagtctcagcttcttcaggaccatttctcaaataattagtttggtcactttgctgaacagggagttattcactgacccaataaacagaggaggggcagatcagaaaggaaagatactagcttccatctgggatccagagcattttgtatgattctgggaccttcaagtgaaaagtagttaggggataagaaaaggaaaactaaaaaaacagccagatatgcaatttagagaatgtgtcttcagagtttaaaatctcatttgtaacataaacattggtttttatttacaccaatacatacatttttgaagtgagctggaaacaagattaagatgccccaaagtgaggctgactggtttctctagcatgttgggtgcaagagcctaacaaaatgctgggtaagaaatcatgcaaagatctagctcttccttggctttttagagagccacaaaattggagtgaggctggctgtggtggctgttgcctgtaatcccagtaatttaggaggctgaagtgggaggatcaattgagcccaggagtttgaggctgcagtgagctataatcatgccactgcacaccagcctgggtgacagagcgagatcctgtctctaaacaaaacaaaaccctaaatagatattaacgtatagacaggcttggtggcatgtgcctgtggtcctggctatttgggaggctgaggtgggaggatctcttgagcccaggagtttgaggctgcagtaggccatgattgcaccactgcactccagcctacgtggcagagtgagaccctgactctaaaaaacaaacaaacaaaaaatcaaagtgaactagttttgcacattagcacttgggtctctgtgtctcatgaataagcttaattcctccttgttgacaaggtaccaagtattctgattcacatgacagcagaagactcagttgactgttctttttcatttgacttcacatggaattttctagaaattatcttccggttctgcagaaatgagttgcctcagagtagaccaaagtgaggcaaattctgttttcaaaagaagcagaaaagagtgccatttccataataatctgtggcaaccccaatctgtggtgcttttacccatctttattagcaattacaggtgaaaacagagactgcttatgaataaagtgtaaatgtcaggggaatgcatagttaatagaagaattgtaaatatttacaaggcagagtgatgattcaagctcacaagattaattgacattaatctctatcaagcactaatttgcttcctgagttctaaaaccttccactgaaaagaagagtatgtgaggccatactcacagcccacttggaagagttgtcttccggtgggctgcataacctcccttgtccctcgtcaagtctttcacttgatcgaacctcttagttcttcatgcagtgccaatctcagtcattcctaggtgccagaatcattacgatccgtaactttttcactcactcattcactcaatatctatttagtattggataattatttatattatactatgagagatgaatatacatataatattcattgtattcattaatatgaaccctatgctcaagttcatctatcccactcactgtactctcccttgttttgcttgtctttgagacatatcttttcaaccttattaaattttactctatgtagtaaactctttaaatttactggctctggtttgcatggttgtgcaatcttctccagcaatgctggccagcagagaaacaggagtggaattagtgggtagctaatgtcatcttcttgggggtgaaacaggaaatcagaatgattaagaaattgagtaagatggtttgagtagcattcaagtgcatgaacacaagattcagcctgtatagttaaggaaattgtcagtgagactgccagtctagaaaaataggtcctattaggtttaaaaagtgagtttggggaaaaatgggtttaggaagaataagaaagtgagagcttgacgtaaagatcagaggataatgctgtttgtttttgcactgagaaaactgaaagactagagacactgggagcctgaaaagagctattggcagggactgcttctgaaaactaccaggacctgcttggagctttgtcactggaacttaagccagaagccggcaggaggaaggcctagagagagcaagtgcttgctgagagctttgactagaaccaggggtgcgagctgctattgaaagtaggagacaagatatcaggcggaggaagtctatacagccatttctcctacaccgcagtcttatcctcccttgaccttctagttcagtagagattgctggcctgaagaaaaaccacaaatgtaaattttcccccaggaaacataataaagttagatgcccagaaacttttattgggagcttgggccagatacagatattttgagctgtatgcagcctacagattctgagtgagctgtgggctggtaggttgttggaaaaggattatattatacagtacacagaaatcttagtggcgtgctaaaagctgtcagtgacccactggtgtcagaagttcaggtcctcatcccctaaagtagtgccttatgattggtgttggacatgtattttatctactgtgtttgcacaaatatcccagttccttctaccttattagagagggtaatgaactggctcttaatcagccataggaaaaaactgtagtgaccagaaagctaccttaaaaaaagattaagtattgttgtacttttaatccttacatttaaaaaatcaagtataattcctcataaagtcaagttaatacacattctagtaaaaatgtggggaaatacttttcaagcgatgattgagacacagtggtttcaccaactccactaccactagaggtcagcacttgactctccatatggttctgtacgagggaaaagaccaattctctgaaacagatcatcatctacggttcgtgttgttatctcatgccatctgtcttgaatcacaaaggtgactgcatcccagaaaatgagagaacactcaaacaatggttggggtgagttgctcagatattccatctgcaaatgtgagaaaatcataggattgtgtaatgtggccttcagtgtgtcctcagtggggccttgctggtcaaagtacttgaatcatgtactatggtagcaggtgttttagaaataattacacagcaggggtagcactggcatcacaatctgcaatttgaaaccaaatggtgccccgagctttctattctgtcccttatgaaggacagagactaatcctggcccagtggctcctgagtccctaagccctgctagcattctcagccacatactgtactcaagcttcttgtgggagggcagttgtactaggtgcaagtgcatgaagtggttgtagggggctgtagggttgaaggatttaggggctgatcaagagaaaagatatgaccacaagaggcaataacacatcataagctttgttggtgcttgggtgcttcgatatggctgtgtgagaggggccctcatagcataagactgcccaggggctttcagtgaaggggcaccatctgggagaggagggtgagggaacttctaaggaagagggggtcaaaagaggggcttacgggtctagttatgtcatccagcagcatggcaggtcttttgagtcagagagctccaaagaactataaaagcttgaggtcttataaccacaaagctccatcttatcaaaagccagcagaagtggagtgaggttttgcagggtaggtaaagcagactggctctacgtggctggaaatctgatggtcaggctattttttagataattggatgtgttaaatagacatttctcaaaagaacatatacaaatggccaacaaacatatttaaaaatgctcaacatcactaatcatcagggaaatgcaaactaaaaccacaatgaggtatcgccttactcctgcaagaatgaccattattaaaaagtcaaaaaacaatagatgttggcacaggtgtggtgaaaaaggaatgcttatacattactggtgggaatgtaaattagtacaaccactatggaagacagcattgagattccttaaagatctaaaaatagacctaccatttgatccagcaatctcactactgaatatctacacaaagggaaagaacacagtatatcaaaaagacatgttcatacatgtacttattgcagcacaattcatgattgcaaagatacagaagcaacctaagtgcccatcgaccaatgagtggctaaagaaaatgtgatatatatacatcatggaatactactcagctataaaaaagagaaaaataatgtcttttgcagcaacttggatggagctggaggccattattctaaatagataactcaggaattgaaaccaaaacactgtatgctgtcacttataagctaagctatgggtacacaaaggcatacagggtgacataagggacttcggagactcagaagggggagggtagaagggggtgaaggataaaaaactacaatgtatactactcaggtgttggatgcactaaaatctcagacttcaccactatacaattcatccatgtaaccaaaaaccacctgtactccaaaagctattgaagttttaaaaatatttaagaataaatacataaacagatgtataaaaacctgactttggtgctggcaggcttttgagctactgggtttcagcctgcagtgaagaaatttttaaaaagctaggggccaatacacaaaggctgtctttggctcatatgtgtaacagcatgtaaggcctttggtgggattaacatatagttgaaagaagacaacgaagacataagtgatcatcaggagtttcctggttctcactgactaggtaatttgtaccaattgttcctcctgctgacagcaactagaaaaactgaaagaacacaccccccaccctcccccacttcccaccgccccccacccccacatattttaaaagcatttgcgagtaaagaattactgctaactgggccctgatcttggagaacagaagctgaaaggctaagcaggactttaaaaaacagccctacagacaaaagaggagaaaacttggacactagcccaacaaggatgaaggtcctgcaattttattgagattctgaagtgctgtaatccaggagaaagggtaaattagaaggaaatcttctgtggttgacaattactttggtggtcatcaacaaccatgcctgctggttttcatgtccttgtgttgtaagtcatgaatctgggatggctctctgacccaatttaacccatagaatatggcagaagtgatgctgtgcctaaatattaaaaaggtctactagtttctgcttttgttttaagctagccatcattccagaaatttaactaccccaagaccatcttgttgtgagaagcctcatctagccatgaggaaaagccacatggagaacagagttccccagacagcagccctagctgagctcccaaccacagccagcaccaacttattgggatatatgtgaagccatcttgggagcatatctatcagctccaatgaagtttcctcaaccaatgccaagcagagctcaaaattgtccccaccaagttctgctcaatgacaacatttgagcaattaaataaaatgcttgttcttttaagttcctaaactttaaactttatgtagcttgttacagagaaataaataataggaacaccagtcttgtatggactgcaactgaacttcgagtcatctgggtagccaaggaaaccttgatctttaatattggattaagatgatcttagttttgcaaagaccacagaaatctgaaaataggaaataaaaacactttctggtttaagataatatcttcttagtcctcaaattatttcttaaatatgttttaatgcaatgtttgacacagagataagcatacaaatcaagacaatatgaacaagatttagcagaaataataggaacagagccatgagaattttagacatttgaatgatcagatacagatcttaaaataactatctatgaccaagaagataaaatatgagactgagaatttttttttaaaatcctgaaaattatgtaaagggatatttcagatttgcaaaagaaacagaaactctacaacagaaaatacaatcaccaaaggaaaaaacctttaccaggttagagagttgactagaagatagcttagaagaaaataccaaagaagaattacaaaaagatggaaaatgaaaaaagatttaaaaatagaagatttattaacaagataaaaacgaagtttcattaacaagaaagaattacaaaaggatgaaaaatggaaaaagataaaaaacatagaagatttattaagttagatataagcaagtggagtctaaaaaggagagtagaaagagaatgaggaaaagccatttgaaaaaacaacatgtcgattttccaggttcatgaaagatattaaaccacatatactcaataaaagcaagtaaaataaagacaaagaactctatacccaggcacatcacaggaaaacttccagaatctaaacatgtgtaaagcctttatagcaaccagaggaaaaaatacatattacttttaaagcacaacaattagacttacagctgattttccaaccaaggtaacagaagccagaagacagaggacaaaagtcttcaatatggtgaaagaaggtaactgataacctacaattctacatccagggaaattttcaaaatttagttgaaataaagacatatttttttttagagaaaactgtgaattaatccccagtggatttgagaagaatgataaaagaatatataatttctaaaccaacagggaaaaaaagtagagtaatgagaaattaatccaacaagaaggcaagaaaggaaagggaaaagaaatatgagtatattttagaagggacaagtagaatacggtgactaaacctgaaaaatatcagaaattacattaaaaataaatatagaccaaatgcttcaattaaaagaaaaaagtcactttgaataaaaaactgacatcatatggtttttacaaaagacatatctaatatttaagaatacagaaaatttgaaaataaaaggaggggcaaagatgctatgcagatgcttaccaaaagaaagctgtatagctttattaaaattaaaatgaagacagaaagcattactacagataaggagcgatacttcataatgataaaaatttgacaccctccaaagtctaaaccaggaagaagtcgaatccctgaataaaccaataacaagttctgaaattgaggcagtaattaatagcctactaaccaaagaaagtccaggaccagatggattcacagccaaattctaccagaggtacaaagaggagctggtaccattccttctgaaactattccaaacaatagaaaaagagggaatcctccctaactcattttatgaggccagcataatgctgataccaaaacctggcagagacacaacaagaaaagaaaatttcaggccaatatccccgatgaacatggatgcaaaaatcctcaataaaatactggcaaaccgaatccagcagcacatcaaaaggcttgtccatcacgaacaagttggcttcatccctaggatgcaaggctgcttcaacatatgcaaatcaataaacataatccatcaagtaaaccgaaccaatgacacaaaccacatgattatctcaatagatgcagaaaaggtttttgacaaaattcaacagcccttcatgctaaaaactctcaataaactaggtattgatggaacgtatgtcaagataataagagctatttatgacagacccacagccaatatcatactgaatgggcaaaaactggaagcattccctttgaaaaacagcacaagaaaaggatgccctctctcaccactcctattcaacatagcagtggaagttctggccagggcaatcaggcaagagaaagaaataaaggtattcaaataggaagagaggaagtcaaattgtctctgtttgcagttgacatgattgtatatttagaaaaccccattgtctcagccccaaatctccttaagctgataagcaacttcagcaaagtctcaggatacaaaatcaatctgcaaaaatcacaagcattcctatataccaataacagacagagagcgaaatcatgagtgaactccctttcacaattgctacaaagaaaataaaatacctaggaatccaacttgaagggatgtgaaggacttcttcaaggagaactacaaaccactgctcaaggaaataagagaggacacaaatggaaaaacattccatgctcatggataggaagaatcaatattgtgaaaatggccatactgcccaaagtaatttatagactcaatgctattcccatcaagctaccactgactttcttcacagaattggaaaaaactactttaaacttcatatggaaccaaaaaagagcccgcatagccaagacaattctgggcaaaaaagaacaaagctggaggcatcatgctacctgacttcaaactatgctacaaggccacagtaatcaaaacagcatggtactggtaccaaaacagatatatagaccaatggaacagaacagaggcctcagaaatagcaccacacatctacaatcatctgatttttgacagacctgacacaaacaagcaatggggaaaggattccctatttaataaatcgtgttgggaaaactggctaaccatatgcagaaaactgaaactggaccccttccttacaccttatacaaaaatcaactcaagatggatcaaagacttaaatgtaagacctagtaccataaaaatcctagaggaaaacctaggcaataccattcaggacataggcatgggcaaagacttcatgactaaaacaccaaaagcaatggcaacaaaagccaaaattaacaaatggatctaattaaataaagagctctgcacagcaaaagaaactagcatcagagtgaacaggcaacctacagaatgggagaaaattttttgcaatctatccatctgacaaagggctaatatccagaatcgacaaagaacttaaacaaatttacaagaaaaaaacaaacaaccccatcaaaaagtgggcaaaggttatgaacagacacttctcaaaagaagacatttatgcagccaacagacacatgaaaaaatgctcatcatcactggtcattagagaaatgcaaatcaaaaccacaatgagataccatctcatgccagttagaatggtgatcattaaaaaagtcaggaaacaacagatgctggagaggaagtggagaaatagggatgcttttacacgttagtgggagtgtaaattagttccaccttgtgaaagatagtgtggcgattcctcaaggatctagaactagaaataccatttgacccagcaatcccattactgggtatatacccaaaggattataaatcattctattataaagacacatgcacacgtaagtttattgcagcactatgcacaataaaaagacttggagccaaccaaaatgtccatcaataatagactggataaagaaaatgtgatacatgtacaccatggaatactatgcagccataaaaaagaatgagttcatgtcctttgcagggacatggatgaagctggaaaccatcattctcagcaaactatcacaaggacagaaaaccaaaaaccacatgttctcactcataagtgggagttgaacaatgagagcacatggacatagggaggtgaatatcacacagtggggcctgtcagggggtgggggggtaggggagggataacattaggagaaatgtttaatgtaggtgacggattgatgggtgcagcaaaccaccatggcacgtgtgtacctatgtaacaaaactgcatgttctgcacgtgtaccccagaacttaaagtataataaaaaattgattcaccaagaatgtataacagttataagtttatgggcttctaaaacacatggcctaaaatatacaaaacaaagagttggcagaactttaaggagaaatctgcaaacctacattcatagtggaaagttttaacacatctggcttgataaatcaataaaatggctaaggatatagaagatttgaacaaaacaattaacaaacaaaatcaaaaactataaaaacaaagtacccaataagaacagaatatatacccttttcaaacacacatgtaacatttataaaaataataagacataaggcaagtctcaaattttaaaggatttcaatcataccaaatatgttctctaacagcaatgcaattatgttaaagagcaaaatttttaaatagctggaaattttccgtatgtttgaaaattaggaggtataatttaaaacaactagtggctaaaaataacaaaccataattaaaattataaaatatctataattcagtgctacatattaagatgtgaaatgcagtcaaaatagcacttagaggaaaatttatagagtttaatgcacatattagaaaaccaagcccagcaataaattttaaaaatacataatgaccaaactgagtttatcccagaaacataagcttcatctaacatttaaaaactcaatcaatcacattaacaggccaaaagagaaacaagatatctcctctataggtgcagaaataacatttggtaaaattcagcatccattcactcatagtgaattcagaagaaggacacctgttacagccacttttgacatcgtacttggggtggggggtcttagccaaggcagtacaataagggaagaaatgtaaatgatataaggattcgaagggaaaaaatccaattatcacttgagcttatataattgtctatgtagaaaatttaaaagaatttataatttaataaaatttggacatgagcttgggaagttggaagaataaaaaaatcaacatacaacaattatttcaaacataaaaatagaaaaaaattatttttatctgcaataaataattaggaacatttttaaatgtcaaaaccacaaaaaattaagctcccaggactaaatccaagaaaatatacatagaacataaaggtaaaaatgataaaactttaaaattcgttaaaaagattgaaataggttgacatactatacaaaagtcaatctccaaattaatctatagagtcaatgcaattgcaataaaaatctcaataggttgtgtgaatgtgcatgtgttcatgtgtgtgtgtgtgtgtgtgtatgtgtgtgtgtgtaaattgacaagctaattctaaaattcatgtggaaatgtacaggacccagaataaccacagaactcttgaagaacagcaatatggcagaatttgctctttaagatatgaagacgtattttaaagcatcacatgttagactgttattggcccagaaataaccaaattgaccaatggagcagaatagagatcccagaaatccagggaaaggattttcttttcctaataaatggtgctacaagagtggaatatctatttaaagtaagtgagattagacatctaccctccagcacattaaaatgtcaggtatcaatgggccatagacttccatatgaaaggaaaagctataaagattttagagttatagagagtttatagaacaatatcttcctgaattgaggaacaaattggttaattcagtaaattaaaagaaagaatttgtgattaccaagagataccataaagtaaaacaacaagaaagccccagaatgggagaagatatatgcaatacatataactgacaaagaattcatatctagaatatgcatttttaaaatactacaaattaattttaaaaaccaaagtaaaaatttgtaaaggactaacatgcacttagagaatatccaaacggtatatataacagcctcatataaaccacgagattgacagacattaaaatattttaagagctggggcagcatggttagaatcaggcctcaggtgactcagagactggtagagagtggtaggtagcagtagtttgattgcatcttgaagtgttggatggggcaaggaagagaatggagcaaaacattgtaactcttagaattatgtcactgcctcaaaataggaagatcttgagggctttagataattataactataaaccacatgtttatcttatctgccactaattaaattcactatgcattttagttgaaagctgtcattagattttgaagtggaaattagaggcattgaatgctatttctaatattagctatagccacattgacaggtgaccaagagtgtagagacatttagaattaaaggctcacattctggttgaatattatgtcactttaagtatcaatgtagaaatgacaacaaatgcctttaacaatggataggtgcctattctatttaaaaatactccaagcacttccttaaactctacattctatagttgtttccttgctctatggacaacatgcaagagggtgaggcattgcacgaccacctccttgacggttgtggaattttggcagctgtctctgctcaccatacttcccgaggattcctcagagccaagagtatctgccaagaggaatcaaaatgttgctgatgaccaggaattggatgtgttacaagtggaggtgttccagctctccgaatttgccaactccattgttaggagtgtgataaatggattgggtgcatctgcccttgtgagctgacagagatccaagctgtttaaaaaatgacaggaagccaccctagaaacaagaaaatgtatgtaaagaggcattttccagagatttcttccttcctgtttttttgtttgtttgatttggagtctcgctgtcgcccaggctggagtgcagtgatgcagtcttggttcactgcaacctccacctcccgggttcaagcaattctcctgcctcagcctcctgagtagatgggattacaggtatgtgccaccacacctggctaattagtagagatgggcatgttgacgaggctggtctaaaactcctgacctcaagtgatctgtctgcctggagatttcttcctttcaaggcagaaataacagccctttcatttgattggcctagacatgatatctttggaaccatggggggggaaatgctgcaattcctatttcagggcccagagtgagaattccgggaatattaatagtgctgaaatatagtaaacataaaagtaaaaaaatgacaaaaggcattttatgctattagcaaatatttcattataaattctgcatgtaaaaaaacatgtctacaatggtcctatctataagaatttataaataccccagatatctttcaaaaaggatgaaaataagttttggttaaataaatttaacatgaaccatcattgtttgatttttaaaaatttattctgagtttaggattagaatggattatacatcatgatttatgcttttaaatattttggtaatgtaaagcatcctgatgctgagctccttaaatattcatctacttcctaatcaataatagttcagttcctaaaatagatgtgatttgttccatttatcatgtagattgatttataaggtgtactctacttttctgctttacttctggacttactgttttaaaatgaaacaatttgttctaaactaatacagtaaacaaaagcttaaggtgtgttcctacatagacgtatgataggcacagtagggagatgagtcaggtggaatttccagcagagtccctcagaaactgctttctgatccacagaggagaaggccttatgcccacaagaaaatttctatagattattaagtggaaaaccctatttagaaagaggccaaatatgcatttgaatacaaaggaagtcacagtatttgttcagaaaaccaagagttagttaggacttgtggaagattaatgaaggggtcttaattttgttcaagagagacttttttgatagctgagttgaacttttagaatatatgttgtgacgttctgttaattctggaaaattcttctggttctaaatggaagtttggtgtaaactggtcctgttgctgaaactcttaaaggtctgtaggggcgggctactgatagcttcttggtaaaaagaaacttcgcatatttgccaacaacaaatgtctctcagactcaacagtcatgcagatactgagaattcctttggaaatgtgagaggagaaatagtactattgcgcctgtgcattcgaaccaagggacatcatttagtgaaaatgtacttgttaatcaccgctagtctgaaactcaccatttcacagtatttgcgctaataaagaatatacaaatgaacagtgcccttctaaaacgccatggttcattcttgtcaaataacacactctccttgtttttcttttattttaaaagaaaattggccctgaaacaccatccagacaagaatccagatgatccagctgctactgagaagtttaaagaaatcaacaacgcccacgcaatacttaccgacatttcaaagagaagcatatacgacaagtacggatcgctgggactctacgtggccgagcagtttggagacgaaaacgttaacacctacttcatgctgtcgagctggtgggcaaaggtgaaactgaatttcctttcttcacaatctcctgtaagaccatgatattaatcactcttttagattccatctcaaaggaagtctaaccttcctgctattaaactctggtaaataaaaggagatattgcttccactgaatgctattatttaggatcatttctggtttagctcatcaaataattgtaagatacaacatgatttaaaatacttctagacattaattatatttgaatttggagcttcagattaattctttataatgactaagtaaggactgactcattgctcaaaaccaaaaataatttattagtgtgacaactgcttaataaattattacggggcaaatttagccatgtccttttctatctatagcataggctacatcagcaaacacaatactgggaagaatgagtggtaattatgtcagagactcacttggagcctgctgtgaggtagaggagaaggaaattagggggaaaaggtgagaatttactagtggaggacagggaattggagaggcagagatggggacagagagcaaaatggatacctagtcaagaaaagggcgacatttttaagggcttagtgcaatcagaattgactttcgtgtggtaaattttgtttggtttcctaggaatctctagtatatatatgtttggtgatggtttttatttgtttgtgaatattaatatccttatcttctgataaaactatgtttacacatgggtcatacatgtagtccatcaacatattttgtggacggttcacattcatataagttccaatacataataataattattaaatatctaaaaaggcaggtttactagtagtatctgtttgctattttcttccactaaatcttgctaaattgagttttatgtatgcaggaagacagagaatatgtttttgtacatcagcatgcaaaaggattcttgcaacctagcctaatttgcttactatagtcctcagagttctgtttctcagggatacctgggattcccctttgaaacccctttctctgttgttgaagacttaggggagagacaagttcctgttgagcagatttggaatttggaatgagagtgtacacaccgacaatgtcatttatgacaatagattgaacgttcataggacagtacaagcttttgtgggtttgcgtgggaacccaacctctgggcgtgacactctttccatgggaagatactgcagaggcaggtccagataattacacacatccacctgatggcacatcagggcctgcctgcataaaaatgagaataaacttccttgctttggaagctgacaaaattgatcaaaattcacatggacaagcagaatctgcccagtagtgtgagagatacgcaaaataattcctggtgtggttctttaaacataagaccacagaaaaacatatcttttccttctccttgtgccaaagcccaatttcacggcacccatcagaatggccctgcacgtagcaatcatgtgataaatatgcactacatgaatgaatcagtgtaccacaaagatacatacttataaaaatattggacacctacctgtgcctagtactgtactaagcactgtaagggataaagcaagtctatttccacagaaggcaaacaatcaagttggaataaagaacaaaacattatatgaatgaaaagaaaaagttcagagaagagaataatatgggaattgcatggtaaaaacaaaaaggacaaaaatagcttaaaaaagggaggagtttcttggggcaatggctcaagaacactgcacaggaggctgtggagactgttagtgaggtggcgggtgttgtagttgtttacagagtaatttacctaagactacgaaaatgtaaattttccatagcaaagagattatatgtttgaggatgtgactgaagctcccctactccaagccaccagaggctccacctcaaacctggggccagaatcagagatgaagcccaggtctatgaagcaggagtggggcaggtgagggctgtcaacattaaagatttctacctgaagttattgaagaaatacacaggcacacaagtcctctttgtccctcttgctcccttaattagataaaatctgtgtttcaattaaaggtgtataaacctctttctttctatttcaaattacatatttttgataaaatcttaaattgattttgctcaattcacaaaaactgactttttataacttcacattggaggagttgagagtttcttttagtttttagctataacaaacagcgagcaaacctttcatgtttttggggaaatcctgctgctgttcaccaggtggagcaaatcatttgtttatttattactttatacaatcattaattcagctggtattttataagcatctaacacataccaggtactaagtccttcagtaggaggaactgaaagatgactagctgacagtgccagcttgcaggaagctcacagtctagtccaaactgatcaatgttctaaaagtatcacttaaaaaaagcaccaaagtagaagtctgcatgaaatgcaactggggacaaaggagggagtcattgttttgggcaggatcaggaaagatgtcatagaagggatctttaagatgagtcttacacaccaggtggatattttgttaggtgactggggaactgggaggtggacgtccagacagatgaatccacagggagagcagagttataaggcaatgaaaggcaagaacagggctgtgctggtgcagggaggcattggcagagccagatcaccataataaggatcttggctgtatctcagaggcaggagcgccatcacatgggttcaagagaacatgtatttcagaaagttcactctatcagcaatgcgcagcatggatttgagggaggccagaggggaggcagggaggccagttgcgaggctgctgaagtgtccagactagacatagtgaaggtctgttctgaagccctgctggccaggatagaggcatgagggaggatgcaagagacttgaggagagacgctatccaggacttggtgaccagcaggaatgtgagtgtaggagggggaggtatcggacagttcattctttatcattctggtgagaatgattcagctcccctgggcagggggcttgctaactcatttcacctgcagaggttttgttggttggttttttggtttttgtcttgctttgctctgctcttagtaatgatcaccatatagcttaagaataaaaaaaggaaggccatactttattactttggctacaagtcatttcctctgagtctaatttactaggcaaaactttaccaggaaattggtttctaaggaagtgaaatagttcttatgtggagtaaggatgagggtgaagatgtggcctgtggggtgaactgtgaagtgttcaggtctctgggggtacctgggtacagacttgatttcatgggttctcccctcaccccatcacccctcatcctcattttgctttacctctgtttccctaggccctgtttgtcatcgttggcctcttgacgggctgctacttttgctgctgcctgtgctgctgctgcaactgctgctgtggacactgccggcccgagtcatcagtgccagaagaggacttctatgtgtccccagaggatctggaggagcagatcaagtctgacatggaaaaaggtggggtaggatgagagcagaggtagtgagtgtccattcataggcctgagcaagcaccaggtcccacggggacagctatcactatagtaggagagctcccacaaccaaatgggtggaacttcacagactgtcagctttggtacagcttctggggagaatgaaaagatagatacctttaccaggcatagagaaaagcagtgcctgatgccgttagaaagaaaatcatgaaatatgctgatgatgaatcaaaggaaatacaattcaggtctcattacaagagagtgagcactggattcagggaggattgggtgagaatgctcagggcaggagaaccaaggtagaaattttttcacagaaaaagtatttcagccggttcctttaagatctcctttgaaatagaagaaagtgggcatcaaaaaaagtcaccaacccttgactttgcttctttttaatgacttgattatgaatttgggtgaactaggagagagaagtccttctttacctgaaatatagcttctttcaggagtagcctcaaaccagcatcaaggatgggactatttgcgttgctaacccacctccgtgtgtccatgtgtatgcatgactgtgatgtagtacttgattcttcaagttcatgctatccaaaaatgaaaaaattttaaaaatgtaaagaaagatgagatctcacaggattcacagcaccaggaatactttacgtcctctgggaaatgcctttgtttaaagaagctggggtcagacctgccattgtcctgctccaccttacagccaagatcctcctgtcattctctcccattattctctctcatagttatcctggagtacagactttatcactgaatccccaaaaaacctagacagccaaataaaagaattacttgataattcagacagtggcccatttttgtcagaactgctaaaattaggaacagtgtacttttctggactgtattgtactctgattcttttgatcatactgaaaaggaaattccaggttgtcaagcactggagactagttaaaggcttccacacaccttttattccctatgaaatgcagtgttaagtaatatccaggtattacccaccctgactccagctcagaggaaggggtcttcaatcatgtaaattgtacagattcccagactctttcaggcttgggagcttagagaggacagaaggagttttcttgaaacctgggaccccttgctgtggggacctgtaggtggccaatccagcaaacagaggggttgttctgaccattttttattactgaccttgaagccaaattgtgggcccatggtgaaacagaattataactttattttcctttattcaagatgtaaaaggacaaattaatcttttaatggggtcatttataccaagaagaccaagcaagcaggattacaagtaaatgggttaaggagtaatgtatgcatggaaactccttttcttcaggaaaaggtccgtgacattgacacaacttgcctgagaatgacaatcctagcatctgaatcctatctgctcttgtaaaggagagaaactgttacaagattatgtcaggggttgctggccccatagaccataggatctcccataacatccatcagcccagcccagtactcagtcactgacaggaccagaagagacagcaagataggagagtatcttcaacatcctccactgggtcaacctaactgaacttttcctttacagtgggaaaaccaaacctaggtatcccctaggatacctaggttcaatctaggattgaacctagatatccccaatccagtgtttcacacttctctgaacagcctcacagtctttcctgttttaaattagataaaagcttcaccaggtcatttcagtagaccttctttgtggaagatttcttttctggaacagaaatccatactaggtgccagattccacccaggtttcctccctgctgggtgattggtgatgaatctacatgtctctcactgttctcagctctgacaccccagagctatcaattccatcacagaggtcagatcctggatgaagtaaaccacgatcctgtttgactatgttaagaattcttaaccaaaaggaaaagctttatcttgtttctaaatatttagcagctcctatgcagggatccagattttgtgggacttgaaatttacacaatttgggcaaacctctttaagaaaaagaacacaaaattgatctgaaagtgaatatatatttagaatgagaaaaagaaatcacaacaaattgcaaggcttaaatacttaacaataccataaatttcacaaaatctagaaaaatcgcaattgtttaattaactgtctggcacagctctgcaatacgcttcccctgaggctttgtggctgcacatccattgattgcttcttcatattaatatagcaataattttgtaatattttcttttcttttcttttttttttttttttttttttgggagatgaagtctctctctctgttgcccaggctggagtgcagtggcacgatctcggctcactgcaaccgccgcctcccgggttcaagcaattctcctgcctcagcctcccgagtagatgggactacaggcatgtgccaccacacccggctaattttttgtatttttagtagagattgggtttcaccgtattagccaggatggtcttgatctcctgaccttgtgatcctcctgccttggcctcccaaagtgttaggattacaggtgtgagccaccacacctggccattttgaaatattttctatgaaaaaaatagaaaaatctgcctttcctctagcatgtttgatcaaaaagttttattactggtaaattagaaaagtttatttcagctttacaactcattattgataatgttgtctacatttttagggattgttgtcaaattcaggaaaacacctatttagtttatttcatatagaagatataagatttggaggaattttccacagaacacctttgatttgtacatttcaaaccttgttgtccttactccaaccagtactcccagcattagagcccaatggacacattcacattttgtaacatcacctctggtttagattttcatgtcccctcagcaagtgaattggcacagtgagctgtaggaatctacctaaagtcatttctacactcgtggggctacaataattaacaaacagagttgctgcaaaccacaaaaacgtatcccactaaattaaactgaaacctatccctaactctttatccccttaatcaaatccccaaaatgtctacagtccctctgctgccactcatcagacagagaaatgtgatggaaggaaagtcaaagtggaaagagatgtttttgttgattgtggccaaaatatctgtcttttgcaaataacacaaaatgtgaacacatcgttagggccccaacaggcccttggaaggcacaggtgagggtccctgagctgaagtttcattaactgtgcagtaaatccagcactgctcttggatctaccctctccttataaggaactatgccttatttgcagttagttgtattagttagattcacgtttatactccactaatccagagctcaggctggttaaggatgaaaatcagacttcatctgaagactaagctttctggactgtggtccaataaatggactggacttgcatctgctctgcaaaagaaggggactcacttaaggttctttaagaaaatacacttgaaagagtctactagccacttaaaaatcaagtgactcaagacaaagaataaacagcaatcatcaaggtttgaatccattagaaggcactggtatgacactggggctttaagaatcttattttaatgattctgaagtttaattcaaaaatggcaaactgtttatcacttggggaatccttcattcttaggtaggatctaataaaaaaaatcttaggattttagacttgggaggaatctgaggaatcaaccctcacctctgcatggcttttctaggcagctgctcagttgaaagccgcctgtggtggggaggtttaggactttgtttataagtaagagatgcccataaaaattcagccaccaaaggagggcatagagtctaacataactctacagtccaccctcaggcaccactcaaggataccaaaacacaattacatttatacagtttttgtgtaaacttttttgtgttttacaaaaatgtggtatccacatgttattatgcccttttcctgcatctttgcagaggaaaattttgatgaaatcatatttatcagttgttttttaagttgattgtgcttttgtggtgttatgttgagaactcagactaactttatgtcataaagactttctccaatgttttctaaaagtttctgagttttatgtttaacatttagatttatgacgcattttgagttaactttcatataaggtgtgagggttaggttcagactcttttttttttcttcttgaatatggaatctaattgttctaagaccatttgttgaaaatgttctctgtatcctctacatggtctctactatgtatcctttcttcattgaattgtctttccatctttgccaaaaatcaattggccagggccgggcacagtggcttacatctgtaatcccagcaatttgggaggcggaggctggtggatcgcttgaggccaggagttcaagaccagcctggccaacacagtgaaaccctgtctctactaaaaatacaataattagctgggcatggtggcaggtgcctgtaatcccagcgactcaggaggctgaggcacgagaattgcttgaacccgggaggcagaggttgcagtgagcagaggtcgtgccactgcactccagcctgggtgatagagcaagactccatctcaaaaaaataaaaataaaaataaatccgggaggctgaggcaggagaattgtgtgaacccgggaggtggagcttgcagtgagcggagattgcaccactgcactctagcctgggtgacagagcgagactccatctcaaaaaatatatatatatatatcaattggccatatttctatgaacctattcctatactctctagtctgtcccattgatctatgtgtctatctcttcatcaattccacactgtcttgctctcttgtagctttaaagtaagccttaaaatcaggtagtgtgattcttccaactttatttttttttacaaaattgttttggctcttctagtatctttgcttttccatataaattttagaatcaagttgtctatatctacagaaaaatcctgctgggatttttattggaattgcattaaatttgtagatcagcttggaaagaattgacatctttactatgttgaatattccaatccatcaacaatatgtatctctacttatccacgtctcatttgatttctttcatgaacattttgtagtttttggcatacaaagctggtaatgtcttgttaaatgggtacctaagtatttcattttggagagagctattgtaagtggcattggttttaattttgcttgcagttgttcattgcaagtatttacaatttctttttatattgcctttgtatcccatgtctttgctaaactcatttaacagtttggatttttgtgtgtgtgtaaattccttgggattttctatgcagacaattatatcatctacaaatagaaacagttttatttcttccattccaatctgtattccttttgtttctttttcttgccttgttgcactgtctaagatttctagcacttggtttgctgctgtgctgtcactgtcttaaaattcttaatttttgaataaggtacctcacattttcattttgaactgggtttggcaagttatatagccactactgaggatatttccttgtgtgtactataaatcaggatttcaagtttgatgacttttgccaacagaaatttttctttgaaggaactattagctacctttacatttacattaaaaaatctacattatataaagatgtttaaaagaacagaggagccaaccctcactggcaaggaagaagacaaaatgcctccagagcataatactctggttttagggaaggggaaaactaattaagatgagacaaggtgggatggggaagactaagtggagccagggctttatattaattacccatctaaattctatgttacagattattatattgtacttggagatttgaccagcatatgaagattaccacaggaaattaatttttcatacatgagcactaattttaaggaaatatggttagcagttctttcttctattattctccccatcttttatccagaaatgtcaagatgcaaagtatagtaaaactgatatggggcaatctttactccagaataaaagtaatagctacttaacactttgtcttcttataccttactatactaaaaaataagagaaaggaacagggattaactagggaaatacatttatgatttgaattcagttactgtattagtctgttttcacactgttataaagatacaaccagagtatgggtaatttataagcaaaagaggtttaattgactcacagttcctcatggctgaggaggcctcaggaaacttacaatcatggcagaaggtgaaaaagaagcaagcaccttcttcataaggtgacaggtgagagagagtgagcaaaggggaagttccacacttttaaactttcagatctcatgagaattcactcactattgtgagaatgggatgagggaaaccagccccataatccagtcaccttccaccaggtccgtccctcaactcatggagattacaatttgagataaaatttgatagggacgcagagccaaaccatatcattctgcccctggcccatcccaaacctcatgtccttttcacatttcgaaaccaatcatgccttcccaatagtccccaaaagtcttaactcattccagcatcaactcaaaagtccaagtccaaagtctcatctgagacaaggcacatcccttctacctatgagcctgtaaaatcaaaagcaagttagttacttccaagatacaatggaggtacaggcgttgggtaaatgttcccattccaaatgggagaaactggtcaaaacaaagggaccacaggccccagacaagtctgaaacctggctgggcagtcattaaatcttgaagctccaaaatctcctttgattttatgtctcatatctagggcatgttgatgcaagaggtgggccctcacagccttgggcagctctggccctgtggctctgcagggtacagcccctgcagctgcctttcccagctggcattgagtgcctgtggcttttccaggttcttggtgcaagctattgatggatctacctttctaggatctggaggatggtagccttcttctcacagctccactaggcagtgccccagtagggactgtgtgggggggctccaaacccatatttcccttctgcattgccccagcagaggctctccatgagggctttacccctgcagtagacttctgcctggacatccaggcatttccatacatcctctgaaatctaggtggaggatcccaaagttgagctctggtcttctgcacaccaggaggcccaataccacgtggaagccaccaagatttgaggcaccctctgaagcaatagccttagctgtaccttggccccttccagcctcatctggagctggagtggctgggatgcagggcaccaagtcttgaagctgcacagagcagtggggccctggccctggcccaagaaaccatttttttttctcctaggcctccaggcttgtgatgggagggccttctgtgaaggtctgtacatgccctggagacagtttccccatcatcttggctattaacattcagcttctcgttacttatgcaaatttctgcagcaggcttgaattcctccccagaaaatggatttttcttttctaccatatagtcaggttgcaaatccaaaccttatgctctgcttgccttttaaacataaattccaatttcaaaccatctctttgtgaacacatataactgaaggctttcagaatcagccagatcacctcttgaatgctttgctgcttagaaatttcttccaccagataccctaaatcatctctttcgagttcaaggttccatagatctctagggcaggggcaaaatgctgtcagtctctgcatgagtgacctttgcttcagttcccaacaagttcctcatctccgtctgagaccacctcagcctggacttcattgttcatatcactatcagcattttggtcaaagccattcaacaagtctctagacagttccaaactttcccacatcttcctgtcttcttcagagccctccaaactgttccaacctctgactgttacccagttccaaagtcacttccatattttcaggttatctttatagcagtaccccactctgcctgtaccaattttctgtattagtctgttatcactctgctataaagataccacctgagactgggtaatttataaacaaaagaggtttaattgacctcacagttctgcatggctggggaggcctcaggaaatttacagtcatggaggaaggtgaaggagaagcaagcaccttcttcacaaggcgacaggagacagaggagtgagtgaaagggaagtgcctcacttttaacctaatcagatcttgtaataactcactatcaagagaacagcatgggggaaaccgtctctatgatccaatcacctcccttgacatgtagggattactattcaagatgagatttgtgtgggaacacagagccaaaccatatcagtgaccaaacaccacaaatttcacttttgagtacatgttataggacattataactatttcttaatttatgaaatccaaatttgaaatatcaaatcctttcttaactgttgacttataaaaactattagaaatatttttcacctgccttaagatacttttaacaattctaattatgtatctaagactttttcttgcatatttattattatgtgcatattcaaacatgcctactccttgactctagctaaagtctaagataccttttgatgatacaaaattgtatcaatctttgttcaatagtggtggtacagggtgggatttggtagcagaagggagagatttgtttgggtttttatgtccctttaaactatatcggaaagtataatccagcttctacctttaagaaataaaggggggaagttcaaacagtggcatcttcagtattcactggcaactacagaacttataagcagattcctatgtctttcttaaaatagaaatatactcccaatgagatcccaggaacacagaggcattctattgttcttatgaatcaatcaagatcaaatggaagatagatagtgtcttgggggaacccttccccagttttgttgtctttgaaaatttgaaaccttaaaggtaaaaggtaataggtaccaacttatttcccttactttcatatgttcacaaattaggagttctacattgtgaaatttggggtggtatatttttaaaaagctcacttagaccctatactcctctagcagttgaaggccacaatgaaatcagaattccactatgagggctttacagaccatcttgagagagagccttgtttcatgggacaatgtatgtgtatgtagtgtgtgtgcgtgcaggcatgtgtgtgtgtgtgtgtgtgtgtgtgtgtggtagagagagagagagagagaaggtatggaagcaagagcccaaatcggaaccagttacctctgaacaccctggcaaagcaaacccaaaatataagatctaaattcagtttggtttttccaagctgaaggcagtagaatgacatccaaccaaaatttccagctaaaccctaaaacaaacaaacaaacaaaaaaactgtggagtcatgatttccccaattttttttaaaggagggagaataaaagagaaagtgttttatattattgaccttggatctaaaaatgtgagattcggtgcatagaaaaatctgttgactgcttaactgttcttgccactcacctggataaaacccaaatacattcacaaccacacaaccactgagatgaagaggccatatggcttgtaattagactctcactttcggccaagatattgagacatttattacatttgctatttagtattcatcacatcttactgcccaggaaaaaggcaccaaggaagagattaaattcatccttcccctttttgccactcaccactcaagcttcatcctacccctttcccccagtcaaaaggaatcaatttctaaaaataatacatggaaaacaatgcttgcaactagtcaagaatgctttgcttcttctttatatgaaaatatcaagcaagcaccatcaaggtcttgggccagagcagtaagacaggcttgtcagctctgaatgctcccccaaaaagcagctcaaagtgaacccaagatttctttgatttttggccatctaggttcagtgagcaaacttactggtcaggtttattgagatagtctttcaatagcaaacatttgctgagcacttagtatttgcctgatgccatgccaggggctagaggaaatgaagacatagttcctggtactttggaccttacaaactagaaggggagaagggaagacaaatattaagtaaataatcacatgaagaactagttaatttacaggtacaataagcctgccaaaggagaagcacaggggctgtgaaagtgagcacttggggcctcacctgcgtgcaggttgaggacactttcccacgaagtgacatttaaagcagaagactttaagaaggaggaggagttgaggggtaggggattctggggatggtgcactctagaagggaccaatcttagtacaagcaaagaattgtcacagcctctccccatattcttgtggataagatggtgaatggagctttgcatgccaggcaaggcaggtagagtcatattgggctgttctattgaatagttttatcaagtaatcgaatgaagcagaagttgtgcaatgactatttttcaaagaaacccaaactgagatatgcttagacaaaggttcaaaccatcaaaatgaaacatgataagtggaagtagctggaatccccatccccaatgtactagagaagtgcaagagtggtaggattacctaggaaaggggaaaaaggacttgagagactccatggtgaaaaatgcaaaaatatagaggggaggtgaaatattattcagccgtaaaaaggaatgaggtactgatacatgtggatgctacaatatggatgaacctgggaagatcatgctagatggaagaaatcagacacaaaaggacaaacattgtatgattccatttatatgaaatattcagaataggtaaatccaaagaggcgggaagtagattggtggttgccagggcctgtggggcaggaagaatagggagcaactgtttaatggggactgggttcccttttggggagataaaaatgttttgcaattagacaaagtgtgagtcatacattaactgtatatgtactcaatgccactgaattgttcactttaaagtggttggttttaagttatgtgaatctcatctcaattttcaaaatatatagtaggggagagggtagaccaagatttgactagaaaaagaaactgaacacccttccttcagaaaaggagagtcctttgttctctgcaaattcacgcagcacaacgagtggaggaaatcacaggcctaagccaggcattaacatccacgaaaagggacagggcaaaggtgactcagcctattacaccagctaccttgagggcagtctacgccaggagctaggacagagggctgtggagtcagacaatcctggctcaggcctcagctctctaagatactggttgaggttctcggggtaattcgcctaactcctttatctgttattgtttttctcaaatattaaatgatacaaataagtatgacctgagtttctacctcagaaaaagaatgttaccatcacctttagagctccttgtttgctcttccctcctcagacgtaatgatcttaaatcatgtgtaaccagttcttactattctttttagtattacaactatatttataatcttaatggcatattgcttggttttccctatttttgaacttaaatgaatagatttatatgcaataattatctttcttcatctttatttttactgtgtaatatttcttttttaaaaaaatagtttcaacttttattttagattcgtgggtacatgtgcagggttgttacatgggtatattgtgtgacgctgaagtgtggggtacagatcctgtcacccaggtagtgagcatagtacccaatagttactttttcaacccatgtctgcttctccccttcccactctagcagcccgcagtgtctgttattcccattttatgtctgtgtgtgctccattcagcgttgtccttctgagattcattcacattgtgactgtcattcatgtattttcactgttgtataatattttgggagaacatcccataatttacttatccattctactgctaatggacatttgagtactgtccactttttgccattacaaacggtgctgttatgaatgttcttgcatgtattttctggtgcatgaatgctagagtttttctaggtatatacggaggatgcaattacttagtcaaaggatatgcacttgtacaacttattaggtaacatcaagcagttctgcaaaatcattgcactaatttacattcccactaaccggtaacgagagttcctgttgccccacacccttgcctccacttgacatcccctgatggtaaatgtgtgacaatctagtaggtgggaaatggtgtgtcattgtggttctaatttttatctccttgattaaagttgaacatcttttcatatgttcattgctcatttgggtttccccttctatgaaatgccctttcagatcttttgcaggttttaaaattatatcatctgccttttccttactgatttttaaaatattctgggtattgattcttcattgattatgtttatttaaaacatattctcccagtttgtgatttggtgttttactctttatggcattttttgatgaatcaaagttcttgattttaatgtagacagactttcagtctttgcctttacgtttagtgatttttgtggtttgattaagaaatcctgtgctacctcaaacatataaagatgttctcctatatagattttcaaagttttatagttttgccttttcacatataagagtttaatcacctggaattgatttttacatgtagtatgatgtgggactccaatttcattttttttccagatagaaaacaaattgtttcagcacactgatttctaattttggttttgataaacattaagtttcaatagatatatggagcagtttctgggctttctgttctagtccgttggtctttttttttatgcaataccaagcccatttatcacaatccctaatatctgtttaagcaaatcctcctcacttgtacttcaggtgagtcatatatccttagcattttgctttcttatataaatctcaaaatcaggtttttgtcaagttatttaacaagaattccctaagcaaaactttttaggatcttggttagaattgcagtgaatctacagatcaacaggtagaattgacacctttaagaatctgagtcttttaatatgtgacatggtatatttcaccatttattagctttcactaaggatgtattttctatatctttattacatttatttttgaatactttaccatttttcttactaccaatcaattatatatgtattttcctacttgttttctggcatatagaaatgtacttttaaaaacattgatttttgaatccaagaaactaggtaaactctcttgctaattttaattatttacctgtaaattctttagggtttctacttaactgtttgtctcatctgtgagtactgacagttttgattcttcccctccatctcttatcattttttattttttttaaaccgcaccaagtatgtgaacccagtttttgttttgcctttctgtgtttgccaagactactagtaaaatgttgaagagaaggtactttcagggttgcatcataattagtaggtttgccgtaggtttttgatcaggttaagaaaattgtcttctattcctattttgttagaccttcatatttgatcacggatgtaaaattttttcaaatattttttcttcatcagagatggtcatgatttttctcctttgatctgttaatgtgatgaattatgtgaattggttttccaatattaaaacaactttgcactccttagataattaaattcagcatagtcttcatgtattgactattgtattatttgatgaaatgagctggtcaatattttgttttagatgtttgtgacaatattaatgagagtggtctataatttccctttctcaaactttccttactgtattttgtatcaagattatgcctcatgaaataaattacgaagtattcctttgttttttacttctcttggagagtttgtgtaatactgggattctttctacaggattttgaagaactttctgggctagcatgtaactgtgcaaattttaaactattgatttaatttacttaatgtttatagaccagttaggtttcccttcttttttatttacaaaaagaaaaaatggtttcttcaagatttcctcttatccttcatacatctatagtatctgcatgattattctgttttttattctttacattggtcatttctgctttctctctctctctcttttttttaaccattctcaccagatgtcttacaatattatcagtcttctcaaataaacaacttttggttttgttgattgtttctacttaatttctttctttctttcttatttctcagtttattttgttcattttctaacttcttaatttttgtacttcttaattttcagcccttcctctgttcttacattaaaaatttaagactataaattttgaattttcttataagttatactttagcttgacacacacacacacacacacacacacacacacacacatacaatgttcttatattgttctcatcatctgagttctaaatattttctgatttctattatgattttttctttaagctaggcctgtgtatatcttaattttcaatcttgggatttcgaggttactttttgttgtttgtatctaacttgactgctctgtgatcagaaaatgtcaacactatgataccagtgctttgaaatgtcttaggacttgctgtacagcctggaacttagccagtttttataaatgttccacattgcttcaaaacaacacattctgcatttgttatgttcattgttccatatatgtctattgaataaagctaatttattgtatatattagtttgctaaggcagccataacaaagtactacaaactgggggtttaaacaacagaaatttattctctcacagttctggaggtcagaagtcagagatcaaggtagcagggttggtttcttctgacacccctcttcttgttttgtagctgttcatctccctatgatttcacatggtgtttcctctgtgtccaaatctcttcttgtaaggacaccagtcctgttggattagggcccactctagtgacttccttctaacttaattacctctttaaagaccctatctccaaatatgatcacattgtaaggtactaggaattaggacttcaacatacgaattttggggagacacaattctgtccataacatagtccttttcaaattctacataagatttccttgcttgatttcatgagttaggtgctgaaagcagtcaaattttccacagtgatgatgaatttttctatttctctataaagttctttcgatttttgatttatgattttgattttgaggttatgttattagtatatataagtttagaatatttacagctacttggtgaattaaacattttattattatggagtcacttctagccccagaaatgcttttgtcttatatcttattttgtccattaaaatatacttacattagctttcttcccactagtgtttgtgtggtaaatatgttttcatcattttagtctctatttttatccttatttttaaatgtagcttgggtttttaaaattcagtctgacaatatttttcttttaaatagagtactatatccattggtatttattatcttcaatataatgtactttgatctttttctactaacctacttttcgtgagaggcaatagagaaatagtcttgaagagaacagacctctgagaaacactgccttggtttgaatatcagctctattgctcactacccgtgtaaccttggcctagttacacagtctgtgcccattttcttatttgtaaaatggttataataacaaccctacctcatagcattattataactattgagtgagttaatatacataaagtgctaagaacactgctggacatgtaataagatatatacatatacctactttctggtaatttttttatcattatatttatcactttaagttgacatgtttttcctgtttctttttttttttttcttttaaattgtcagagtgtcttttcttatttgatttccttctgtcctctgatttggaaattatattctcttttctgttcttttggaattaccctgaaaatttatcaaatgtacttaatttgtcaaagtttaaagtcaattcttatctttaccctcctcttgaacaatacaagaattttgtaacacgttaaccctgatcaacctatttctgacttatacattatttttatattttagatttttctcaattttaagcctcgtaaatttttattattgctttgtatattcaataattatttggttttactgacatattttctgggtttttttttcaattattttctttttacagctcaattctttcatctgataactgtttctgcctgaattatatctctaaattgggtctgcagttagaaaaatttgtttttactgactgaaaatatctttatcatgctcttttaaaaaagaaatgtaacttattaagagggtttgtcaaaaaatataggttgatgtcttctttcagtatattggagacatagtttcaatatgttttagcttcacagtttttttagctccatagttttagcttccatatttgctattgagaagtaagattgcttttaatatccttgtcttttctttttttttgagacggagtttcgctcttgtcacccaggctggagtgcagtggcacaatcttggctcactgcaacctccacctcctgggttcaagcgattctcctgccccagcctcccaaatagctgggcttacaggcacctgccaccaggcctggctaatctttttctgtacttttagtagagacggggtttcaccacattggccaggctggttttgaactcctgacctcaggtgatctgcctgcctcggcctcccaaagtgctgggattacaggcgtgagccactgcacccagcccaaaatctttatcttttgttctgcaatgtgactaagatgttttaaatatgatttttttgtttttctttgagacagagtctcactctgtcaccaggctggagtgcagtggcgtgatcttagctcattgcaacctctgcctcctgggttcaagcaattctccttgcctcagcctcctgaatactgggaccacaggtgtgtgccaccacgcccagctaatttttggattttcagtagagacagagtttcaccatgttggccaggatggtcttgatctcctgacctcatgatccacctgcttcggcctccaaaagtgctgggattacaggagtaagccactgcactctttaatttatcctggcttgttcttggatctatggattggtgtatttcatcaattctagaataggctcagccatcaaatcttcaaatattgtctctcttttttttttctttctgaaagttatgttagatatgttagaccttataattctatccatcatgtcctttgacctcttttatattttctctttgtctctcttaaattttggataatctcttccaatctgtcttctacttcactaattctttctttagctgttaagccaattcatgaaggttttttccatgttttaatctccagaaattctgtttaaaatttttatgatctattattttacttaatttatttaattacttttaaaacataattcttttgtattctgtgtctgataaaagcagttattgaagtctttctgggtctgatttagccttctgctgtttatattggatcttagcatgcattgtttccatatgtaatctctgtctctctgtctgtctctctctgtctctctctctctctctaattctctgtctctctctctgtcacacacacacacacacacacacacacaacttctatttctctacctctaatagtttttattatgagctcatgtttcttgcaattttataatgatattttgaggcctaggttgaaggtgaggtcattcacttttgctaagtgcttgagagcacatcttgcactggacctctttaaactaaattatcatcttgaggtttctcagaacacagaggtattgaaaacttggtctgccaacttgtgtattcattggcttgccattgaacatttttggggcagctttctcaactcagcacccaaatcaaaggctaacaaatctctctgtagatttaggagtagatttagtgattttagagaaagcataaccattttgggcactagctttatgtgaggagatttctattagactctccctctaagcaaactctcagttttgactcctgtcccaacaagggccagtcatccaattgtacactacataatgccagggtgcatctttcatataaactatacctttcctgtagatatacgttgtagtctatatgaaaggtgccctttgataatgttcagtttccaatctgcacaactgtatatgatggttctgtctgtattcccacaagatggtgaaaactaaagttcaagttcaccaggttcagcaagtgccctccaggtgaaagctgggtttggtgctttggttttataattccataactgacaaaatttgaatagagtaaagacagtgcctcctccctttcgaagtccttaaaatggtaggtatattgatatcttatgaattgagttgatttgccagtcatgaattcaacaaaaatacctatcacttgcttcattaaaagaactgtaacatgatgagagtgtttattgctttgctttgtttatttttagatgtggactttccagtttttctccagcctacaaatgcaaatgagaaaacacagctaatcaaagaaggatctcgaagttattgcacagactcttgatattgagccctcagagagtccacagtccctcctctcagttcagtcttgtctccagatggtcgtaggggagcgtgtggggcataaagtgctgtgaacttttccatcttgttgttttatttttgggttaggaaaacatgattgctatataattttctcagtatgcagactttctctctgagtagaatttcttatgaaacacattcaatttgggtgaataaaggcctgaagagttattttaccctccttgcctgatgtaggacagtggaattgtacagcctttatgaacctgccctttatgtgtggcagatctgattcctaactgaccaaagtaatattccagaacaaaagccacttttcttacatttaacacaatattcatatctaccacgaacatgatcatcaaaatatatgagaacttataaagagtttttgtgtgtggagcctcttccgtgtcaatattcaataaagttatagaaatgtttcaagagccagaaagggatgatttttttttaaatcacatttttaaggtatatttttggaacattaaaaattggcatttactgaaaactggaaaccaggaagaaacaggttttgtgtgtacttttagattggcttaaaaacaaaacaaaacaaaacttcaacctggttaaatgttgtaagtgaaccagaaaatcattctgagcctgaacccgccccatcagcatgttgatcattttctagtaaaataatttttgtataactggctcagattagccagactaagggaaaaaaaacagatgaaggggtagaactctatactctagagcctaaatttacaccaaaacatgtatcacctcatttttgttaaaattagttgccttgaccagaaattgctcagctctgtgcatgttacacaatttaagcccagaggtcatctctgcatttgcttgtttgattcttgtatttattatgtggtagaaaccatgtgctatttctaaaatactatggcagaaaaagtgttcgtttttctagctctttcttacttctttatataatattgcattttcaagatcttgttatgtttttatataatattgtataaaatgcctttatcttttttcttgtttcttattcccacccaaaaaattatagttaattgctgctaaatatatattgtaagtgagaattagtgttatagctctgatagttctgaggtcattaaaattccactctaactctttagttactgaaattctttttctaggcaatcaagtagacagagccttggtttgaaagctaagaaacctggttctaatctaagctttcattaactagccttgtgaccaagtgagatgaaaataacatggctaatctctctatggctctgttttcatatctgccctgaccaccttccaagttgctggatgaccagataaaatggctgaagtgaaagaaatctgaaaagtcaaatgttcaacaaatgtaaggtggttttaaatgaatttgtatatgttgacgcacacagacaaatgtactatgactcttgatgcatataaactctctcacccaacaagacccatggagacacccagtattaacagctccagtaaccagcaagtgcttggaacgctgtattcaacaaacaaatgctactttccatttggaggaaacaataggataaatagcgcaatctgtggataatttgagccattccatttccttcctgtggcctttttaagcaaaaggtcaggtctattttgaaaagcaacttacaaattacaaagctcaccttctctttcttgcccagacctcattttcctttctcacatggaattttttgcttccactcctagttccccaggaagctggtccaagagtggttaagatgagaacaggacatggatcagaatcagaatcagatggtagaatcaaattgctagaggggttctggccaatgttcctcacaaagggctagtttctggttacaatgatgtgtgacaaatgcaaacacttgaatacctatgaatgagggaatgaattctgcagaatactccttcagctacagagatacaagaatccactcttcatcagaggaggagctgctgaagtatattgtgggggtctacagaagtgctatccaagaagcactggcagtcattctgaacccacaagaagtcttcccttagcagggaagcttcaaggcaagaagagaaatgctgagcgtgagcctcatcagtggtcacacagagtccaatgaacagcccgtgtcaacagctcaccacctctcctgggcactgtgctactggaataggagacttcttaaaaagttccatgagtcatccatttatttttttgctgtcttacagtagaacataataaaaaaatacatgtgcatttttctttaccaaaacacacacacacacatatatatatctcaattcttttagaataagcgacattctatatctagaatgaaaaaactgtctatacattaattaacttattattattatttttttgagacagagtctcactgcaatctctgcctcctgggttcaagcaattcttgtgcctcagtctcccgagtagctgagactacagtcacgtgccaccacacccagctaatttttgtatttttagtagagacagggtttcaccatgttggccaggctgatcttgaactcctgacctcaggtgatctacccgcctaggcttcccaaagtgctgggattacaggtgtgaacaaccgtgcccggctacattgattaacttattagcataatagttttatataaaatgccttcatttcaaaaaagtttttattgtatttggcatggaaattatttttttaaatcaatgtgtaacatactagaaaatcagctaccaaaacttgaaagatacatgttattctgagtcaaagggtaaagttttaacaaaataaaatgagttaccttcctactcacattctgcatttcttagctctctcttttacctcttcccttagcatcccatcccccaaaatagaggatttgaaagtgttggccttaggctcataagtgcatttacttgtatttgagaaagatgatttattctttcacaaattaaaaataaaatttctaagagaataataaccaagagtcgtagtgcttagtacctgacactgccctaagagctttatattgattcatttaatacaacaacctgtgagagaagtactgtcaccatcatcatctgtcattttctagactatgtaactggaacacagaaaagataagtaacttggctaagaacacctagctatggagtagagcaggctggtcctgaggccacaatattaacagctgcactatatagcctctccaggatgaccttgtgtttccaactacatttgttcttgaacatgaatcctagtctcttccccactccccatccaactctttcccagagttctctgactttcaagagaatatactcactgtgtcactccctttattaactacctttctcttcaactgccctttgcagctcaaggagattcccctaagaaatcttccttgttaattccctgtgacttcctcaagagcaaatctgaaggcttcctatatctcttacttcactcccactccttccccttcccctttttcttcctctccccgctccccgccaccccagcacttccttatttgggagatctctgtggtcttagcagctatgtctttaccaccttctcttctctgactaacccataactgcaaccctaatcaagtgaaaagttggatttttaaaaaattttcaaagtgattctagagcagctggttctaataattgtgattttaaaaattctgatacataacttcctgccataattttccaggatgtttagatagtgccgagaaaacttttaaagataaaatagcaaacatatgttgtgcttactatgtgccagacacgattctagctgcttaatataagttaactcatgtaattcacacagcaaccctatgaggtaggcacaattactatttcccatttcacagatgggaaaattgggcagcagagagtcattaattaactcaggctgttaataatgggagagccagcatttgaactcagctagtctggttgtagcatctgtctgcttaattactatgccaccttggtgccctaagacatatctgaattctgtaaacttggatttacaactgcttatttaatgtcaaaatagtgtatacattgagtatgttctaatttgtccctctcaccaaaagtggataccataagcttataaatccaagttaatacaatttgctctattattctgagtccataagattggggtgggaacatttgttactatatataaaaataaggcatcttaatatcactcatacaattagaagtaaaatattttcatgttatccattcataataaaagtgaaattctacccaatttctccattgtacaaaatatgatacaaattatgaagtaaaaatataccattgaatctgccagactactaaattagcaatgctttattatttttcatagtattatacaaaggaaatacaatttgcaaatttttaaaaagaactttgttgccatttaaaataaagaacgtgtgtatgttcatgtgtatgaatacatttgtgtgtgtatatgtgtatgaatatatgtgtgtggtgtgtgcatgtgtgtatatatacatagatgtctatataccataagcaatttattttgcttccggtcatctgtgtcattttgccattataggaagcacaacacctgccacactcctgctctactgtgctttatttttctctttggcattcattactgtacagcctactgtatatattatttattgtcttcttattgtctatttacccttccagaatgtgtgcttcaccaagatagagatttctgtctgctttgcttactgctgtatccttatcctcagctctagaacaatgcctagcacatagtacagactaaataaacatttaaataaaagaataaatgtgagtctctgaagaaaacctcctggccacaccctcccaccaccaccaatcatacctttcggaaagatgctgtatgagcaagatgatgctcccacttccccgagcatggaagactgcaagtgagctttcaggacttacagagccctgggaatgagatgggttggccttgccatctcccagtagtacaaatgttaacccccttcaaaggggaggtaggctggggcttggtctcattaaatatcttttgatgtagtgatttggcatataattcaggattgcatttgggtgaataatgcagtcaatcttcattccatatttgtggagttacctacctagaagaggacaaactttctttacacaaactgtaggggaggaaatacttccttctgtcatcttaggttctgtggctgggcctaagaattaaacgataatagcataaaacatattaacaggagaaaagcatacgcatcttatttaatatttatatgtccatggaagtctttataagaaaaatgaagacccaaagaagacattaggtccaaaagcttaagtacctttttaaacaaagaatgataaatattagggatgtggcaagacaaaggggcttggtctgggtatagtagactgtggggttgtgagtggccaggggcattgttcaatatcaaagaatttttttaaaagatagtaccttactggcaaggtacttcctgacttcaaggataaagcatggatggaagcaatccagagaaagggttctcattgtccaggccttcttgttgtgcaaccaaaagactggctgctggtgttttatctttttccttcaaggcttggttgttagcagcttcacagataagggcagtctgactcataaacccaatggcgtttgcacaaaacagtagaggtagcctatcccttcctgccttaaatcttggggctcacttctcatccctactaatacatgtcctttgtgacatttttttttcccagaatagggcattgtcatctgcattaaataccattcaggcagatctcttttctcctcaatgattttcttaatgacatccagaaattcacctgctgcctcttggtcaggaagctgctcttgttatcttgacatttttaaagccaaaactgctttctaaaattatcaaaccttcctttgctggcattaaattctccagctttagacccttccccttccttttgccttaagttgtcatataatgactttgttttttctggaattatattagagtctataggtatgtctttcttagagcaattccgtacccatgtaaaagctgcattttcaatacaagataaagaggtttttggcaaaacgtgcaagggtttcatgcctgctagccagctgtagtgacggcttcacaaaggtccttacactggattcatttatcttgaaatgcctggcaaccacagctgtagacctcaatctatggtccatattaagcaattcaactttttctttttggatcaagacttttctctgcttcttgggagcatatccagcatcatgagtggcacttcgtatgggtcctgtggtgttattcaaggtttgtggtatttcactacaattaaaaaatcctcgagacccacaagagatcactttttactgccacaggcaatttgctggagagacaaactgctcatagggagattattaaagtcacgtacatggcattttaagcagatattcgaaatacttgaggtcaccacagtagcaatgggaggtggctatgaaattatcacagtagtacagtatgtactatggttaattttatgcagctgtgatttaatattgcatctttatgtttattcacatttcttttaactgtgcatggtgccatgtacaatttgggtttgtataagttttgagaaattttaacttcttaaaattttatggtaatacatgacaaaatagactactatctacatatatttcatgcattcatgatatacctttgtcttaattttttaatatttgtaggctatttggctcatgtcaagttttttcaaattgttgcagatctccaaaaaaatttccaatatattcattgaaaaaaatctatgtatgaatggacctacccagtttaaattcttgtttttcaaggatcaactgtattaaataaggtgtccttcaacagaaacacacataaaacaagattatccattgatcagttgacaaaaacattatggccagagcctccgtttatttcccctgggagcaatgttttcagcattcactaaatcagagttcaaaatgactttatacaatgtaattacacgaataatgagaatcaagtgtaccttccctggaattccccagaatagttccctttctgacctagaaacaacatctctgtggtttctcacaaatatccttcttggagatggtgcatatttagagaaaaccatggataagtcagtaagcctgaatacagccttgctcccctaatctggatggtcatcctaaagacattgtttaatctttctgggtagagcttcctgatctgtagaatggtttccttgactgaaaggaaaaacttgaaagctctttagtgcacatatgtctaaggaataatttttcaaataaacaatggcttttttttttcacatttcacggagtcttgacacacctccttggagcactgctgttaacaaatttaagggatttcacctttggatttagaggtgagaagagaataacctttaatagatgaaacgcttttctactcccagaatgtccattttctgaccgtactggcatcagaacctgcctttcaacctccttcctcccagagtagcagctgccagcccaatatccctaacccaagtgtccatctgaggacagagagaccaagcagtgctacagaaagccctggctgtgattcaggaggcctaagatctcatatgccacttctcccctctgttaccttggataagtcatttcacatatttgggcctcagtttcttcattcttaagcaatttttattacagaatatctataattagatgacaattatgggacactctgacccatacgtgttatgtaaaataacttacatatggttaaacaaaaatgtaatgatgtcaaaaaatgcagaaacaaaagcaaatttcttcaccatccccatatagtttgttagggctatcataacaaaatatcacagactgggtggcttttaaaaagataaatttgttttctcacacttctagaggctagaagtctaagctcaaggtattggcaggtttggtttcttctgagacctctctccgtggcttgtagatggccgtcttctccctgcgtcttcctgtagccttctctctatgcatgcatgtgcctgctgtctctgtattctgttctccttataaggacaccagttgtattggatcagggtgcaccctaatgacctcatttttgcttaattacctctttaaaggccttatctccaaatacagtcacattctgaagtactaggggttaggtcttcaacaaataaattggggtggggagggaagacagaacacaattcagcccaacaacaagcatgccatcaatttctcaaaattgtgccatatttcagtttgctttatatttgaaccacgtattttttataaagtttttttttgtttttttgttttttttagaaatccctgagtatcttcgttctgtctttttgagaaaagtgacatgtgcctttatcatatctctaaggtctcccagatccttaatcacactactattgtaaaagaatccgcttctttttgaaaaataaacttcccagagccctctaacttttttttcctccccttaatttgtcctgattgctttctttgccagctgcatcactgtcaacctgagattttcttttcattgagtccctgggttggtttccttttttcttaaatcctgtgtactcctccttcttggattcttactttgctttgctgaagtacatccatggcatacacagagacatgctgctagactgcctttcaagaaagaactcactgcccagctgcaaggaggatggttaactagtagccatcaggtgttaactcctctagccaaggttctaagcctctggccaatgactgagcaaggtggtgatgctagggccccaccatttctgcccaacttgagactcctccaaaaggaaatctttgctctggagccaccaagagggttggcagaaactttgtcgggtctgcatcactgtctaatgactacccctacccaatcctgtgtcctccccttttccattcacagatgttactcccctgtaaaatgttgtgctctaattctgcatgagcttcagcttactggagaacccatccagtacaacatcctcaaataatgtttacttactttttatttgtttcagagaggaatcatagatttaaactttatgagaccttgcaactatgaactattagtcctcatatgtgattgctactttgattggcatacaattctaggcttaaaattatttctttgcagagctttgaaggccatgctcaactgtcttctagcatccagtaatgatgatgagaagtctgatcataatccaattcttattcctttgtagctagcctagttcttgtttagattttgctttgttttcctccatctctgaaagttacagggtttcatctttatcctcaatgcttttgaatgtcactaggctgtgtccaggcatggttatttttcattcatcctaacttgcatgatcctttccatctgatgaccaatgtctttcttttattcttacccctgcattgtctctgttttctctttctggagctcatattagatactctttatgtcttcaggatctatcttttcttttttttttcttttctatcttttttttggtgtgtgtgtgtgtgtgtgtgtgtgtgtgtgtgtgtgtgtataaccagatctcactctgtcccaggagctggagtgcaatggtgcaatcaatcatagcccgcagcagctttgaactcctgggctcaagagatccttctgcctcagcctcccaagtagctgggactacaggtaaacaccaccatgtctagctaattttcgtatcttttgtagagatgggggtcttgctttgttgcccaggctggtcccaaactcttagcttcaagcaatcctcccgccctggcctcccaaagtactggaatgacaggggtgagccactgtacccagtgtcatgtttttattttttgctttccatggtctgatgtcctgggatatattttccattctatcttctatatcttcatagctgatctttagccatgaccagtatgttacttttcaccttagcaatcatacttttagtattcaggaactctcttcttccctagttgctcctgttaatatcactgtattttggttttcattgctgtaactctctcttggatgtccttgaggatatccctaactacttttttgttaaatagttctgttct

SEQ ID NO: 1380 - DNA, 2933 bp, Homo sapiens
aggagaaataacaggaggcgcagttactgatatagccaaggtgggacactactggagggagctagaagggatcagccagccatgcctccagttcaggtacttggcattgctaagctcagaacaggacttgccagtgtctagatgaaaaagaggagagatctcaagagggataaccaattggctggcaaagtaacaaatgaaaagtaacctgactctattgacctgcttaaccctgcatgggggggaaggatggaaaggagcagctgtttgctttgaaacggtggaacagttttgcagccttagaaaatggcatgtaacatacctaaccaaagacagcggactctgtcaacaacaggagaagctctatacgaaattcttggtctgcataagggagcatcaaatgaagaaattaagaaaacctacaggctggaaaatcccttcacctaaaggcacctggctcctcagctactaccaacaaggagtgttgggagcctcagaagcgggagacaaaccaaacaaaccaaagaagcaccgtaaagactctgaaaagtagattgttattggaaccactcacaaaagtaggctagaacctgcatgctaaacctaaagggggctgcctgctaaaataaaacaacttaaatagaacccattatctcccaacatgataaccaaaatatccagatacaaacaaaatgacccatcctacaaagaagcaagaaaatcacaacttgaataagaaaagacaatcagctaactcctgtgctgagatgaaccagatgttggaactatctgaaaagcattttaaagtaaccatcataggctgggtgcggtggctctcgcctgtaatcccagcactttgggaggccgaggctggcggatcacgaggtcaggagattgagaccatcctggctaacacagtgaaagcccatctctactaaaaatacaaaaattagccgggcttagtggcaggcgcctatagtcccagctactcgggaggctgaggcaggagaagggcgtgaacctgggaggcggagcttgcagtgagccgagatcgcgccactgcactccagccagggcgacagagcaagactgtctcaaaaaataaataaataaataaagtaaccatcataaaaaattcaacaagtaacgacaaattctcttgaagcaagtaaaaaaaaatggaaattctcagtgaagaaataggaattaacaaaaaagaaccaaatggaaactatagaaccaaaaaataacacaaataataaaactaactggatgagcttaatagtacagtggagatgacagagaatagaaattgaggacagatcaatagaatgttcccgatctgaacaaccgataaacaataaactgaaaacagagtctcagaaacctgtgggacaataacaaagatccaacatttatagcattgacatcctagaaggagaagagtgaaacaatgggactaaaagagtactaaaagaagtaatggctggaaattccccacatttggcaaaaaatagaaacctacagattcaagaggctgagagaactccgacaggataaacccaaagcaatcaatgccaagaaacattataattaaatttctgaaaactacagacaaagaaaaaaatttgaaagcagccagggagaaacaatgcatggccaaacacccatttgaatggcagcatatttctcatctaaagcaacagcagcctgaaggaagtgacaaaagatttttcaactgatgaaagagaagaactgtcaacagaaaattctgtatctggtgaaactatatttcacgagtgaatggggaaatacgttctcacataaagggaatctaaaagaattgtcactagcagatctcttcttaaagaatggctaaaggaagttcttcgaaagaaaggaaatgataaagaaaggatcttagacgatcaggaagaaggaaagaacaagggagaaagcagaaatatggaaaattggccctgaaacaccatccagacaagaatccagatgatccagctgctactgagaagtttaaagaaatcaacaacgcccacgcaatacttaccgacatttcaaagagaagcatatacgacaagtacggatcgctgggactctacgtggccgagcagtttggagacgaaaacgttaacacctacttcatgctgtcgagctggtgggcaaaggccctgtttgtcatcgttggcctcttgacgggctgctacttttgctgctgcctgtgctgctgctgcaactgctgctgtggacactgccggcccgagtcatcagtgccagaagaggacttctatgtgtccccagaggatctggaggagcagatcaagtctgacatggaaaaagatgtggactttccagtttttctccagcctacaaatgcaaatgagaaaacacagctaatcaaagaaggatctcgaagttattgcacagactcttgatattgagccctcagagagtccacagtccctcctctcagttcagtcttgtctccagatggtcgtaggggagcgtgtggggcataaagtgctgtgaacttttccatcttgttgttttatttttgggttaggaaaacatgattgctatataattttctcagtatgcagactttctctctgagtagaatttcttatgaaacacattcaatttgggtgaataaaggcctgaagagttattttaccctccttgcctgatgtaggacagtggaattgtacagcctttatgaacctgccctttatgtgtggcagatctgattcctaactgaccaaagtaatattccagaacaaaagccacttttcttacatttaacacaatattcatatctaccacgaacatgatcatcaaaatatatgagaacttataaagagtttttgtgtgtggagcctcttccgtgtcaatattcaataaagttatagaaatgtttc

SEQ ID NO: 1381 - protein, 96 aa, Homo sapiens
MLSSWWAKALFVIVGLLTGCYFCCCLCCCCNCCCGHCRPESSVPEEDFYVSPEDLEEQIKSDMEKDVDFPVFLQPTNANEKTQLIKEGSRSYCTDS

SEQ ID NO: 1382 - DNA, 1266 bp, Homo sapiens
agtcatgattgtgaggcttccccagccacttgtgttttccagagggataaccaattggctggcaaagtaacaaatgaaaagtaacctgactctattgacctgcttaaccctgcatgggggggaaggatggaaaggagcagctgtttgctttgaaacggtggaacagttttgcagccttagaaaatggcatgtaacatacctaaccaaagacagcggactctgtcaacaacaggagaagctctatacgaaattcttggtctgcataagggagcatcaaatgaagaaattaagaaaacctacagaaaattggccctgaaacaccatccagacaagaatccagatgatccagctgctactgagaagtttaaagaaatcaacaacgcccacgcaatacttaccgacatttcaaagagaagcatatacgacaagtacggatcgctgggactctacgtggccgagcagtttggagacgaaaacgttaacacctacttcatgctgtcgagctggtgggcaaaggccctgtttgtcatcgttggcctcttgacgggctgctacttttgctgctgcctgtgctgctgctgcaactgctgctgtggacactgccggcccgagtcatcagtgccagaagaggacttctatgtgtccccagaggatctggaggagcagatcaagtctgacatggaaaaagatgtggactttccagtttttctccagcctacaaatgcaaatgagaaaacacagctaatcaaagaaggatctcgaagttattgcacagactcttgatattgagccctcagagagtccacagtccctcctctcagttcagtcttgtctccagatggtcgtaggggagcgtgtggggcataaagtgctgtgaacttttccatcttgttgttttatttttgggttaggaaaacatgattgctatataattttctcagtatgcagactttctctctgagtagaatttcttatgaaacacattcaatttgggtgaataaaggcctgaagagttattttaccctccttgcctgatgtaggacagtggaattgtacagcctttatgaacctgccctttatgtgtggcagatctgattcctaactgaccaaagtaatattccagaacaaaagccacttttcttacatttaacacaatattcatatctaccacgaacatgatcatcaaaatatatgagaacttataaagagtttttgtgtgtggagcctcttccgtgtcaatattcaataaagttatagaaatgtttc

SEQ ID NO: 1383 - protein, 193 aa, Homo sapiens
MACNIPNQRQRTLSTTGEALYEILGLHKGNEEIKKYKLALKHHPDKNPDDPAATEKFKEINNAHAILTDISKRSIYDKYGSLGVAEQFGDENVNTYFMLSSWWAKALFVIVGLLTGCYFCCCLCCCCNCCCGHCRPESSVPEEDFYVSPEDLEEQIKSDMEKDVDFPVFLQPTNANEKTQLIKEGSRSYCTDS

SEQ ID NO: 1384 - DNA, 1389 bp, Homo sapiens
aggagaaataacaggaggcgcagttactgatatagccaaggtgggacactactggagggagctagaagggatcagccagccatgcctccagttcaggtacttggcattgctaagctcagaacaggacttgccagtgtctagatgaaaaagaggagagatctcaagagggataaccaattggctggcaaagtaacaaatgaaaagtaacctgactctattgacctgcttaaccctgcatgggggggaaggatggaaaggagcagctgtttgctttgaaacggtggaacagttttgcagccttagaaaatggcatgtaacatacctaaccaaagacagcggactctgtcaacaacaggagaagctctatacgaaattcttggtctgcataagggagcatcaaatgaagaaattaagaaaacctacagaaaattggccctgaaacaccatccagacaagaatccagatgatccagctgctactgagaagtttaaagaaatcaacaacgcccacgcaatacttaccgacatttcaaagagaagcatatacgacaagtacggatcgctgggactctacgtggccgagcagtttggagacgaaaacgttaacacctacttcatgctgtcgagctggtgggcaaaggccctgtttgtcatcgttggcctcttgacgggctgctacttttgctgctgcctgtgctgctgctgcaactgctgctgtggacactgccggcccgagtcatcagtgccagaagaggacttctatgtgtccccagaggatctggaggagcagatcaagtctgacatggaaaaagatgtggactttccagtttttctccagcctacaaatgcaaatgagaaaacacagctaatcaaagaaggatctcgaagttattgcacagactcttgatattgagccctcagagagtccacagtccctcctctcagttcagtcttgtctccagatggtcgtaggggagcgtgtggggcataaagtgctgtgaacttttccatcttgttgttttatttttgggttaggaaaacatgattgctatataattttctcagtatgcagactttctctctgagtagaatttcttatgaaacacattcaatttgggtgaataaaggcctgaagagttattttaccctccttgcctgatgtaggacagtggaattgtacagcctttatgaacctgccctttatgtgtggcagatctgattcctaactgaccaaagtaatattccagaacaaaagccacttttcttacatttaacacaatattcatatctaccacgaacatgatcatcaaaatatatgagaacttataaagagtttttgtgtgtggagcctcttccgtgtcaatattcaataaagttatagaaatgtttc

SEQ ID NO: 1385 - protein, 193 aa, Homo sapiens; identical to SEQ ID NO: 1383

SEQ ID NO: 1386 - DNA, 32180 bp, Mus musculus
  misc_feature (1)...(32180): n = A, C, G or T/U
attgttttgaaaaacagttgtgtgaatatttccactaacctgagttgggcttctgtgaaatgcacaggtggaaacagaggttgcaagccagaggcaatgaaacacactgtagggctagtatagaggggagcttttagagccggctaagtggtggtgtcaggaaagttccagaactaagcagaatgctgctcctttgttcagatttcactgaggctaggatggtggcagatcctgtgaatgtaattcaaatcagaaaggaaaagtaaacatgaccatttggattgggaaaccgagccttaaacaagtcaaacctgtacactgagaacgagcctcaggcttaatatttctttatgtttgcaaggtctgagcaattaagttcaatgaattaagtgtatataaaatagaacttttgtagtattttagttatacatagtacatacactaaagggaattttcagaagatcagatccttttatttcatagtacatgatctgcattccacatcccagtctagcaggttagtgatgcaaagatacttccagtctgaacttcagtgcttacacaggccctgtctcaggaacatcttaacagatggcaaaaaaaagtgagcagactttacgaatttttctcctatgagtggcaactaaggttcctgttgtttggaaaaaacactagtggtatgtccgctactaattcagtgttggaggaggcaccagccatatagtaggggtgtgtgtgtgtgtgtgtgtgtgtgcgcgcgcgcgcgcgcgtgtgtatttgtttaaattctactgtatatcaccatgaaatctgtctgtttgtcttgacaatgtttaaatgatgtagattgtcttagaatgaatactcagaagtactcagaactccgattccgatgccacccgagaggagtcagactcctgtcatgtatattgtattccaaccaatttactggaactattgaataaatctttattttctttcaggtttatttgacagtggatacattgtctggtgtcacaggaccttgactgggttcacctaaaacattgtactttactctgagtatatatttatttcaactggatcatttcacatttaccccgttgatattcagttaattatcagtgatactgtgggggaaaacagggttagataaacaagttggaaaaatgcagtgtgatgttgtaatctaaacaagtgccttatgtttattgctaagaactggtgttatcaacccttttactaagaagggtccctcggcctgtattcatgtaggaaagtgaagagccttctgttttcttcatagtcacttactgtcatgtctcattgaaagttacaatctgacgagcttagtttacttagctttaattagataggtgagtcatacattttcaccattttttcctgtatttattatgcacaataaaatgatctctaatagcatgactaaaagtagtgccgatgttgctggaaagctttctgggtcgtacgaggccctgttttttcaccgtgattgtaccgcatgctctactactctcagctgtgaagtgaaagctgtgaatgtatgaagagctcagaaaaccatggagtgttgtgacaaactcacatcctttctaatcaattggtaagactttctgttgccgggcatagcatctgtttggggaaagctaaaagggaaatactgaaaatgctaggcatttgttattttagataattactgtccttggattctgcaggtcgaccttcctgatgggaggagtcttcctatctgcatcgtgctcctggttcttacatttaaggattcttactaccgttttgctgttgtctaagctttgctgaacccattgttaagtctaagacacaaacccatgaaatggctgtgttgcgccataggaagcagaaatggtttcagtttctgctggttgaaaattgaacaacttgtagcaataaaaagcttttggaaaaggttatcaagtttcacttttcccttctgcagctataagctggttgtggaaagtctgtggtgtgtaggaggctctgaagaaggctttacttaacaaagggtgtcttgtatatatactctctactaaatgtagtaaaatgagcctacttccgtgaagatatacccataatattttttaaaacacacacaaaaaaactaagggtgctgagtgtgagagtgcatgcatataatcccagcacttgggagatggacttgagggctgccctgcaaaggcaaagcagggacgaagcctgtgggagtcaggagtcggctatttgtgtatgcagtgggtcctccagcaacatcatcttgggataagagctagaagaaagaatagcttaggaaaaagtttggtatggtataaattagaatttactgatgttataacctctgttttatttaccaaaaccagatgacagcctttgtttaaaggcttatagaaaacttaaggctgttactaccagtgcaacaaactattctgaggtctgtgtagcccctgctggcctccaacacagaggtcagccttcctttccctcctgagtgctgcgattaaacacatgtaccatgcctatctatgaagactttaaaaaacttatgtgtgcacacacgtgctatgtgtggggagtgcattgtgtgtaagtcaggacaacttaactagatcatatctcacctcccacctttacccagcctttacaagtgcttcaagagtcaagctgcaaggcaccttcacctgggagacacttcacttgcccataagtgaggccttggtctgtactttaagaacctgtatttcatgcagttggcttatttctacatgttggtagtctcattgtaaagatggtctggccttcctaaggacaaactttcttctcacttaggaatgacatgattttgaaagtgtgttctggatctcatgagttgatttcaactaatgatgcgtgtcttctgttcacctgtacatcactgacacagggactctgctgtctctggttttccactgtttggtcctgagtgaatttaacacttgtttactttgtaattgcagatttttcaggacacacggctacattgttctttcaaacgggctcttcttaggagctctaccctcaagtaaccaatcctatgctgctctgttacctttccaaatgatcaagtcacctcttcaggcagatggtgacgagactattcacctgggctctggagtaccagatactgataattcttaccttccttaacttagtttttaaaaactgagatcaatagacatatttaggaacatgtattcagcacttgttcagaaattcattaaaaaggacctaagaataagccaactgcttcacttgtttttgtttttatagtttaaaacagtctgttttgtagttttaaacagtccattgaacattttctgtttgctagaatttttgtgagtgaaatgtcttaacaaagttacatgactaatgtgttggcttaaattcttgtaagtcttccccaccctgaacccccagacagtttctgtgcatggccctggctgtcctggaactcacaggctggtctcaaactcacagagagattcattcgcctctgcccctcagtgctggaattaaaggtgtgcaccaccatgcccggctgtaagtccatttttaatttttaaaaattcttttcattgtgtgtaaacttggaggtccaagacactttgcagtagtccgttctcttctcccatgtatgagtcccaggatttgaactcaaaacatcaggcttgtggcaagtgccttcacccacgtagtaaacctatgcaatcttagacaaggataagagcgatgcgtaatagatattcaaactcgtgttgaggtttgtgcgactataattgcccccacagaatgtaggaggtaccaataactgtgaacttaggtcatccataaactcaaatttcctaaaccttagctatggttatagaagagtcatcttcttggtcctatctgttggccttgtataatcatgtcagcatactacagataatcatatttattgactttatcagtatgttttccacattaatctttgctcttatatagctcatcagaaatggttgtgtctttgtaggatacaggtggtggaagtaccatctctcattttttccattgttgtgatactggttggcattgaatgagctcatcttgaagcaggcacttcctaggtactgccatgcctagtgggactgacttactacaaaggatgccactcgttttctaattcttcaaagaatattaaggacattggtgacaggcatactacatccctagacctttctttatttaatagcctaacatctatagtcttagtatgcaggattgtttagcttctcagcatcatagtgagagtcattcacagccatccgctctagtccacagttgtgcttgaaactgtaaactcagccctgatcctgtattcaaatcccaggaaaactctataaacatgattttgaaagtgtgttctggatctcatgagttgatttcaactaatgatgcgtgtcttctgttcacctgtacatcactttaactgttaagctttctgattggtttaccatccacaataagtcatgtttactgtactgagacaccagtagagaacaaagaaaaagccaacctgttagttttatgtcattgaaacaactttgaatttcccctagacaacagcgcttttaaatggacagggacaaatacttgggcttttaaataccaatccagtacttgtaaaaacagctgaatttgactgttttcactacgagattgcatttacttgtaaataaatgaatccctattatgagaattgtgccaggaactttggcagtagagccaacgttggtaaaaggattgacaggttccaaagtcgtcaagtaaatttacctgctgagggtgttgaccaaacattctgggtaagactccaaaatctagctggtatttatagttattaaaaggtagataattttgtcactcagcctcagttgtatctgggatgttttctgctggttagtgtttattaaaaaagaagcaggattgaaactatttcttgcctctctagagtttatattattcctcaccatggtacacctggaggtctccattttcgatctgccttcacagaaggtccagaattagtaagattattttctttgatcctgtgactcaattgccaagtaacagcacaaactctaaaggtttcataccacagcagtataatggagttgttgcagcagcctgcaggtaagttagaatcaggttacagactgactcatgtctcagacactgtactaaaaatttctaggtcaaacatttagatataacttttaacttttttttcccactgtagcccaatgtagagtaaacaaggttattcttgtcagtattgctattttcattattcctcgtcattatcgcctgctatggctcactaggccaatatttaaggaagcagtttataattctttccttgataccctacaaattttaacttttacaaattatatttgtataaaatacaagagtgttgctgggcggttatattgaatgcttttaattccaacaatctttgagttcaaggccagcctgatctacataatgaacaaccagggctacacaaacaaaacaaaaccaaatcccacccccacccccaatccagtaacacaagaatgtctaaataggaatggataaattgaactatgtaaagttctgtagctaaaatgagtaaattagcaaaacttaattaagaattgccttccatggagctggggaaattggctatcttggtaaagtcttgccaagcaagcctgagcacctgagttcatgcccctgcacctacatagaactcaggctcacttagaatttcagcctttgggagttagagattagaggatccctgggatgctggccatagaggtgagaggattcctggggtgctggccatagaggtgagaggattcctggggtgctggccggatggcctgatacagagaccttgtcttcagcactcaggctggtgaagtagctccaggtgagggcctcagacatcgagtgctgacctgggactcatatggtggaactccactgatatccatgtgtatgttgtgatgtggctcctcacacacatgcacacagatatgtaattcaaaaaataagataggggctggagagatggctcagtggttaagaacactgactgttcttctagaggacctgggtttagttccagcacttgggagacagaagcaggcctgctctacatagcaagttccagaacagacaaggatctctgagaaacgttctctccacaccccaaaggattgagattgatagaggatacctgacattgatctctgtcatcaatctgggtgcacacacggtacacactcatcagcacgtatatacgtactgtaattgtacatagatttaaaccaaaaggaaaagtggaatgtaactgatacataatagcccagaaggaatgatttgtacccagttgaagaaatacatgaagaaggggggttgtaaagaggaaagatagttgcagcaggaaagaagtatgaagagaggtttgctggagaaatggtgtagaattcagagaggatgctcctgaaagtctggtgtcccaactccatctcccaagggttgggattagagtgcaccaccacacccagttttatgaagctctacaagttgaacccagagctttgcgtatgctaagtaggcactctcccaactgagctatgtcccagttgaagcagaaaaagtgtcttaagatttttgagatatatatatatatatatatatatatatatatatatatatatgtgtgtgtgtacacatatgtatgtatatgtgtagtgtgtgtgtgtgtgtgtgtgtgtgtgtgtgtatggtttttcgagacagggtttctctgtgtagccctggctgtcctggaactcactttgtagaccaggctggcctcaaactcagaaatccgcctgcctctacctccctagtgctcggtttaaaggcgtgtgccaccatgcccagctctgacttttatatttatcaactataaaatgatagttgtaattaagtgacttttcaaaataactacttctggtgctagagatcaaatgtgcctcacagatgctaagatgtactctaccatcagctccagtattactctttatgttactaaaaatggctcatggaaaagagtgcattctccctgtgtagccaccagagggcaccagtgaacagtttaacagccatacccagcatcctattttggagaaatcactttttcactatatatatctactgtagaaaaaaaaaaaaccaaaaacaagtttagtcattcataaatgttatcctaagagaattgttgagattttaagggtactggggatcaatgcagggccttgttaggtaaatggcttaccactgagttttcttttttttttttaacatatacatatttattttttatttggcattataaggacataataggtatactgcttgtttgagagagaatctttatgtagtcctggctgtcctggacctcagtatataaaccaggctggccttgaactcacagcagtcaccctgcctctgctcctgctacattcagcaggttgactttgaacttgagatcctcctgccttatccttctgcggacccgggatcatggctatgtgccacctttcctggctgacaaactatcagcttaggcaggaactaagagttgggagaaagaattctgggagagaaggaggtgggaagatttgccagaaagatacgacgggatgaactcatggtacctgagcacaggtaaccagccacatggcagaatgtaggctagaataaacgggatattttaatttatatctaatcagagaagaacctagctatatggccaagatatttgcagatatattttgagtctgagtcttatttctggaaggagtaaccagggcccaaccacaatgtcccacagtgcaacaccaaaatgtttataaacagtacagttccttgtatcacttcttcatgcctcgggtctcccatggaggcagaaaaagcccaagggccaggtgtttcctgagagcacacagagttgctttacagaagtgctatgcactgacgagatttagagagtctattcaagcatccatgtccactcatttccactcaagtgaaagaatgttcattgtgttaaatataagcatttttccttagtgggagagaaagaaggcctctgtcttagttattcttctattgctatagcgaaacaccatgaccaagacaacttagaaaataaagcatttaattgggggcttgcttacattttcagagggttagtccatgatcatcatggcagcagccaggctgaacttgaatcatgattatcctcctgcctcagcatgtactattatatcatgcagttctacattttcaatggaacttcaataggacccaagtctcaaaatgaaatgtttaaaatgcccaggatgtaagcccaattactaagcattcaaagaatgcgggaaatctcagtcctcctaggaaaaatgctgccaacactgcacacagatggtgaaattatctcatgaactattaaccatttaatggaggttaattctcatttgtctcatgtctgtaaattcaggcaaagtgatcaacagctttcttcctgggctcttttctagggatatttgtatagcaatcgttttttgcgtgataaaaaatatttttttcttcttgttctagggggagtcttgtttggtctccaggatgagaaaaggcaccatcactcttctggatgaagctggacagattcagagaccatttatgaaatacccgtttcctgcagagcatttcctgtaatgctaccacttacatcggacagacatcaccttggcctcatggcatcacttggggaatggggtatactctgcctctctgagaaggtgccttttctttctcacctaggagtttcattgacagttcatcaactggcactggaacttgttgacttacaaagttaacatgtcagatccttcagagttgactccaaaacgtctccatgtaaccactaacatactgttccagccttctcagtactgggattataggcatgtggtattacattcagcttaagtggtacttatttttaattttaaaccaatggtaacattcagccaggcatagtctcacacctgtaaccctagtattcaggagactaagacaggattcccacaaaaatcagagccagcctggatacacagtgaggttctaggccagctttagctacaatatgaaaatcctggggggggggggctggataggaaagaagggaataaggagatggttctaaatttggatccccagaacccaaggcaatgctgagcaggcatggaagacctcctgtaattcctaccttggaagatggagacagaatccccagagcaagttagctaccaagactagctctatggaatgagctctgggtttgactgagagatcctgcctcaaggagacctggctgtcctggaactctatggagttgaagagaatcacagagatttaagacttgtgttgctcaaaccagccgaaaacaatttgtctcttttacaaaacaaactgagcgggtcgtggtagtgtacacttttcattgcagcaccgggaaggcagaggtagaggagagtctctacggccaagatcaggttcaggagctgagtagcctctcaccctcctgcccacgccgttccgccccgctccacggaggcccggaggaagcggtgagcacaggggatgctcagagcccaactccaagccccaaccccggctgcgaccaggcggccacgacgccactgcgccgccgcctctcgcgagaccacagccgggccgcgcctccttcctctccgctgtctctctctctctccccgcccccgggggctgcgcagcttcctccagagctcgggaacctcggacgtggcgaggcggtcagaaggctggagcgcggcacatagaggtccctcgggcggaccttctgagccgcagtccagccagggagcgccgacgcatctttccaggtacaccgcaccgactggcggaggcctactgcgcgtgcgccggggccttagcggggcgccacacctgggtgggcaggggctgctcgcgcacgcgcgccgcggtgcccgcgggctgtggggagttgggcgtcgtttgtcactgctagggagcgctgtcgctggcgtggcgtcattcccgcggcttctgtgctccggctcagctcggggcggggcgggaggatgacttcggagatggagtcgtcgctggaggtcagcttctcgtccagctgtgcggtgtcaggggcgtctgggtgtttgcctcccgcccgctcccgcatcttcaagatcatagtgatcggcgactcgaacgtgggcaagacgtgcctgacttaccgcttctgcgccggccgcttccccgaccgcaccgaggccacgatcggggtggacttccgagagcgagccgtggatattgatggagagcgcatcaaggtgagccggtggggcggggacgctgtctcagcggagtgccgctccttcttggcaggtgtcgggacctcaccctgggtctgggcaggagtgtgcggtgcgccccatggcgtgggaaagtgtgtttgtatctatcaaacttctgaggcattgttcctccacctctaatgtacatcaggtttacctgggacttcttgtttttcaaaaaagcacgttctgatttgataagctcccctataacgcacatgcaatgagtctgtggaccgaccacactttgagtgacagaggtgtagggggcggtcacccccccactcccacccccattgcttgagtgagagttttgggctgggaatctgggtggtggtggtggtggggtataaccggaagaaactcagaaatttttcaagcatagaaaattccgttataagtcgggcctgggggaacacttcttaaatctcagcactctcacagagaccaggatctctgtgtttgagatcagcgtggtctaattagttccaggatagacagggctctcctggatagacagaatacacagagaaaccctgtctcaaccaaacaaacctcaaacaccccaatttaacaacaacaacaacaacaacaacaacaaaacctccgttatatctaggaattcttttgagcattgcacagatgctaagtattgtgggagtaaaacctgttgcctttgaggcgttttctgtatgataaccaatttatctagggggaaaaaaatctgttttctcattgaggcatttatatgtgatggttcttaggtggtttgccaacatcatatctcttgttgcaaaaacagaccctctcccaggtagctactgagactttgtaatcatagtaggaagtctaaggcagccaggttgggattctgaagggttgggttcctcaactgcagaataatgatccttgacaagtcaggggcctcctgatgctgtaaacctcggcactgttgcgaaactactaagggttacttaatactactccttaaaacatatgagatggaggtgtgtgtgtggggggggagcacccgtgtctttaactctagtattctgggagatagaggcaagtggatttctgtgcgttcaaggcagtctggtgtatatagttagtcccaggacaaccagggagactacaaactgcccccctccccacatatgaaacctgggaccacccacccccttaagcaactgttttacattgcagtctcctacatcagtctactcagaagaggtttgatttgcccctcctccccttcttcccttgaggcgtcgtgtttccgtttctatactcaccctttcctcaaagagttttacttttaccccaggaacaataaagggcaaatcatcttatttaagagatcaacccttctctgggcccctttgcttttaaatttgcctttattttatgtgtgtgcatgcacaggtgtgcatgagtatgtgtgtatgtgagtgaggtaagtctaggctctagggattgatgtcaggagtcttcctcgggtgctctctagctttactgttttgaggtagtctcctcaacgaatctggagcacactggttccatgagactgactaggactaggatcagggctgggatcacagttgtacaggtgccaagggtacaaatttagcttggcaagcactttctttcctttctttctttttcttttctttttttttttttttttccagacagggtttctctgtgtagccctggctgtcctggaactcactttgtagaccaggctggcctcgaactcagaaattcgcctgcctctgcctcccgagtgctgggatcaaaggcgtgcgccaccactccgggcttggtttacacttccacatcactgttcaccactgaaggaagtcaggacaggaactcacacagggcaggaacctggaggcaggagcagatgcagagaccatggatgggtgctacttacaggcttgcttcccctggtttggccagcttgcctccctgtacttcccaggataccagcaccacccacaataggttgggccctcgtccattggtcactaagtgtgaaaatgccttacagctgggtgtcttggaggcatttttctcaacttctcttgatgactctagcttgtgccaagttggcacaaacccagccagtatagtgtagaagcctgtggaggcgggaaagcttctggtgtgtgtgtcttttgggggtcagcagttgtggggaaagttgcccagttagcccaggtgcaagtgtgagccagtgatgctatggcatggatttgtctctcaagttcacttgttgggaatataattcccaagctcctaaataatgagacttggaggtgggacatttgggaggtgattgggtccttcagacttatgattgggttaatcccttcatagattaattacactaatctgtggactggttaagggattagttcatagattagtgaattaatctcatttatggattaatgggttagtgggagggttttcctacctataaagctgtgaaccaaatgaacctccattctctaagggtatgggtgctgtgtcgggcctccattctctaagggtatgggcactgtgtcgggcctccattctctaagggtatgggtgctgtgtcgggcctccattctctaagggtatgggtgctgtgtcgggcctccattctctaagggtatgggtgctgtgtcgggctttttgttttgctttgcttttgcttttctgaatattttaattaatgaataaatgtagagaccatcctcctgtgctctgcagccctggctgtcctggaaccctctttgcaccacagttgggttctaactcactgaagttgacctgcttctgccttcaatcccagcacttgggagacaggggtaggcggatctctgagtctgaggccagcctggtcttctagtgcagtggttctctgcctgtgggttgcaaccccatttggggttgagagaccctttccctggggtcaactaaggccatcagaaaacacagttatgctgggtgtagtggcataagcctttaatccaagcactcgggaggcagaggcaggcggatttctgagttcgagaccagcctggtctacaaagtgagttccaggacagccagggctacacagagaaaccctgttctcgaaaaaccaaaaaaaaaaaaaaaaaaagaaaacacagttatttacagtacaatgcatgacaataacaaaattacggttaagaagtagcaatgagaatattttatggttgggggtcactacagcatgaggaaatgtatttaagggtcacagcattaggaaggttgagaaccactgacaaagagaattccaggacatccagggctatacagaaatcctctcttgaacaaccaaaaaattacattaaataaaaaaatggtggtggtggcggcggcggcggcgaatgggtattaggaatagtcccttacacataggatctgatttttaagtcagtcgctggcttagaataaaggatgtactttcttttttgaaaacaaacaaacaaaaaatctcacataatggttatggttccagagctgggtgtggtggtatccatcttcagtcccaacactcacgaagcagaggcaggcagatctgagattgaggtcagcctggtctacacagcaagttctaggccatctagcaaacagtgagaccctgtctcaaacacagacacacataaacatacacacagtttatgtacatttttgtgtgagtgtgcacatgttcatgcacatgttcatgcacatgtatgtagaggccagaggttgatgttacatgtctccctcaattgctctctactgctgtgttttttgagacagggcctctctgaaagtggaacttatatccccagccctaccttgcactcatgaacctcctgtctttacctcctgggcgctgggattgcaggcaggcacacctggtttgtgcagtgctagggatggagtccaggacatgtctatgctgatggaactgtgtacatataaatctaagctctctccccacccctgtgtatataaaaagtctgtaaaacctttcctaagcagagtctgatggtgcgtgcctttattctcagcattcaggaagcgtagataggcatgtatgtgagttataggcctaccagagctacataatgtgaggctgaggcaggagtatagccttgagttgaaggctagcccgactacttagtgcattgagagcctctttgtctcaaaacaaaacaaaagagccaggcatggtagcacacctaatcctagcactcttggaattgtttgaaaagaactcaggctatgccactgggcagttgagctgtgtgtccacggccgccatcagtctggtagccttaaaaagagtcttcttcaattccacgacagctaagtgagagcctgtctaaacatacacggagagaaagaaaccagatctcccacaaagcctgtacttgctaattgatttctgagtgctagatacatataaatgcaagagaaaatcttgttcacagaatgttggcagctgaataaaacttaattccttaaataaaaatgcatttgactttgagattggttctcccggtcttatccatatgccccttcccgatgtcttgctgcatacctctcagcagtcatttggccatggcagatacctgagtatagcctgatatcctgagatttaacccagatctcctcattgatccgacgtcactacttaaacatatcagggctggtgtctatagacaaaagagtgagagttcactatgttaaaaacaagatagtaatttttttaaagatttatttatttattatatgtaaatacactgtagctgtcttcagacaccccagaagagagcgtcagatctcattacggatagttgtgagccaccatgtggttgctgggatttgaactcaggaccttcggaagaacagtcagtgctcttaaccactgagccatctctccagcccaagatagtaattttaactatggagaaacaatcaagatatggtttctccttagatcaaatatttaaagagtaataattgataaaatagatattttattaagcacaaagaatgataacatggtgtaaggagtagcaaactgtgagagtcaaatgctctactttttgttttgttttgttttgttttgttttttcgagacagagtttctctgtatagccctggctgtcctgtaactcattttgtagaccaggctggcctcgaactcagaattccgcctgcctctgcctcccaagtgctgggattaaaggcgtgtaccaccaccgcctggctaaatgctgtacttttaaaatattatttatttatttttatttatacgaatacactgtagctgctttcagacacactagattagggcatcagatcccattacagatggttgtgagccaccatgagggtgctgggatttgaactcaggacctctggaaaagcagtcagtgctcttaaccgcagagtcatctatccagccctctacttttttttaatgcaatctaaataatttttgtatcattttctgtgctggggcggaacccaaggcttttccatacatgctgctcaggccagtgctctgctccctaagctacaccccagcactgcttcatgtggttggaggaaagaatgagatttcatggtaaatgaaaatcacataaagttcaggacctaccgggtcatccagctgtaatctctatcttttacttcctcaatccagctagcttcacactgcagtttctcctgttactcccatcatcaaaaccctagctaaaactctgtctttaaccctgtccttggggggatggaggtctaagtccagtgatggagtacttgtctggcatgttcgggatgatggctctcctccttagtactgggggaaagccaaacctgcttcgaacttcgttagcagcccagttctcatttaaaaacagtgaacacaagccttcctttgtctggtgcacactgccctcttctttcaggcatcttagagtccagtcaaatcatttgctggtttcccactgctggctagaaatgtctctcctgtattttcctgcaaggtggttattccgagtctctttcttgagaatcccacccattctgcgtccttctgtgtaaacccccttagcctccaccaaaccatcatctcattgtatgggaagactgtcaggcaagaccggtttgagtctggtaacagctcccgatccatgcaggaggagctcaggcccaagtgttaagttgtgcaaacaggtcagttttgaggtaggttaccctggaaatcccaaattcaaatgattttaaaaagaaaaaaaaaaaaaaagccaatgaaaagaaaggtggcaaaggcagggcagtggtggtgcacgcctttaatctcagcacttgggaggcagaggcagaggcaggcgaatttctgagttcaaggccagaggctagcctggtctaaatgagttccaggacagccagggctacatagagaaaccctgtctcgaaaaaccaaaaatataaaaaaaagaaaggtgacaaaggacaaaactctaggtgaatgttgagggtaaagccaatgctagagggctcaggggcaagttacagtgaccggaggtgataacgcaggagcagaggtcatgaaagtgaggtggggcgtccacctctaaagtaagttttcatttattttatgtaccatgtgtgtgcctggtgcccagaagaggatgctggggtccctgaactagatagagttcctgactgttgtgaaccaaatcctagccctctacaggagcagcaaatgctcttatctgctgagctgtctctctagcctctgagtctttacagtttagaacagagtattgctcagttgcacaggcttgtctcaaactccagatagtcctgatacactgcccccgtctctggagtaacagaatcacagatagcagtatgcttggtggaacgttgaattgtatttattttgagatgctttaatttaaattgcatgtattttgtgtgtgtgtgtgtgtgtgcgcgcgcacatgcacgtgcatacttgtgcacacatgcatggatgcacacatgcctatggaagtcaaaggatgacttccgggaggtggtttgctccttccacagtatgggtcctgggattgaattaaggttgtcaggcaaggtagcaagcacctttccacgcctgagcagtcttgccagccctgaatacaggattcagatacctatgtttgatacaggtccttgtcatgtagctctggctgtcctggaacgcacaaagatccacttgcctctgcttggatgaaaggtgtgctccgccacgccaggataggagggttcattaggatcttatctgacaaattctgaatcagttcctaggacccactcatggttcaaaagacatcctctctaaatttaaaaaacattttataaaagtgagtcccaaggtagcagttctgtgctggcccgaggtatgatgccaggctcacgtttacctctgctctctgctctccttgtgaggctggttttactcctataaatgcctgctgtcaggcagcaaggggcaggctgagctgtgacatgggacatgttttaactgctgtccttgtgtgtgtttgtgattgtgtgtgcagctgtgcgtggaggttatagttcttcctcagtcactctctaccttagttttggggacagggtctctcactggaaactgatcagtccagttagtctgactggcctgcatactccagagtccctcctgtcctcacacctccactgctggggtggggtacaggggtgactggcgcaccacctgccgtgagtgctggcgacagaactcagtcctcagatttgccagcaaacacggtaccttctccccgggcctgaaagacagtagctttcatgggatgccctcttcctgggaaagctggttgcatgtaattgacaccaattctgctgctgggtctcccaaagtgccaagaaaatatgagaatgatttataataccgtatatttctaccttcaataaaattaggctcatgttaggaaacaggaagactactaagacaatgaagatgccgggcatggtggtgtatgcttttaaccttagaactcaggaggcagaggcagctgaatcggggagtgtgaggctaccctggtctatagagagcgttccaggccactgaggactatacagtaagaccctaccttaaaataaataaataaataaagataaaataaagagatttggatttaaagaactggcaggtgtaaaagtctaaactgagggctccatggaaggaaggcccagaggtcagaggtacttgatttctgcatcccacaggtcagtggacaaccaactcctgagctgatctctgacctgcatgcattcagcatggcgtgtgtgcacctgtgtgcacacgggataaaaaaactaaaactgcttttaatcccagtacatttgactcagcatgggcctctcatagcactaggccataggtattctaaatggtttttgtgtgttgtatccttttcccgcagtgatttttaaaaacattttaaaagcccatacctgttcagatttataatctgtatttagtagtcacattgtgactagactaggattatgaagcgtggaccctgcaggtaaagacgggccagagagcggagaggtgttacgggcaggaacagtggctgagttgctctgtttgtgccattggactgagcttgtcgactttgctttctgttttcctctccagatccagttgtgggacacggcagggcaggagcggttcaggaagagcatggtccagcactactacaggaatgtgcatgctgtcgtctttgtgtatgacatgaccaacatggccagcttccacagcctgccggcttggatagaggaatgcaaacagcacttgctggcgaacgacatacctcgaattctggtgggaaataaatgtgacttgagaagcgccattcaggtgcccacagacttggcacagaagtttgctgacacacacagtatgcctttgtttgagacctctgctaaaaaccccaatgataatgaccacgtagaagctatattcatgaccttagctcataagctaaagagccacaagccattgatgcttagccagctgcctgataacagaattagcctgaaacctgagaccaagcctgcggtgacttgctggtgctgagtcataggtgtggccattgcgggtctgacttacctgaagagatgattgggaagtgtgacagtgatgaagttcgtaagagtaaatcctaactgtagtagatcattctgctgttatcgttgttatgatgccttttgtattttgcatcctctcaatcaagtttgtcactgagacagcacatggaaaaggccgctttacagtggggattgaaaatgaagactaccggggccatctttccagctccagccagaagcagcagcttcaagtgagcatgatggaccttaaatggttggtcctcttcctctctgggtccctggagcagcagaagccatgctgggtagtgcacacatgcagagcagctggagcgagccgcaagctaatagggtgctttaattactctgtctttaagcactaaaaactaatcaaaagaaagcaagcagttgtaacaggagtttactttagccatgacatttaatcagaatatcaaatattctggtgccccttgtcctctgttcccagtcacagtcagttgggtgactcggagctgatttcagtcagcatccatttggctgggttctgtatgtatgttcctgtaattgtattgttggatgaggttttgacatgcgtgaattttatggccttggtataaaaattggtaaagcaaactgttccttggtataaaaaatgagttaagtattgaaaaatatcttacctgtccctcaatgatgaaagaaatggtttagaaagattttttttttttgccctaagtacttgtagtttgagtttaaaactttgcacaaaggaaatagcacgtttacatatgaaggtcttagcagagtggtgtgtaagctgtgctcagcctaagtccgcacatcctctttgtgacagcttgcaacccttgccaattttagaggaaatgaagccaaaataatgtcttacttaaatattttcataatgtgggaaacaaacataacccaacctagtttcagattcttgtttcattattctgatggtcccaactggacagttcatttatgaaagcaaaattgttctatttaataaactaagtgaaagtaacttaagggatgattgtacaatttaaatattaattcagtaaatacaatgaaatgaagattaggacccagattggctttctttgtagttagaaagatctttctttggttccttctttttttcttttttttaatagaaggtctctctttgtgggcctgactggcctgggacaggggtggcctcagacttacagataccgacctgcctcttcctccagctgctgggagttaaaggcttctgtcaccaggactagcccaatacatctttcttaatcatgctacaattaaagattaaaggttgtcttctgtctaaatgaatgctgacttgtgaactgttttcctggtgacacaaaatggcggtagtgacgggtggctgcagatgtttgtacggaggaacatctggtcattgttcttccacgttctgtacaccgagggtggggggagctgatctgttctctaagtacctctgtggttttcttctggactgtttcagtacagaactgttaattagtcatttttctttttaatgtaacttttcttaatgagcattcttacaattctgtgaaaagcataattttttcattttagtatttattaatcaaaacatatttgtaactcatttgtaacgacctatcactttagttttagttttttatttgaaaaagatacaacccaggtgagcaaggacaacccctttagatgtggtccaaggcgcttgggcttataacgcactttatagactattgatattactttcaaaatgatggtgaggtgacatcttgttacttttttaagcacaaatcacacattttgtacatctgtgattttattttggctgacatttaatggaaagtgtcacgttttaggaaaaaaaatcttaatttgtgaacagcaaagcaaactcctctggcgtctgttgtggttggttgacagtgtacacctctttgatgttctcccaacaaggatgatagttttgctgtgaaacagcgccacctttaacacttctcccataacgtacaataaatcatctttgccacgaggaagcgtttctttctttggttttctgggttgaatgtaaaattaaagaacgtacttcttcctgtctactgtggttttcagaaaatatgtacggcctacagttcgttcatttgaaaatcccaaatctggggctggtgagatggctcagtgggtaagagcacctgactgctcttccgaaggtccagagttcaaatcccagcaaccacatggtggctcacaaccatccgtaacgagatctgactccctcttctggagtgtctgaagacagctacaatgtacttacatataataaataaataaatctttaaaaaaaaaaaaaaaaaagaaaatcccaaatctgatatttagtctattcaaaacctttcagattttggattgagagtttttggattagggattcccaaccattgaagttgatacagatgactaaaaccaaacccaaagttaaaacctaagggattctcaagaatactcagtgcagacagcacatgtgctaaaaatggctggtgtggacttagctgagtgagcacaggtaactagagatggagaaggaagagtgtgagtcaggtacaagactgcatctagaccctgctggacagggcagaggtagctgttagtcagtttgtgttatctaagttactgttgtattcaaatgctaacttgcatccagagatagctgtcttaatcagatattcaccaactggccctgtccttcagacatgtatgtaggagggagcttgtggagctcagaagaggacatcaggtcaccaggagacacccgacatgggatcttaacttgggtcctctggatcctcagttggccatgtcctagatttgctagaactggcacgtgctattttaatttacttggtttattgaagtaatcttgtctgtccaatgtttgccaaattcctactgtgtgcccccccagtggttgtatgctgtggaattgtataaacaaatcgaactgtctttgaagagcttaaagtgtaggtaaggggctggagaaatggctcagtggttagtagtgcttgtttttctagaggatctaggttaagttcccagcacctattttgggtgcctcacagccacgtgtaactacagctttgggtgatctgatgccttcttctgggcctcacaggcacctgcatacacatgacataaactcacacacatacacacacacacacacacacacacaccccaaatgaggtaaatgcatggatgtcacattaaggaatttaaggaataaatcatacttctcttggagtaggttgaccaagagagcccaactttgactgcttcatttctctatgtgcgtcttccatctgtaggttgtaatttctggcctgtccgtagcccatatgttgtcggagtctgatctacccccttgcttgccctgtgttgcctgtgtgttgtgcttgttcctagcagagagcttgactctgtatctattgaccagcacaggaaacacggtatgggaaaatgagggaacatgttctctacagaactctttaactggtttacaagggaggatactcctgaccttaagtgatccacaggagcactccaaacctcataccttatcaacctatctgtacctgttgtttccagcatatatggtggctatttactttaacattgccttcgacatgttgactgctctcagtaaacaattaccacacatacctgcatgcactcatgcatgcgcacactgatttggctcatggagaggtgcacaattttaagagtaaatatgggggtttgcaaccccataggaagaacaatatcaactgactagacccacccccacccccagagctcccaggggttaagccatcgacaaaggagtaaacatggctccagctgcacatgttgcagaggacggccttgtcaggcatcaatgggaggagaggcccttggttctatgaaggctcaatagatgccccagtgtaggggaatcgagggtggggaggtgggtttgggtcagtgggtagaggaacaccctcatagaagcaggaggagggaggatgggatagggggttcccgggaaggggggaaactgggaaagggtataacatttgaaatgtaaataaagaaaatgtccaataaaaaaaagaaaaagaaagtaaatatgcatttgatttacattgtaaagctgttttgtatggaaaattcaaagcatattaagattggtgacattgttcccttacaggcaaattaaacaggctgagcacacagtaggacagcaggtgaagtttaaataacctccaggcatattattaacttggctgcaaggtccagcaaaagttcagtctctttgcaggcaagagatatgttcagaaagcacaccaccataggtaagtaggagttctgttgcaatgagaaggtgtgatcggttggataagcagacaccagaggagggtcctcagagtggagctgtgtgaaagcatcacaacagcaaagatgtctggatgacattctgaggtccatgtgaggtattctctgagtacgcgtatcaaacaggcttaaccaggcctgggaggtagtaggcagaatgcttgcctagtgtgctcaaagccctgggttagagtcccagcaccataccaaccagacatctgtagggtctctctgtaatcccagcactctggaggcagggtcaggacgataggatctagtggcatctttgactacctagtgagttcaaggccagcctagactacctgagaccctcgtaactcaaaaataaaaattaaaaagaagaaaaaaaggcaaaaagcaagtcaggagtttactgtaggaccctgactcctctctggctcgtctccttggactcaggggagctgaggctcttctcttgctgactgagccccacactgaatgtcctcattgtccctcagacaactgcagttctctatctctctggctcagtagggaggaacatgcggtcactgcccatttctggtgttggctgttggaaccacagcgaggaaaatgacctgattgtcaggcctagtgattatttctagaatggattgtgattggcctggcccgtaggtacttgcccaaggcccaaggcccaaggcaagtacctacgtttgtttatcttaaataaacaaaggcagtattttggatttcaggagagaaagaatttgtgggtagagggtagaaaagaagtagctgggactgcctcacagaaacgtggagttgtctgtacacgggtaacaagtgagaccttgttgcatagtagcaacatcacacttacgctgggagatctgtggcaatggaaggtatgtgggaatgaggtcatggtgacagtcgacttactgtaatagcctaaaagacaaagctgtaactgagaccctggcagaacgtactgcatatttacaatcccaggaggcagaggcaggaggatcagcatgtgagggtcctcctcacctgacaatgagtctgagaccagcctggcttgagatgtctcaaaatggagtgaatgaatgaatgaatgaatgaatacagatctaaaaggttgatcgtattgtgcagtgctagggtacttggtgaggatacttgaggcccaaggttcaataccatgtaccccaactcaataaatacacaaaataaaaaaaaaaaaagaacagaaagacttagtggatttgggtaacttgcagagtcgctaggcagatccaggaaagaaatagatgtgacaaatacaagaacagcaacacccaagagaaatgtccacctgagccctctgtcaggactgttctcctcagcactggtggcatcctggacctgccatccttgtgtccccagagctgctgcagaagtactgaagtacatcactgcccaaaggaccattcacctattattgcatccccacctgcacccctcacaactggcccacactttattatactgaataccatgaggcactggccaggtaacagctccacgtgtatacgggtagagaaaaatctctattcagtatttgaaattattgtgtcacttagttttagagtgctgaacacagaagccacgccttgcccgtgccaagcagactcagcctcctccacctgcatcctccaggccagcaaacacgcaaacatatttgtccacctttccagtccttccacctaaatgtgtcagtatttgtcaagcctggtaagtcttgttgaggagtcatacaggtctcagcccggtgtgaccctggagaccactggagatcacagaactgggctgattgtcctgtgtttcctgtctacctggatgcctggagctctacctagctctttggccttatttgtgtgatttctaatctcatttaaagatctctctctctctctctctctgtgtgtgtgtgtgtgtgtgtgtgtgtactgggagcaatgtggtggtcagaggacagccttgaagctgactcagcccaagttttctcttcccaccttcatgaattccaggctttgagcttaggttgccagcttaggttgctgaactgcaggactatcaacggcctccagtctcctcatcttcttttgaatgacagggtatcgatatgtggcccaagctggctgggaactcagagacccacctacctctgcctcccaagtgctgggacaaagggctgcaccaccactcccagcatatcctcactttagaaaagagactgacagtaactgtttggattattgtacgattaatgacttaatatatatgtcatatctattgttgcctagcagatttccccgaagctgagttgataaaacaagtgtattatccctcagttgtggtgggcgagggatagcaagccgttcagctaggctcttctgttttgggtgtccaggacaatgtcatctgaggggtggctgggaagagttgggcagttgaggtggggcagcttaaggttggtccttcctgttgttcgtaccctctctttgtggcagcttcaaggtgggtggccttgctgtactatagctggaaaactcctaaagcaagtggctcaggatgcatctgcatgtcctagtgtcacttctaaggaggtacaaaagtcactctgagcagcagtcgtaacagcttcctctgccttatgtgggtaagctctgtctggaatgagaggtctggcagagactatggccttttaaattttttgcatgggatcatgggcagttactgctcacagtggcctctgtcgtgccagagcaactaaaagccttgggatatagaaagctatgctgtacttctggcagagaatgcacgtacaccaagacatatgctaccttgccagatcttatacttctttttctttttctttctttcttttttttttttttttttgtttttttgtttttttgtttttttgagacagggtttctctgtatagccctggctgtcctggaactcattttgtagaccaggctggactcgaactcagaaatccacctgcctctgcctcccgagtgctgggattaaaggcgtgtaccaccacgcctggctttatttttctttctttaaaattgttttttaggttaccatctgaaatgatggattgattcatcgtgacactttcttgtgtacactgctctcatttacaccccctgctacctccttgctggtcccctttctctctgccagttgtccctcttttgtccccttgtcacatgtatctcatttctctctctccttttccttccagcacccttatggttcttctttccctgtttccgtcccttttggtttcctgaaccacatatattttaatacacatacacacacacacacacacacacacacacacacacacacacacacacggccttatttgtaatatccactaagtagctcaatagttggatcactaccaaacctccacgttgctaccgcctccccttcgatactcctgaattattatttactaaaatctctattccatctttgctgctctagacccaatggggggaggggcccctggggcctctcttcccaggctcatatatgactgtgtgctttctctcccgcagctgccaagtctaatcctcctgcttccccccggcatggagattctaaaaacttcttcccgtggtttccttgccccagaaatctagagtctcacctctgtctccctgcccagtcattggctgctggcaacttaatttaccaattaggaacccgcagcgtcttactcgaagatgtaggaattcccatgtaatttgggaacctaattaacataagcaataaaccaaatccacaacatttgtctttctgagtctgtcttattctattcaacatactgtcctcagttccacacgctgtccagtaaatgccatttcatttaaataaaagtatctatcagctgtcaatcaactgccatctattatctatctatctatctatctatctatctatctatctatctatctatctatctatcatcaatcctctatttatctatcagctatctgtcaattatctgtcactatctcaatcaatcatctgtctctgtctctctctctttctctccctctctctctctgcatgagtgttttgccttgcctgtatgtgtgtgcatcatgtatgcccaggtacccaggaactccaaaaaaaaaatgtattggcacacctgtaactgtagttacagatagttgttaactgccgtgtgggtgctaggaattgaaccctgggtcctctggaagagcagccagtggtcttagccagtgagccatctctatagctgcacgtttgccttttagttatttattatgtcctttctaccactttttctttcaaccctcacgtccttacttttgtgagcagcgtgtccatgttgggagttgaacccaggtcctctgaaagagcagcaagggctcttaactgctgaaccgtctctccactaagtagttattgctgccaatgtgtgcttgggccacccaggggccacatgcagagaaaacagactctcccatcccagcaaccatcaattgccaatagctcagctctgggtaggactatgctagaactttcactggcttgaccttgtccgggtcttgtgcgtgcagtcacggctggtgtgaggtcatatgtgctacacccctgtcatgtctggaaaccactgtcttgaagttgccctcctgtagagctggctcttacactctttccaccaccttttctgagatgatccctgagtgtcaactggaggtcccatttagagctgagcactttatggtttaataaaattccatgtctatatatcacgttttcttnnnnnnnnnnnnnnnnnnnnnnnnnnnnnnnnnnnnnnnnnnnnnnnnnnnnnnnnnnnnnnnnnnnnnnnnnnnnnnnnnnnnnnnnnnnnnnnnnnnnnnnnnnnnnnnnnnnnnnnnnnnnnnnnnnnnnnnnnnnnnnnnnnnnnnnnnnnnnnnnnnnnnnnnnnnnnnnnnnnnnnnnnnnnnnnnnnnnnnnnnnnnnnnnnnnnnnnnnnnnnnnnnnnnnnnnnnnnnnnnnnnnnnnnnnnnnnnnnnnnnnnnnnnnnnnnnnnnnnnnnnnnnnnnnnnnnnnnnnnnnnnnnnnnnnnnnnnnnnnnnnnnnnnnnnnnnnnnnnnnnnnncacagagaaatcctgtcttgaaaaacaaaatgaaagaaagaaagaaagaaagaaagaaagaaagaaagaaagaaagaaagaaagaaagagagagagaaagagaaaggaaggaagaaaggaggaaagaatgaaagagagaaggagaaagaaagaaagaaagaaaggaaggaagaaagaaagagagaaagagagaaagagagaaagagagagagagaaggaaaaggagacagacagacagacagacagacacttaagctgtcacttccttagggaggtttggtataatgtgcttttgtttctgaagtctatagcatgttgaaaaaaggtgcactccccctcagcattttaaaagttcgaatttttttatcttgttgaaaatccttctaagtttagagttgcattagactctggacccatttgttaaaaagacaaatgtgacatctaattaatgtgcaagagcaagccgggggggggggagggggagatgccaatctagcaaatgaatcccagtaaagacttgtgcatagtttatgatggaacagagaacccagggacaaggctaagcctggccaggcttgctcacatgatgggcgaaagttgagtaagctacgagggggtaaactagtaggtagcattcctcagtggtccctgcttcagttcctgcctcgacctccctcagtcaagtgtgagggtgggggtgtgtaagccaagtaagtgttttcctccccaggtcttttcggttatagtgtttatcacagaaagtgaacttggacagtgtgttctgagtatgggcacatagagaggtcagagaatcactttggggagtcacttctagctttatgtgtgtccctggatttgaactcagttctccaggctgggcagcaagcacctttgctgatagccattttgcctaggctatgtctcctgaagagtttagagagcctggccacactgctttgttagtgttttgtaaaccagctttctcgggaccaggtgctgccactgtagcctcacagcctgtggctctgtggccttgtggctctgtggccttgtgtcaccatgcctcctcactgtgtgaggcacagtaaagggccttctgcttacagattcatatcaagcatcctcccgtggctcttcatggtcgggaggggaggtggtctcattaattctgtttataatggctttgattgtgccagtctccacagcctgaggccagcatcttgtattcgattgccacacaatcaccccttctcctcaaagcatttgacatttgaaaatcactccgtctccgtaaacgatgcctcttgattctctagcaatttggctccgagggctttacaagaggaaacatttcctgatgtgatggtttgactgatgctttgtgaaaatgagcaatttctgcccagcatgatggcgctctggcaatatcgccctgggagttggcaccttctgggagttccgttgctggaaagtgaacccagagtcacgcactctgactttgtcttctctgctaagtgcatcgagcgagctagtacctcgcccttttaggaggtgatgggggaggcatggcatgcacacttgaaactgcaacactcagaaggcttagggagaaccctagcttggtccacgtaataacatcctctcttggaaggaaagagaatgagagtaacggacctcttcaccttcttttttttttttttttttccttttctatagctgtcttcagacacatcagacgagggtatgggatcccattatagttggttgggagccaccatgtgggtgctgggatttgaactcaggacctctggaagaacagtcattgctcttaaccactgagccatctctccagcccacttgaaccttcatttttaatttaaacttttttattttgaagcaagatctcaccaagttgccgaagctgaccttgaacacagtgttctggaggcaggccttgaactcataagtctctcagcctctgcgacagggtcagaagatccagagaggagttgagagctctgcggtacgtgcccgcttcactgtttcggccctggagagacaggctagctctgcagaggtccggctagcttctcacgatgtctcctctactaccgacccggcagaccctgaacggctgggagttcgtgtttcgtagaagcggtttttgccatctggccctgcttctctctcctttgtcctcagggccacaggtcatctttctcacttccgcctcggttcagtttgggagctcgtgggtagcagctgcctggtagaggaggtggctccctccgggctccagctggtgtctatttttgcactgagctgccttctagctcccgacctcttgcgagccttctttaatcattatttgacactagaccaaggagttttcagatgatctatgaaaatgtagaagacccagaataaagcaaagagtagaggccccaaaatatgaatatgaaaataaaatgactatagcaaacggaataattaaataaccatagactaaaatgtttactggcattattaactgatatatgttaatctgcattgcactgagaatatgtagctcaacggtagagcacttacctagcaagtgtggggctgtgctaagaccacaagaaagctggtgtttatcaaaatactcattatatttggagatagatagagacacattgtattatcccttttca

SEQ ID NO: 1387 - DNA, 3404 bp, Mus musculus
cgaggcggtcagaaggctggagcgcggcacatagaggtccctcgggcggaccttctgagccgcagtccagccagggagcgccgacgcatctttccaggtacaccgcaccgactggcggaggcctactgcgcgtgcgccggggccttagcggggcgccacacctgggtgggcaggggctgctcgcgcacgcgcgccgcggtgcccgcgggctgtggggagttgggcgtcgtttgtcactgctagggagcgctgtcgctggcgtggcgtcattcccgcggcttctgtgctccggctcagctcggggcggggcgggaggatgacttcggagatggagtcgtcgctggaggtcagcttctcgtccagctgtgcggtgtcaggggcgtctgggtgtttgcctcccgcccgctcccgcatcttcaagatcatagtgatcggcgactcgaacgtgggcaagacgtgcctgacttaccgcttctgcgccggccgcttccccgaccgcaccgaggccacgatcggggtggacttccgagagcgagccgtggatattgatggagagcgcatcaagatccagttgtgggacacggcagggcaggagcggttcaggaagagcatggtccagcactactacaggaatgtgcatgctgtcgtctttgtgtatgacatgaccaacatggccagcttccacagcctgccggcttggatagaggaatgcaaacagcacttgctggcgaacgacatacctcgaattctggtgggaaataaatgtgacttgagaagcgccattcaggtgcccacagacttggcacagaagtttgctgacacacacagtatgcctttgtttgagacctctgctaaaaaccccaatgataatgaccacgtagaagctatattcatgaccttagctcataagctaaagagccacaagccattgatgcttagccagctgcctgataacagaattagcctgaaacctgagaccaagcctgcggtgacttgctggtgctgagtcataggtgtggccattgcgggtctgacttacctgaagagatgattgggaagtgtgacagtgatgaagttcgtaagagtaaatcctaactgtagtagatcattctgctgttatcgttgttatgatgccttttgtattttgcatcctctcaatcaagtttgtcactgagacagcacatggaaaaggccgctttacagtggggattgaaaatgaagactaccggggccatctttccagctccagccagaagcagcagcttcaagtgagcatgatggaccttaaatggttggtcctcttcctctctgggtccctggagcagcagaagccatgctgggtagtgcacacatgcagagcagctggagcgagccgcaagctaatagggtgctttaattactctgtctttaagcactaaaaactaatcaaaagaaagcaagcagttgtaacaggagtttactttagccatgacatttaatcagaatatcaaatattctggtgccccttgtcctctgttcccagtcacagtcagttgggtgactcggagctgatttcagtcagcatccatttggctgggttctgtatgtatgttcctgtaattgtattgttggatgaggttttgacatgcgtgaattttatggccttggtataaaaattggtaaagcaaactgttccttggtataaaaaatgagttaagtattgaaaaatatcttacctgtccctcaatgatgaaagaaatggtttagaaagattttttttttttgccctaagtacttgtagtttgagtttaaaactttgcacaaaggaaatagcacgtttacatatgaaggtcttagcagagtggtgtgtaagctgtgctcagcctaagtccgcacatcctctttgtgacagcttgcaacccttgccaattttagaggaaatgaagccaaaataatgtcttacttaaatattttcataatgtgggaaacaaacataacccaacctagtttcagattcttgtttcattattctgatggtcccaactggacagttcatttatgaaagcaaaattgttctatttaataaactaagtgaaagtaacttaagggatgattgtacaatttaaatattaattcagtaaatacaatgaaatgaagattaggacccagattggctttctttgtagttagaaagatctttctttggttccttctttttttcttttttttaatagaaggtctctctttgtgggcctgactggcctgggacaggggtggcctcagacttacagataccgacctgcctcttcctccagctgctgggagttaaaggcttctgtcaccaggactagcccaatacatctttcttaatcatgctacaattaaagattaaaggttgtcttctgtctaaatgaatgctgacttgtgaactgttttcctggtgacacaaaatggcggtagtgacgggtggctgcagatgtttgtacggaggaacatctggtcattgttcttccacgttctgtacaccgagggtggggggagctgatctgttctctaagtacctctgtggttttcttctggactgtttcagtacagaactgttaattagtcatttttctttttaatgtaacttttcttaatgagcattcttacaattctgtgaaaagcataattttttcattttagtatttattaatcaaaacatatttgtaactcatttgtaacgacctatcactttagttttagttttttatttgaaaaagatacaacccaggtgagcaaggacaacccctttagatgtggtccaaggcgcttgggcttataacgcactttatagactattgatattactttcaaaatgatggtgaggtgacatcttgttacttttttaagcacaaatcacacattttgtacatctgtgattttattttggctgacatttaatggaaagtgtcacgttttaggaaaaaaaatcttaatttgtgaacagcaaagcaaactcctctggcgtctgttgtggttggttgacagtgtacacctctttgatgttctcccaacaaggatgatagttttgctgtgaaacagcgccacctttaacacttctcccataacgtacaataaatcatctttgccacgaggaagcgtttctttctttggttttctgggttgaatgtaaaattaaagaacgtacttcttcctgtctactgtggttttcagaaaatatgtacggcctacagttcgttcatttgaaaatcccaaatctggggctggtgagatggctcagtgggtaagagcacctgactgctcttccgaaggtccagagttcaaatcccagcaaccacatggtggctcacaaccatccgtaacgagatctgactccctcttctggagtgtctgaagacagctacaatgtacttacatataat

SEQ ID NO: 1388 - protein, 227 aa, Mus musculus
MTSEMESSLEVSFSSSCAVSGASGCLPPARSRIFKIIVIGDSNVGKTCLYFCAGRFPDRTEATIGVDFRERAVDIDGERIKIQLWDTAGQERFRKSMVQHYYRNVHAVVFVYDMTNMASFHSLPAWIEECKQHLLANDIPRILVGNKCDLRSAIQVPTDLAQKFADTHSMPLFETSAKNPNDNDHVEAIFMTLAHKLKSHKPLMLSQLPDNRISLKPETKPAVTCWC

SEQ ID NO: 1389 - DNA, 42108 bp, Homo sapiens
  misc_feature (1)...(42108): n = A, C, G or T/U
acactgtcatcagcctttctacctttgtcggaggagataaaccctacactgcctgaggcaacagtgatggcctcccctgaggcagctgccaggcaagataacgttgattctcctcaggagccacccccaatacccttgtttgcttctggatctataacaagactaaagtcccggcaggcccctagaggtgaggttcagagtgtgacccatgaggaggtgcactatactcgaaaataactgcttgagttttataatttatataagcagaaatctggagaacaggcatgggaatggatattaagggtgtgggacaatggtggaaggaacacagagttggatcaggctgaatttattgatttgggcccactaagtggggattctgcatttaatgttgcagctcggggagttaaaaaaggttctaatagtttatttgcttggttagctgaaatatggattaaaaaatggcccactatgagcgagctggaaatgcctgatctctctcaatttaatgtagaggaagggatccaaaggcttaaggatattgggatggtggagtggattagccactttagacctactcatcccagctgggagggtccaggaaatagacccaaaaccccttgaatgaaggggaggccagtccccttgaggaaggaccccgctatattaccgacaatttatgctgttaatctttctctcattctcccccaagaagatctctagccttttaccagggtaaaactgtgcactggggaaagggaaatgatctgacatttcagggactactggacactggctctgagctgacgttgattctaggggacccaaaatgtcactgtggtcctctagttaacataggagcttataaagttcaagtaattaatgaagttttagctcaggtccaactgacagtgtgtccagtgggtccctggactcatcctgtggtcattttcccagtgccagaatgcataattggcacaggcatacttagcagctggcagaacccccacattggctccctgactggtagagtaagggctattatggtggaaaaagccaaatggaagccattagagctgcctctacctagaaaaatagtaaataaaaaacagtatcacatccctggaggggttgcggaaattagtgccaccatcaaggacttgaaagacacaggggtggtgattcccaccacatccctgttcaactctcccatttggcctctgcaaaagacagatggatcttggagaatgacagtcaattatgtaagcttaaccaagtggtgactccaattgtggctgctgtatcagatgtggtttcactgcttgagcaaattaacacatctcctggtacgtggtatgtagccattgacttggcaaatgcctttttctccattcctgtccataaggcccaccagaagcaatctgccttcagctggcaaggccagcaatatacctttactgtactacctctgtggtatatcaactctctggctgtgtcataatcttatttggagagaacttgatctctttttgcttccacaaggtatcacactggtccattacattgatgacattatgctgatcggatccagtgagcaagaagtagcaaatacactggacttactggtgacacagaagatggaaaataaatctgactaaaattcagggaccttctacctcagtaaaatttctaggggtccagtagtgtgggtcctgtcgagatgttccttctaaagtgaaggataagttgctgcatttggcccctcctataccaagaaagaggaacaacgcctagtgggcccatttggattttggaggcaacacattcctcatttcggtgtgttactctggcccatttactgagtgacccgaaaggctgccagttttgactggggtccaggagaaggctctacaacatgtccagactgctgtgcaagctgctctgccacttgggccatatgacccagcagatccaatggtgcttgaggtgtcagtgacacctcaagggatgctgtttggagcctttggcagtcccccataggtgaatcacagtagaggcctctaggattttggagcaaggccctgacatcttctgcagataactattctccttctgagagacagcttttggcctgttactgggctttggcggaaacggaacgtttgactatgtgtcatcaagtcaccattcaacctgaactgactatcattaactgggtgccttctgacccatctagccgtaaagtgggtcatgcacagcagcattccatcatcaaatggaagtggtatatacgtgatcaggctcgagcaggtcctgaaggcacaaataagttacatgaggaagtggctcaaatgcccacggtctccactcctgccaccctgacttatctcccgagcctgcaccgatggcctcatggggagttccctatgatcagctgacagaggaagaaaagactagggcccggttcacggatgattctgcacgatatgtaggcactacccaaaagtggacagctgtagcactacagcccctttctaggacatccctgaaggacagcagtgaaaggaaatcttcccagtgggcagaactttaagcagtacacctagttgtgcactttgtatggaaggagaaatggccagatgtgcgattatatacttattcatgggctgtagctaatggtttggctggatggtcagggacatggaagaagcataattggaaaattggtgacaaagaaatctgggaaagagatatgtggatgtatctctctgagtggtcaaaaactgtgaagatatttgtatcccatgtgagtgctcaccaatgggtgatctcagcagagaaggattttaataatcaagtgaataggatgagcccttctgtgcatactcagcctctttccccagttacgcctgtcattgcccaatgggcccacgaacaaagtggccatggtggcagggatggaggttacatatgggctcgggaacatggacttccacccaccaaggctgacctggctacggccactgcagagtgcccaatttgccagcagcagagaccaacactgagccctcgaaatggcaccattccttggggtaaccagccagctacccgatggcatgttgatgatattggacctcttttatcatgtaaagggtagaggtttgtcctcactggaataaacacttattccagatatcggtttgcctatcctgcatgcaatgcttctgccaagactactatctgtggactcacagaatgtcttatccactgtcatggtattccacacagcattgcctctgaccaaggcactcactttatggctaaagaagtgtgacagtgggctcatgctcatggaattcactggtcttaccatgttcccccgtcatcctgaagcagctggaatgatagaacggaatggccttttgaagtcacaattacaacatcaaccaggtgacaacactttgcaggcctggggcaaagttctccagaaggccatgtataccctgaatcagcgtccaatatatgatactatttctctcatagccaggattcacaggtccaggaatcaaggggtggaagtggcaccactcatcatcacccttagagagtcactagcaaaagttttgcttcctgttcccatgacattacgttctgctggcttagaggtcttagtttcaaagggaggaacactgccaccaggagacacaacagcaattccattaaacaggaagttaagattgtcacctggacacttggggctcctcctacctttaagtcaacagtctaagaagggagttacagtgttggctggggtgactgacccggactatcaagatgaaatcagtctactacttttttttttttttttttttttttttgagacagagtctcgctctgtcgcccaggctggagtgcagtggtgggatctcggctcactgcaagctccgcctcccgggttcacgccattctcctgcctcagcctcccaagtagctgggactacaggcgcccgccactacgcccggctaattttttgtatttttagtagagacggggtttcaccgtttttagctgggatggtctcgatctcctgacctcgtgatctgcccgcctcggcctcccaaagtgctgggattacaggcgtgagccaccgcgcccggcccagtctactacttttaagtcaacagtctaagaagggagttacagtgttggctggggtgattgacctggaccatcaagatgaaatcagtctactattccacaactgaggtaaggaagagtatgcatggaatacagagatctattaaggtgtctcttagtattaccatgccctgtggttgaagtcaatgggaaactataaaagcccagtccagaaaggactacaaatggtccagacccttcagaaatgaaggtttgggttacgccaccaggaaaaaaaccacgacctgctgaggtgcttgctgaaggcaaagggaatacagaatgggtagtagaaggctagtcatccataccagctacaaccaagtgaacagttgcagaaatgaggattgtaattgtcctgagtatttcctccttttgttaaaaacatgtttgtgcatatatacacttgtactaagaaaatatcttcattttatttcctttttttttgagatggagccttgctcttgttgcccagtctggagtgcagtggcaggatctcggctcactgcaacctttgcctcctgggttcaagtgattctcctgcctcagcctcccgagtagctgggattacaggcatgcaccaccatgcctggctaatttctgtatttttagtatgttggccaggctggtcctgaactcctgatctcaagtgatccgcccagctgagcctcccaaagtgctaggattacaggcgtgagccacagcgcccgaccataatattatttttgtgaaaatatgtgttctgagttctaaacattcagcttacaaatccccttttgcaacatgagtgtttgtagagtatgtgtgtgttttgaatgtgtgcatgtgagtatatgaatgtgaatgtgtaagtgcacgagtttaagtgcacaagtgtgtgttagtgtgtgcatgggtaggaatgtgaatctggttgtgagtgtgtgtgagtgtgactgtgtgtgtggggagggctgcatgtgctgagagctgtcaagaatgaggacttccgtttctcctcaccaatctctagatcctgccttattttatcctctcctaagccttatgcaaacttaagaaaaatcaggttgagaccctctattactgtcaaaagccattactcatctcggcctcccaaagtgctgggattacaggcgtgagccactgcgcccagcctccttttatcatgggacattaagatttacttcatatcagcatttaagtattgttaactttatgtaatagcatttgggttggggactggtgtgtttccagctgtacaaaggatagttgtattaggtgtaattatgacattattattgtctttatttgaagattatgaatgatctcaggagatatgtatgtgtttaagttgacaagtggtggacttgtgatggttaatacagtcaacttgattggattaaaggatgcaaagtatcgatcctgaatgtgtctgtgagagtgttaccaaaggagattaacatttgagttagtgggctgggaaaggcagacccacccttaatctgggcgggcaccatctaatcagctgccagcacgaccagaatataaagcaggcagaaaaacatgaaaagactagactggcttagcctcccagcctacagctttctcccatgttggatgcttcccgtcctcaaacattggactccatgttcttcagctttgaaactcgactgccttcctttctcctcagcttgcatatggcctattctgggaccttgtgatcatgtgagttaatactacttaataaactccatatatatatatatatatatctcctattagttctattcctctagagaacctggactaataaagagaacgagataaaagaggaaacaacagaggccatgattgcactttttacatatatcaaatattggcaagtctgccatcctagcttcccatctgcctacaagtgggcagagccatttttaacctttcttactgtgaacatacttcaattcacttagaattcttgaagtccaggccaagcacctctagggtaaaatttagcattctgttttatccaggtgttcactaacggttccatattaatttgcttctgcagataaagtataaattcctcatgggctaaaatcacaccttattttgtatcttccccttgcaccaaccactagcatagtactgagtacatagttcaaatgccattaactccacagtgatcctacctatgaagatatgacttgaagaattctgaaactcattaagctaacctatacaaggatactaatttactatttatatactgaaattaaagccctagtatgatgtctggggttaccaaacacagtgatatagtaatttggtggaggccagcaaggccaatgccatacttctcagggtaactggaattgtgtcttcaaaggagaagtaattcccactatcaactgggaggtacagggtatcaaacttgtgagaagagcccttctgtaggctcaaggagtgccagtggcattcaaggaggagggagggagaggatttttgtccccaaggggcatctagcaacattttgagacagttttggttggtggtggggtgctactgggatttactgggtagaagccagggatgctgataaaataaacatcctacaatgcacaggataaccttccacaacaaagaattatctgacttaaaatgtcaatagtgccaaggttgagaatcctttctttcataggcaatcaagggaattctttgtcctctgtgctcagacctgaacttaaagagtaaaattatctaagagctgtttctgagtaagacaagttacgaaatgggcactgtcatcaggaggtggcatatctagttaaaaaaaaaattcagaaattgagtagtcttattttgtatataagattatccttatgctattctgttttctacttttttttttttttttgagacacagtcttgttcttgtccccgaggctgaagtgcaatggcatgatcttggctcactgcaacctctgtctcccaggttcaagcgattctcctgtctcagcctcctgaatagctgggattaaaggcacctggcaccacgactggctaatttttgtatttttagtacagatggggtttcgccacgttggccaggctggtctcaactcttgacctcatgatccaccctcctcggcctcccaaagtgctgggattacaggtgtaagccactgcacccagcctgtttacttttatgttttagagatgggggtctcgctgtgctacccaggctggagtgcagcagtgcaactatagctcactgcagacttgaactcctgggctcaagagatcctccagcctcagcctcctgagtagcaggaagtagaggtgtacacaaccacacccacttttttttttttttttttttttttttggagacaggaggtctcactctgttgcccaggttggagtgcagttttgcgatttcagctcactgcaacctccacctccctggttcaagcgattctcccacctcagcctcccgagtatccgggattacaggcatgtgccaccacacctggctgatttttgtattttttggtagagacgaggtttcaccatgttggccaggctggtctcaaattcctggcctccagcagtgctcctgtcttggcctcccaaagcgttgggattataggcatgagccaccacacccaggtactactgtgtgattttaatatccaatgttttttcttctattacaaaagtatctttacatacttatcttaccctaagccattgaaattgttccattttaagttgtactgacaaaggatccaaatttacagtttctgctcagctgtgtagcaaagtattaaggaaagggttacatgttcacactttgaggccaagtggtagtgactccaaggacaaaatgaacggtcaaaaaacagggctgtataatccatccattctttccaacagtagaatttcctccaattatcaattctggagattctggggttattcaattaagaagagtagcacatacttcagtcacatgaggacactctcaaaatacaagttgaaaatacaaaactcctcataacaatgtcaagtgccaacaatgatttttaaaatttaagtagggctgaactgtgtgtaactggtgaaatgttcaagttaacaatccttacacacgaaatctctcacttcactgacttaattcattatttgctgaataaacaataaacttccagtcagtagtcaagagttggcaatctagctggtaggacataacatataatcatgaaacagcaaaaacagtattcaaagattaaattagcaataccccaaaatgtgtgttagagttagcataaagaatttctgatgtagtttaccaagagctaaactaaaaagtccagaatacaaaaaacagggatgcaatgatgttagtttttttcaccatccttgaaattctcccattaaccacagctctgagttttcaactgctctttgtccttaaatcttcagattccctcctttgaatgggataggtagagcagattagaagaaatatattccgaggctctctaatagtttctggatgattaaccttcatgaaaataacctcacagataagtaattaggatttttcagcccatttctataaactaagtaaactttttttctagtgaacataacttgatatattagtgactgtagaaagtctttctacagcaacaggaattatatcaaggcttttgcaaattcctggcaactccgggcatgtttaagttctactactcatctgttctgactatattttcatctgatggaataagcagttcatctcctttcctagaacttttagtgctctactgtccccctcactttagttaaggtctgccatgtcctcctctccgacagtccttgactttcccaatggcatattcatctgctcaaacagatgtcactgcaaaacaaaacaaacttttaacaaaaagcaatgtttgcatatttggggccttttgtatgacaatattgcacgtttcctcagaaaaattcacggagattctttaaggttgggggtttaatctattgatattttccttaggtagacaaagacaacctctaagtgcgctcagttaatctttaaccgctacatcatcgtcacccaggcactaagacataactagggcataatgagttttatttccaccaggggcgcctagtaactaccaggttcaacgctcccaggtggccgacatgtgatgtgctctactgtttgggctggggatattagctcaacaaactctggccacaaggatcacgcggatattcttggggatgcctagcgaaatgcgctgtacctaggcctcgaactctcgcctgctctccggtgggcggtctcgaactccagcctgctctccggcagcccacagcaatgcgcctgccaagaccttaggctgcaaaactcgccacggcccagagctcgcctccaagtgcgccccgcacagggcaagctttcggcgaggactcgcgtcccacccatctagccctggccgctgtcccaactcccgcagttcacagaggcggcggcggtgagcgcagccgatgccacatcctcagcggcaagctgaagaaacctgtctcctctctggggcgaccaaacgatacgtcgatgccggaaccgacccgacgccggagccgtcggctccgtccttaccgttgctctccaggtacacgcccccgtcaaaggcggctctgcggccctctcgcgagagagtgcccgtggtacctccttcctctcagttgtctgtctctccccgcccccggagtgattgcgcggcttcctccagagggcgggaaccttggacgtggcggggctgggtcagtcagggcgctgggcccagcctctctgcaggctggccttccgcgctgccgtgaagcccccgacaggtcccacgcctgcctaggtagaccggcgccagcccgagtgacgcctggcgtgtggccgcgggcaggcggctccctgcggcggggcgggcgggtgccacacctgtgcgggcaagggcggggcgggaaggtgcgcaggcgcgctcggggctggtgggcggtggctcctgggaagttgcgcagccgaactggccggctgggcgcgcgctcttgcggtggcgtaatctctcagcctttctgtgtctcctttcctccgcctcagtttggggcgggtcgggggaatggctgaggagatggagtcgtcgctcgaggcaagcttttcgtccagcggggcagtgtcaggggcctcagggtttttgcctcctgcccgctcccgcatcttcaagataatcgtgatcggcgactccaatgtgggcaagacatgcctgacctaccgcttctgcgctggccgcttccccgaccgcaccgaggccacgataggggtggatttccgagaacgagcggtggagattgatggggagcgcatcaaggtgagcggatggggaactgttggggaggacagggtgacaggtgtcccaaccccaccgtgggctggtcgctggccgtgtgcacggtgtgtgtgcgctccatttttttctcacgctgatgagattggagttggggattggaaggattgcaatactgcaaacttctaaggcagcgtttctcagacttcattgtgcatgcgatttacctggggatcttgtttttgaaaatgcaggctatgatttaataatctcgctgatgatgcaggtgcagctagtccgtggaccacactttgagttcaggagtgtagggcttatctaccgacccatttactgtgtgtgtcgtgtgctgggagtcagtcaaatatgaacggaggaaaaacagtgaaattgcgcgagaatggaaaattcatttaatcagtaatagttattaaacattcattcgagcagtgccttagatgttgtggaagtaaagcctattgcctttgaggaagtacttaggtattctcttgcatacagttttgctgtagtagtttctttatgatactgattttagaaaaatctattttcctgcagaaacattctatatgtgatagttcctactcaggttgccaaaagcatttctcatgatgccacctcagacacacgcccaattctttattccctttaagtcgttatttttggtccctgggactggggacactgagtgacagtaatagtggagaaggtagtataggccccagggcaggtttgaagttctgaggggttggaatctaacagtggaatgaggatcaatgacaaggcttaggcctcttgatggtataaaccttagacacaccttcatagcaagccaccactaaatgccacctgttgatgccactccttaaaacataggtggaaccaccttgccttatactactgctttaaatcagcgatcgtctttatctcagtctcttggtggggatggggagtggtgggagaacaggcttgctttagacgttcctaccctcgtatcttagaggcaagaacaatttatttttcagttccctaatcatcgccccccaccccaacgggttatactgctaatgatggtagaggtgaagtaagctgggttaaaagaaattaacctttctttggtgcttttgtcttttaatttttcacattagtatttcatgtcccatatgagctctcagtggtggttttggagttgctttgtattagggaatttagaaagatttgtatacttgcagaagaaaagatagaataaaaggctaaacatttttcaccagaattaggtttggcccagaagcctttggggtgaaaaataatggagcttctgaagttccaagggagttaagattgggagaagcaggaatctgggaagtacgtgggctttggagcccaactaacctggattcatatctgaacctacgaaagggtagggatgggctgtgtgtccttactagggtgaccaactttgcccaagactgtccaggttttaaaactgggtctcacatcccggggaccccctgtattgggcacaccaaaatagttggtcaccctggaccttaggcagattctttaacctctcagagtctgtatttttcttccgaaaaactgggatcatgataccttatcaggctgctgtgaggatcagatgaggacatatatgaagcacctggttcatagttggtgcctttaaaaagattctttgtctttcctggtggcttaacattatttttcctgtttgccaccattagttctgcagttgtacacccaaagttgaaagcagagatagtggagggcataggtagacagctaaggggagagaaatttaaaaaacaaaacaaaaacaaaaacggaagtaggaaattctttcaaaagtggagagaatgagggtgggggaggagttgggatttgagggccctttatctgttcctgggttgccatttatacttaaagataacagatgaatcaggtgcaaatttaagagataatagtattgaaaaaatataaagcatgtgcagtgtataaagtcaattacctaactactgaggtgagtgctggcagtgataaataagacagaaccacaggtatgacgaatctgggagcacagagttgataattctggttgggaagagcaaggagatgatattttttggggagattatttctactgaactttagcctaacttgttacattgatatggacttgaatactgagatcatttttcttctaaggccctagccgttgatttgtgccaccaatggtgagacttgagagagatttttattgtggttgaaatgactacagacatgttctgaggtttctatagtaggaaaagatatagctatgttgggcattttttaaaaccacagagcttaattttttttagtgccctttttttcgaaaactgaaaagtgatataaagagctttattctatgtgctgcttctgctgctttttggttaacctgtaatacatcttgagtgctgctgaaatgttcatattacgtctttggaaaattgtagcctgatctaaaatgacatttttcctaatttttcatctcaaagctggaaagctctattactttactagtaaaatgccattctagacattatttctttgataaaaatgagatattgcgttaaatgttttgataatcatggactagaaaattttcagaaagcatgacttaacaacagtgccctttcagaatccgttaaaatgttttatgaaatttaagaaagcctatatctgctaatccattcctaagcagtatgtgcaggtagttgaaagaggaaaatcttgtttgcaaaattttggaagtcgaataaaattataaaattaaattccttaaatacaaatacattcggcttttaaattgagactcctaactctaatccttatgctccttcctcgtgtgtatatccccttcatgactaattgtattcctttagcacaatcattttccagtggcagacacaccaacccattaaagcctggtgttgtatttaatccggcctcccattagaggtcagcaggtcctacttgaacattttagtagcttacttttttgtagcggtagaaatgaaatgttcccatgttaagtgcaaaatgttaatattaactaaaggaaaataatcaggacctctccccacactggtaaaacaaatatttaatgagtaattgctggaaagaagacattttgataagcacagagaattatgatacggcacaagggtcagcaaactatgcttgagggccaaaaatggtcttttgcctgtttttacatggccacaatctaagaatgattttttacattttttaatgtttagggaaaatatcaagatttcatgacatgaaaatcatatgaaattcaaaattcacctaggttgtactactttaatccttcttatccttgtactctcacccctctctttgctctgagtccaattggttttccacctgcacactttctattaactgtcttgtcttcaaaattctagttcaagtcctttttttaacctctctttgaactgttgcagcagcttaacagttacagcagcttaactgatctcccagtcctcaattaatctattttgtacattgttgccaaaatgcccgattaatgttgtacttcaagatttatctcccctaactcaagtgccctttatattatattctccattatgttataaagttccagctgggtgttgtggcttgtgcctgtagtcccagctactcctgaggctgaggtgggagcattgctggaggttcaagggtacagagcactatgatcgagccactccagcagagccagaccctgtctctgtctctctctcttttttttttaacacgtttattttaggttcaggggtacatgtgcaggtttattgtatagttaaacatgtcacaggggtttggtgtacagattattttgtcacccacatattttgtcacccacatattaagcatagtacccaataggtattttttctgatcttccacctcccaccttccacccttcaggaggctccagtgtgtgttgttcctgtctttgtgtccgtgcggtatttggttttctgttcctgcattagtttgcttaggataatagcctccggctccatgttgctgcaaaggacatgatcttgttctttttgtggctgcatagtgttacatggtatgtatataccacattgtctttatcctgtctaccattgatgggcatttaggctgattccatgtctttgctattgtaaatagtgctgtcatgaacatacatgtgtagatgtctttatgacagaatgatttatgttcctttgagtgtatacccaataatgggattgctggagcaaatgataattctgtttttagctctttgaggaatcacaccactttccacaagggatgaactaatttacactcccaccagcagtgtataagtgttgtcttttctctgcaactttgccagcatatgttattttttgactttttaataatagcccttctgactggtgtgagatagtatctcattgtggttttgatttacatttctctcatgattagtgatgttgagcattttttcatatgctttttggccacagatatatcttcttttgaaatgtgtctgttcatgtcctttgccctcttcttaatggggttgtttctattaagaacaaatcccatctcaaaaaaaaaaaaaaaaaaaccttccagccagccagattccagtgactcacacctgtaatcccggcactttgggaggccaaagatcacttgagcccaggaattcaagaccagcctgggcaacatagtgaagccccatctttaccaaaaatttaaaaaaatcagccaagtacggtggcatgtacctgcagtccccgctgctcaggaggtaaggcaggaggattgcttgagcccaggagttggaggctctagtaagccatgatcacaccattgctctccagcctgggcaagagaatgagaccctgtctcttaaaaacaaaaaaagagtctcctcacacctccagtcagcttccttctatgaactcttttagcaccttacctgaacctttagatgatttctatctcattgcatacatacctgtcttacctcccttactaagttttattcagggcaggatccatgtctggtaattccatagacttctttcagtgtccagttcttttttttttttttttcttttgagacaaagtcttgctctgttgcccaggctggagtgcagtggcatggtctcagctcactgcaacctccgccttcaggtttcaagcaattctcctgcctcagcgtcccaagtagctgggattacaggcgcctgccaccccaccccgctaattttttgtattttagtagagacggggtttcaccatgttggccaggctggtctcaaactcctgacctcgtgatctgccgcctcggcctcccaaagcgctgggattacaggcgtgagccaccgtgtccggcctagttcagttcttaaaccacatagtaagtactcagggaaaagtgttgaatatatagaggcagagagatcagttggtagggtactctggaaatccagaattgaggtgataagggaaaataaaggggtgatagaagaggtattttgaagataaagccaaagtcttcagtaactggctgttggtgatgagaaagaagaggactagatgagtgaggttgtgagtctgggtgacaggaggtaggtagtggagctaagggggactacgtggaagattgaatttggacaggctctgtaacattatgatttagtcatgtgtttattgagatgatcctatattcaaatggaaatactgattggcagctacaaataccggattggcacacaggagaaataattatgcacatgaagttgaagtttggaagcacggatagaacaaaatgtagctaacatgcctagagagaatagtagaaattttgttaaatttttttatggcatgatgaagatgacattcagtgaatgctgtgtaaatataaaatataaattgggttactaattattgttctgtgttgatcttcattaaaagtaaattaatgtttataagtcaaaaaatattttatatgaagtcaccttataccctaccttaaaacagaatcaaattgatactttatttcttaaaatgtggtattggtggttggagagataccaaactggttctcttgatttgatttgatttgcattgaaattcagtgaatgagaatatgcgcagttcaggtatcctaagaatgctgaagaatcttgtgatcccttagctcagaaacttttgggcagtttctggtctgaaaaagactttgaattgctggggtttggtcctggggctggcatggtgtaagtaatatacattttcacagacccaagctttcctactatctgaaggatcccaggaaccaggtcagaattcctgttgtttttctagcctgatttcagaagcctatgattctcttctgtcacttcttacgaagacgaagaaggcagcattggtgtgtatattcagaggtggtgagaagagaattacttacttctctggaatcagtggtcaagatctcttgctttggagactgtgtgaggactctaagcaaattagtttaagcagaaagggaatttattttttcatataactaaaaagcctagaagtaaatttctctgtctgccagttccaactgcagctctacatgcccattcctaaactatggtagtgacagggagtgtgggggtgcgaacctctgattggtcagacgtaggtcacatgccctccctgggagccagtggttcatgtgaatggaaagcaggggagggccgattcccaaggaaaatagggtgctattaatagaagggagaatgagggttaggctggagaaaacaacatgcattctctacagaatcaggtagtccacgtttaaattctggccttaagacttactcgttttgtggccttgggtgaattacttaaacctcagtttcctcatctgaagattgggtaattattacatagggttgcatatattaaataagggcatgtaaaggacttagcagagttcctggagtatacatggaatgtgctaagccccaaatcaatattaatagtttaagagtaaatgctcattccttcaggagagagatggtagtggggaaaaaaaacaggcagtgaaagaatagggaaagaggatggataactaagattactgttccaaattgtgtgtattttttcctctaaggtgataactaatgctttctctcactgcttgctctcttccttatcaccattattattctgtaattaaatcctttatttaaaaaaaattttgaccaggcatggtggctcacgcctgtcatcgcttgaacctgggaggcagaggttgcaatgagctgacttcgtgccactgcactccagcctgggtgacagagcaagcctccatctcaaaaaaaaaaaaatttcatatatacatataattcctttatataaaacttcatgaatctctagtttaaattccaatatcaagttttaacaaaaatggcaacctagctactgctaaatactaatagtagattcttgttgttgatgacagctcttttttttttttttttttttgacggagtctcgctctgtcgcccaggttggagtgcagtggcacaatctgggctcactgcaagctccgcctcccgggttcacgccattctcctgcctcagcctgccgagtagctgggactacaggtgcctgccaccacgcccggctaactttttgtatttttagtagagatggggtttcactgtgttagccaggatggtctcgatctcctgacctcatgatccgcctgcctcggcctcccaaagtgctgggattacaggcgtgagccaccgcgcccggccatgacagctcttttggtagttttattatccaaaatgagaaatgatctgactttaaattgatttaatactctttttgcttgacctaaaatgttaaaggttttaatccaaattttccatccctgattaactattaaatttccttttcccctattctttcaaagaacacatttttattatttcatgtaaaagaccatctatataagaactacataagagcttctgttaacaatttaagttgtaaaacaacatcataactggtattagtgacatctcaagagaactctttgctttttgtatgtggagtagaaatgtgtgtgtctggtgtacagaatcaaatggcaaatctttgaaataaattttagctttctggagtctctctcaacctctactgattctgagtgctgccatttcatgtattggtctgtgttcacttaaaccctgttaaaattttaaaataaataaattttagcttcctaagaagacaagtaacaaatttttgtgattatttgaaaggaatactgcctttaaaatgaagaatttgggccaggtgccatggctcatgcatgtaatctcagcactttgggaggccgatcagttgagccgaggaattcgagaccagcctgggtaacatggagaaatcccatctctacaaaaaacacaaaaattaactgggtgtggtgacacactcctgtagtcgcagctactcaggaggctgaagtgggaggattacttgagcatgggaggtggaggttgcagtgagccaagattgtgccactgtaccccaacctggcgagagtgagaccctgtcataaaagataataataatttctttttgagatggagtctctgtcgcccaggctggagtgcaatggtgcgatgtcagctaaccgcaacctctgcctcccaggttcaagcctattaaaggcgtgtgccaccacacctggctaatttttctgtatttttagtagagacggggtttcaccatgttggccaggctggtcttgaactcctgacctcaagtgatccacccacctcggcctcccaaagtgctgtgatgacaggtgtgagccaccacccctggccaagtatatattatgttatctttataatgtttaaaatggcaataagattgctgtgagcacatattagccatttttcctaagatatttaagtattaaattgggaaaaatttctctgaaaatatttcctaatttaacatttaccagatgaaagcgtctcacttccttgggtccaaaagtatcagtttctcttcttttttaaacatcatgaaccattccactcatagctaagcctcaagagttttctaggctttgcttttcgcctagtgtctgtctgactgtctccttcaaagttttctctagccttttatggtcaacagtttttaatcagttgtcctgtcgtgtattggctgggtctctcactgctcctttcctgtctccttgccttctcatctcagtgtgcaggcctggaaggcagcaggcagcagtagccctaagccttcccatcatttagttattccatgagagaaattttgaagcttctttttagatattcctttgtaaatgcctcattattagttacgtttatggctctacagtaaagtgtagagttatttcaggctgggcatgatggcttttgcctataatcccaaagctttggaaggccaaggtgggaggatcacttgaccccaggagtttgggaccagcctgggcaacatagtgtgaccacccccccactgtctctacaaaaagtaaaaacttagctgggtctggtgacacgcgcctgtggtcccaggtactcaggaggctgaggcaggaagattgagcctggtaggtggaggctgcaatgatccatgattgtgccactgcattccagcctggaggggctgagtgagaccccgtctcaaaaaataaaaataaaaaaggggtaatttcatacctctgtgttctggaagacttgatatgattagaaagcataaaattttgaacgggattgatgggaagaggaatactgttttttttttttttttttttttttttatactttaagttctagggtattcaatgtgcaggtttgttacatatgtatacatgtgccatgttggtgtgctgcacccattaactcatcatttacattaggtatttcttctaatgctatccctcccttcccctaaccccatgacaggccctggtgtgtgatgttctccaccctgtgtccaagtgttctcattgttcaattcccacctatgggtgagaacatgcggtgtttggttttctgtccttgtgatagtttgctgagaatgatggtttccagcttcatccgtgtcgatacaaaggacatgaactcatccttttttatggctgcatagtattccatggtgtatatgtgccacattttcttaatacagtctatcattgttggacatttgggttggttccaagtctttgctgttgtgaatagtgctgtaataaacatacgtgcgcatgtgtctttatagtctcatgatttataatcctttgggtatatacccagtaatgagatcgctgggtcaaatggtatttctagttctagatccttgaggaatcgccacactgtcttccacaatggttgaagtagtttacagtcccaccaacagtgtaaaagtgttcctatttctccacatcctctccagcacctgttgtttcctgactttttagtgatcgccattctaactggtgtgagatggtatctcattgtggttttgatttgcatttctctgatggccagtgatgatgagcattttttcatgtgtctgttggctgcataaatgtcttcttttgagaagtgtctgttcatgtcctttgctcactttttgatggggttgtttgattttttcttgtaaatttgtttaagttctttgtagattctggatattagccctttgtcagatgggtagattgcaaaaattttctctcattctgtaggttgcctgttcactctgatggtagtttgttttgctgtgcagaagctctttagtttaattagattccatttgtctattttggcttttgttgccattgcttttggtgttttagacatggagtccttgcccatgcctatgtcctgaatggtattgcctacgttttcttctagcgtttttatggttttaggtctaacatttaagtctttaatccatcttgaattaatttttgtataaggtgtaaggaagggatccagtttcagctttctacatatggctggccagttttcccagcaccatttattaaatagggaatgggaagaggaatgttgtttagtcagtctcatctaaaaacaaagggttttcttaggattaaacttcttcttcttcttttttttttttttttgtttttttggagacaaggtctcactctgttgcccaggctggagtgcagtggcacgattatggctcactgcagccttgatctcctgggcttaagcgatcctcccacctcagcctcccaagtaactggaagcacaggtgcatgccaccactcccagctcacttttttttttttaagagacgaggtctcactggtaggaacaaagtagagacaaggtctcactggtaggaacaaagtagagacaaggtctcactgtgttgcccaagctggtagagacaaggtctcttttggtagagacagggtctcactgtgctgtccaagctggtttcaaactcctgagctcaagtaatcctctcacctcaggctccctaagtgctgggattacaggtgtgagtcattgcacccggcctggggttaacatttatcattaccgcttacatttgtggaggacatccacagttctttgagggcgggtctaaattctgcgtaatcatctttttttaattttgtttttataaatgacatgcatgtttgttaaggaaaatagaaaagtagaaataaagggagaaattaccttggagacaaccattgctaatattttggtatatttccttttcgtgtgctttttattttttatcttgtgaatataatttgcttaaaacattataagtcatttttcattgatgaagtgatgcttgaacatctgagttacagaaaatgtcattagaagagaaaaaaatcagctctagttcccttggatagcttttatataggtcatccaatttattaccaaaatatctttctaaatgctaaagatagaatttcaagggtcttttcttttcttttttcttttttttttttgagacatagtcttgttctgtcacccaggctggagtgcagtggcatgatctcagctcactgcaacctctgcctcctgggttcaagcgattctcgtgcctcagactcccaagtagctgggactacaggtgcatgccaccatgccctgctaattttttgtatctttggtagagacggggttttgccctgttggccaggctggtcttgaactcctgagctcagataatctgcccgcctcggcctcccaaagtgctgggattacaggcgtgagccaccatgcctggcctcagatatattttatttgcagatattttctcccattctgtgagttgtctcttcactttgatagtgtccttagaagcacaaactttttttttttttttttttttttttgaggcagggtcttgctctgtcacccagactagagtgcagtgacatgatctcagctcactgcagcctctgtctcccaggctcaagtgattttcccacctcaacctcccaagtagctgggactatgggcacctgccaccacacctggctaatttttgtattattagtagagatggggtttcaccatgttggccaggctggttatgaactcctggactcatgtgatccacctgctttggcctcccaaagttctggaattacagggatgagccactgtgcctggccttccgccgcgcacctctttccccaccacgccccccgccgctttttttttttttttttttttttttttttttaagagacagggtttccctatgttgttcagactggtctttttttttttttttttttttaatggaacaacattttgattttttttagtttttaaaagtttttgtggatacatagtaggtgtatatatttatggggtacattatatgttttgatgcaggcatgcaatgggaaataagcacatcatggagaatggggtattcatcccctcaagtatttatcctttgagttacaaacaattcaggccaggggcagggggtcatgcctgtaatcccagcactttgggaggctgaaagcaggcaaatcgcttgannnnnnnnnnnnnnnnnnnnnnnnnnnnnnnnnnnnnnnnnnnnnnnnnnnnnnnnnnnnacaaattagccgggtatgttatcttgcacctgtagtcccagctactcaggtggctgaggcaggaggattccttgagcccaggaggttgaggcagcagtgagctgagatcgtgctgctgcattccagcctgggcaatagagcaatgtcctgtctcaaaaaaaaaaagccaattacattatttatttaaaaatatacaattattgttgactatagtcaccctattgcctatcaaatagtaggtcttattcattctttctgttttttttttttttgtacccgttaaccatccccatctcccctaccccgaagccccactacccttcccgagcctctggtaaccattttcaactctctatgtccatgaggtgaattgatttgatttttagatcccacaaataagtgagaacatgtgatgtttctctctctgtggctggggaggccttacaatcaaggcagaaggtgaaaggcatatctcacatggcagcagacaagagaagagagcttgtgcagggaaactcccccttttaaaaccatcagacctcttgagacttactcactgtcatgagaacagcatgggaaatacctgcccccataattcagttacctctcacagggtccctcccacaacacgtgggaattcaagatgagatttgggtggggacacagccaaaccatatcacctgataacaagttaacactctttttacataaacaaacaaacaaaaaactaatagaaactgtatgctttaacttcatcctccccactttttaactttttcttgtttctatttatatcttattgtattgattatgtcttgaaaagtcatcgtagttattatttttgattggttcatcatttagtctttctacttagaataagagtagtttatacaccacagttacagtgttataatattctgtatttttctgtgtacttattattaccagtgaattttgtatctttgggtgattatgtattgctcgttaatgtccttttctttctgattgaagtgctgccttcagcatttcttgtagcagaggtatggtattgatcaaacccttcagcttttgttggggaaagtctttatttctccttcatgtttgaatgatatttttgccagatataccattctaggataaaaggtttttttcttcagcacttggaaatatatcatgccactctctcctggcctgtaaggtttccattgaaacatctgctgccagacctattggagctccattgtatgttatttgtttcttttcttttgctgcttttaggatcctttctttattcttgacctttgggagtttgattattaaatgccttcaggtagtcttctttgggttaaatctgtttggtgttctataactttcttatacttgaatattgataccttcttctaggtttgggaagttttctgtattatccctttgaataaactttctgtctctgtctctttctctaccttctctttaaagccagcagctcttagatttgtccttttgaggctattttctagatcctgtaggcgtgctcccttgttttttattcttttttcttttatctcctctgtgtattttcagttagcctgtcttcaagcttgcttattctttcttctgcttgatcagttctgctgttaaaggactctgatgcattcttcaagaatctctttgttgaatttatctggtagtattctgaattccttctctgtgttatctcgagtttctttaaaacagctattttgaattctcttctgaaaggtcacatatgtgtttctccaggattggtccctgttgccttgtttagttcatttggtgaagtcgtgttttcctggatggtgttgatgctaacagatattcttctgtgtatggacattgaaggattaggtgtttattgtggtcttcactgtctgggcttatttgtagctgtccttcttgggaaggcttttcagacatttgaaaggacttgagtgttgtgatctaagctgtatctgccttaggggttaccctaagcccagtaacactgtggttcttgcagactcgtagagttaccaccttgatggttttagacaagatccaggagaattctctgtactaccaggcagagatgcgtgcttccttcccttactttcttccaaacatacagagtctctctttgtctctctctgttctgagcaacctaatactgagagtggagggacacaagcacccctgtgaccaccaccactatgactgcactaggtcaaagccccctttacttttgcctctgcactaggtctagactgcactagacctgaagccagcaaagcagtgtgtctcacccaaggcctgctgtaactactccctggctaccgcctatgtttactcaaggccctaggactctacaatcagcaggtggcaaagccagccaggcctgtgtccttctcttcagggtggcaagtttccctaagccttgggttggtccagaagtaccttccaggagtcagggactagagttaaaaatcttagaagtctacttggtgttctgttgtactgtggctgagctggcactcaaactgcatgacacagtccttcccactcttccctcccatttccaaagacagaggagcttcccacttgtagccattgccactccaggccatgaggagtactgccagactaccaccaatgttcctttaaggcccaggggctcttaagcccccttgtcataaatgctgcctggcctgggcctcacccttcagagtagtggggtaccctctggcccagggcaggtccaaaaatgctgtccaagagtcaagtcctgaaatctgggaccccaaaggcccccctgtggccatgctggtaccaaaggtacaagacagagtcccctttacttttgcctctgcttttctcaagcaggagttttgccctatagccaccacagctaattatgtgctgagtctcacttgcagtcagcaagtctcagaggttcacccaagactgtcaatgtagtgcctgggtatgccagctgttttttcagggcccaaaggctcttcagttagcagtgatgaatgctgccaggactggattttttccttcaaggcagcaggttcccttctgcccaaggtgtatctagaaatgtcgtctaggaggtaaggcctggaatgagggcctcacaactctgaccagtgtcctatcctgctgtggctgagctggtatctaagatcaagagagcatcctccccactcttccctctcctctcctctcctctcctcaaatggagggaagtggtcttttttggagctgtgagctgtgcagcctggggttaggggaggggtgatggcagcactcccttggctgtcccagctggagtctcagtatgtctcctgtctgccccagcgcactgtctctgggccagtttagcactcggagttgcctcagagttgcaatgcttgtggcctagactgcctttcaagtttacttggagacacagagggcaaggtttgtgggaactcatgtttggactgctgggattggtggttcccctctggctggggctgggttaagtgttccctctgtgggtagacatcagctgagtttggtccggttttcctttttgctctaacagggcagaactgagttcattgcctctcatttgctgtgttctccttttcccagtgcccagagaggctctctgtaccacaccgctgctgctcggggtgcagggggtgggtgttggcaattcaggactgttttttctatctcttcagttcctctttcagcaatatgagttaaaactaggtactatgagtgctcacctgatttttggttcttatgaagttttttttttttttttttcctgtgtagttagttattaacttggtgtccttgcggggcagttggggacatgataggtagagctttctattctgccatcttgctccaccctccaattttgtttgttcaggctggtcttaaactcctgggttcaagtgaccctgatgccttggactcccagagtgctgagctaccgcatctggctgcacaaatatttttaattttgatgaagtccagtttattttttcctttgattgcttttactttaggtatcgtatcttaagaaaccattgcctaatccaaggttacgaagagttaaagttttagctcttaaatttaggtctttgatccattttgagtaagtttttatatatggtgtgagatagggatccagcctcattttttgcatgttgtccagcactatttattgaaatgactaatctttcctgctgttgaattttcttggtaatcttgttaaaaatcagttgaccatagatatatgggttcacttctggatccacagttctgttccattgatttctgtatctgatcttaggccagtttcacacagtcttgattactgtagctttgtagtaagttttgacatctatagttttaagcattttaattctatgttgagcatttttattcatgatttttttctagccttcttaagttttcaaggggtcctggatttcatagacatacacatacatgtatatgtttgtttggaggctggatctcataacaacatctttcctaggtttaatattttaaattagactagtgaaaggtaaagaggggtgtatagtaaccaaatttacaggaattaaatgcttaacatgttaacacctgatatatttttctcttaacattttaaaataaagttttgaggtaaattttatttaaacaaattggatttactgaaatttagaaaatcctgtattgaaatattagttccgacacttgtattataatttaattgtgaggtaactggtatcatgaagtctggatcccataggtaacactgaaaagacattatggaagggagaaatcaaaatattttaagtgaagagataataaagacaatgcaagatgattacatttcttgatatgtataattggaatgggattttcagttttcctctttttcttcccatttttagatccagctatgggacacagcaggacaagaacgattcagaaagagcatggttcagcactactacagaaatgtacatgctgttgtcttcgtgtatgatatgaccaacatggctagttttcatagcctaccatcttggatagaagaatgcaaacaacatttgctagccaatgatataccacggattcttgttggaaataaatgtgacttgagaagtgccatacaggtacccacagacttggcacaaaaatttgctgacacacacagtatgcctttgtttgaaacgtctgctaaaaaccccaatgataatgaccatgtggaagctatatttatgaccttggctcataagcttaagagccacaaaccattaatgcttagtcagccccctgataatggaattatcctgaagcctgaaccaaagcctgcaatgacgtgctggtgctaaataacagtctttattatattatctaattttgactaaagaaatacttttgaagtatgacagtattaagtcataagatttaatctcaactataatgggtcatcttgacactttgctgtttgtcattgtcacgcttttgtattttgtatctacttaagtttgtcactgtgacaacacaggaaaagttggttttcaggtgagattgaaaatgaagcaaagataggatgaatctgaacatctctccatctagagcccaatgaaggaagcttcaaatgagaacatgatggaatcagtaaccattcaatcttttgtcctaggattggaaaaaaatgttaaaggtttaggacacacctaatagtatgtcctttgaatgggaagtgttcttaataggataaaaactggtatttgcctctccccagagtactttttttgttttttcatagagacggggtcttgctatgttgtccaggctggccttgagctcctgggctcaagcaatcctcccacctcagcctccccagtactgggactgtaggtactcaccactgcatctggcctttctttgttttattaacatatttagttttgttattattggtatgttttagagccaagactttagttccagtgggataagaaggcatagaatgttttctggttcccagtccataaagaatgacttttccaagagttctagatgtttgattttctaattaatacttatcagatctacaaaaatcattattattttaaaagagttatttgagtttctttctttctttttttttttttttttttgagatggagtctcgctctgtctccaggctggagtgcagtggcgtcatctcggctcactgcaacctccgcctcccaggttcaagtgattctcctgcctcagcctcccgagtagctgggattacaggcgtgcactaccacacccagctgatttttgtatttttagtatagatggggtttcaccatgttggccaggatggtctcgatctcttgacctcatgatccacccgcctcagcttcccaaagtgctgggattacaggtgtgagtcactgcacccagccgagttgctttcttactaaatcctattaaaatatgcaaaaataagtcagattttaaggcaaataaagtgacataaggtgctttatattttattttggtatatttaaacagtgaaaaactaactgaaagcacatgaagagttgtaacttgggggaaaataggtaaacatagcttctagctaacacaggagacctattcttagcctttactaatttcaagcagtgtatcccatatggtatctcttgctcttccttcaactccaataaatttaatgactaaatgccaagttaacaaatcaacttccatttggattgtaggtgtgaaggcacaactctaattgctattagtctacatgtatttctgtaatagtattgtgtcatatcaatttttaagatgtctaaattttatggtcacaagttatccctcctcagtatgaaaaataaattagatattgaaaaatgtctaaacttcagtgatggaaagaatatttcaagaagttttttaacctaaatacttttattttgaatttaagtctttgcacataaaatatagcaagcttacatattaaactatttacgtaaatggaatgtaagccatgactttaactgaagtgttcacattcactaattttgatagattgctgtccttaataattttggaggaaattaagccaaatgattattgtactacagtattttcagaatatgggaaatcaattaaaaatgtaatctaatctagtttaagatttttgtttaatcatcatggtggtcctacctggataatttaactataaagacaaagtaattctattaaatgaactaactgaaaataataattataggaagtgattattccattttaagtattagagctcaaattggctttatttgcatttagggagatcatgttttcttaatcatgctggaatttaaaaattgttttacttgtatcgaaattaaccttgatttataactatttttgtaataaaacaatgacagctgtagtaactatgatgggtgtaacaacatttttttaaagaagggaatctgtttatcgcttttcaaaatattttctaaagtgggggaagaaagtttatagactttccaagcacatttatggttttttattactattattatggttttaaaaagagtaactttatttctttttgtaaggaattaagtaatatcctttacagttctgtgaaaggacttattttttaactgtaatatttattagttttaaaatatttgtatctcatttgtaacaatttgttttaattttttatatatatgtttttatttttaaaaaacataccagttgaatggggttaaagctttcaatatcttaaaatatttataaaacatttcactgttgcaaaatcacttccaaaatgatagctatctaacaactaattactaatttttaaagaacaaatcacacatttaaaaaatctgtagaatttattttaactatgacctttaattgaaaataaataattaaaatatcagacatgttttggaaaagtcttaatttgagaacaccaaaggaaactaccccagaatctaatgtagttcgctattaataacaatgcattattgaaagtatattgcaaatacatgtttcctcatgaaatctaagtaattttgttgtggaatagtgtcactgttacatttcccccatgaagttcaataaaccagcttagccacaaagaaattgtgttttattttctttgtttggttactgggtagagtataaaataaaacaatctttttttcctcctggtttccagataatattatatatatgatacacttttgaaaacaacaaaaagcccccaacccattggacaattattttcttgtatacatttgaggtcaaagaacacttcaggaaaaaaactcaacaaagtattaaaattagctgataacacagcttttgtatttgtgtgttttagtaatccagcttgttttagaatagttcagtgcaaaaagcaaatggtgcaagaggagttgatgtgtatttagacgtaaaagcatttaacagaatgaataactatagaaagtatgagaaaagagaacgaactacgtctcaggtataagattgcagttactgatttagacaccataggattagggatgtgggggcctctgatgttgattctgcttcccctggtcagtttattttacgtataagttacccttgtgttcaaacacaaaattgacattattcatgaaggactgctttcttaatcagatattaagaagttcgtcatgtattttgggagcacgtttgctacagcctgtgtggcaagggcgaatgcacttggtttgttggaataacctgatttatcaaacatttatcaagtatgggtcatgtgttctctatttgtgttagtggagctacatagacactgtccttgaagaacttacaaaatagtatatgaacaaataggaattctacaatatactgtgatcagtgtaatcaaagaagcatatacaaaggacaatgagcacagaatatggagtggtcttttgacttggatatgggagcagtagataatcaaaaagcttcacaatgagtggaagcatttatgcagcatctcagggtaaatgtgaggcattctccatgtaaaggagagggaagaaagtcatcccaggtgaatgcactgcagggctcaagagtggagttgaatttggggggaatgactgctaggtcagtgtgagtatgtgatagaatggagatgtggtcagaacacggaaatgaagctagcaaggtagattttggttaaactgccaagttgccataagcagtgggattaggactggcttgggtgcagtatctgaaactcagtctgaaccagcctataagggggattttaatgtaaggagtctgacttgtctcactggacttgaagacaaggatgtgactggactaaaagaagagctgggattgagcacacagtttcctaactctgggtccagcttctctgcacatctgcattttctctttcttttataactagatttttccattttttaagtttaattagcagaaaacatggccactgagtacttctgaacttttggatgctgcagtcattcaaagagaaatgaactctcagtctcaagttgaaatttccagcatagactgttaattggcctggcaagatccaggtgtccacccaagaccaatggccaaaaaagataaaataagcaatttccacatttaggggagaaggtattttgggggaaggggagcaaaaaaagaagatagccacacaaaaacatttgaactttactatttaggcaatgggtaactaatgaaagcattttgcaaggtagtgagaccgttagatttatgccataaattccagcggcaatgggaagggtgaggggatgaagtcatggtcagtcagcttactgaaatagcctagaagaaacagctttaactggagcactggcagaaaaatacagatttgagatatttcagaactaaaacccccaggagttagagaccaaggtcaggaatttcattgcatgaactagtcagtattcttttctagagctgctagttgcactcatgtatgtggccaaatgtttttttaaaatatcaggctttggttttattttttagattattacattgctttaatttgcctttatcaaaagtttgattcttgtgatttatttacatatatgtttttcagagtgttttgagtcagatgaaacttgtcatttaaaatttttaagttgtatatcctaatgctttttggtatttttcttgttctgagtagtttaattatagaagattctgtatatttttgagtcccagaacattctttaaattacaaaaacaattcaacttttgttttggttattcattccataaacttaacagagtatatggagccattttattacttctcagctcctcattattaatcttttcttgctgcaaatggagagttccatgtttcaataaaatgtgatcagtaatgggacttctttttttaagttaaatttttgtataggaaatacattcacatggttcaatacttgaaccattcacaaaagagtaaatggtgaattctccttcccactctttctcccagctcctcagttcttatcacaaggaaccagtaccatgaattttttttgtttctgtttttgttttgagacagggtctcaatctgcaacctaggctggagtgcagtggtgtgatctcagctcactgcaacctccacctcctgtgctaaagcaatcttcctacctcagcctaccaagtagctgggactacaggtgcacgccacaacacccagctaattttttgtactttttgtagagccacggttttgccatcttacccaggctgttctggaactcctgggctcaagtgatccattcaccttggcctcccaccccagttcccacgctgggattacaggtgcgagccaccacacctggcccctgaatttgctgtttcttcacataacagtataccctggagatgaattcatgttaaaatatgtaagcttcatcattctcttttaggtctcatggaattcctttagttggccattatttagatagccctctactgatgaacatttaggttgtttccagtcttgctattacaagcattaccaaaatggatatcattttacataagtaatttctcaaatgtgtgagtatatacaaagggaaaattcctagaagtgacattgctagatgaaaggtatctgtgtttgcaatttgggtttctaatcgccctcctcagaggttgcactagtaataaaaagcatgcctgattcctcacacactcacaacacagtctattatcaaaggttttgacatttggaaggaacattaataggtgaaaaatgatatctcactgtggttttaactggcatttatcttatgagtagggttgagcatctttttatatttaatgtttacattttgttttctgttgaattgtctgttcacattctgtcaggttttgtttttttgccttttgtagggatactgaatattttgggtaagttagtgatgttttatttttttttcctagtttgttttttgccaaatggcattgcttctaatggtttttggcatgaaaataattttaatgtagtgaaacttagcagtcttttccatgactctcattttgtgtcataattagaaagactaaccttgcctgagataagaattctcggccagatgcagtggctcacgcctgtaatcccagcactttgggaggcccaggcgggcagatcacttgaggttgggagtttgagaccagcctggccaacatggtgaaaccccgtctctgctaaaaatgcaaaaattagccgggcatggtggcaggcgcctgtaatcccagctacttgggtggctgaggcagcaaaatcacttgaacccgggaggcagaggttgcagtgagctgacattgttccactgcactccagccctgtgggacatagtgagaccctgtcaatctctctctctctctctttctctctctctctcacacacacacacacacaagtgaatgttagctatgtactggataattatgatgtctcaatgtaggtttatcaaatgtaataaatgtacatagtgagggaggccgtgtgtatgtgtggatgggcaggggctctgtgggaacttgatggtttctgttccatttttctgtgaccctaaatctgctctaaatataaacattatttttttattatactttaagttctagggtacacgtgcacaatgtgcaggtttgttacatatgtatacatgtgccatgttggtgggctgcacccattaactcgtcatttacattaggtatatctcctaatgctatccctcccccctctccccaccccatgacaggccccggtgtgtggtgttccccaccctgtgtccaagtgttctcactgttcaattcccacctatgagtgagaacatgcagtgttctgtccttgcgatagtttgctcagaatgattataaaccctatttttttaaatagatgtgtcagagactgcaggttgcctacccaatttttgtcttccctcttgtattaatttcctaggctgcaggaaaaaagtaccataaattgggtggcataaaaaacaggaatgtattgtctcacagttctggaggctggtagtatcagtagtgttgatttcttgtgaggcctgtgagagagaatatgttccatttctctcctggctcactgcagcctcgacctcctgggctcaagcaatccgccaagctctgccccctgagtagctgggaacacaggtgcatgtcaccatgcccagctaatttttaattttttttttttttttgagatggagtctcactctgttgcccaggctggagtgcagtggcgccatctcagctcactgcaagctccgcctcccaggttcacgccattctcctgcctcagcctcccgagtagctgggactacaggtgcctgccaccatgcccggctaatttttttgtatttttttagtagagacggggtttcaccgtgttagccaggatggtctcgatctcctgaacttgtgatctgcccgccttggcctcccaaagtgctggggttacaggcgtgagccactgcgcctggccaatttttaaattttttttggtagagatgaggtctccctaggttgcacaggctcatcccaaactcctgggctcaagtgatcctccagcctcggcctcccaaagtgctgtgattacaggtgtgagccaccatgcctggccagattttttcctcttttttgtgtgtgtgtgatggagtctcgctctgttgcccaggctgcagtgcagtggcatgatctcggctcacttcaacctctgcctcccgggttcaagtaattctcctgcttcagcctcctgagtagctgggaataaaggtgtgcaccaccacgcctggctaatttttgtatttttagtagacacaggttttcaccatgttggccatgctgttctcaaactcctgacctcaggtgatccaccggcctcagcctcccaaggtgctgggattatagacatgaaccacaccacccagcccagatttcctcttctcatagggatgccagtcatactggattagggcccatcctgatgacctcactttaacttgattacctctgttaagggccctgtcgccaaacaaagtcacattctgaggtaccagggattagaactccaatatcttttttcggggggcaggggcacaattcagctcgtaacacatctccctcttttcttactaacagaaccctggtttcttttgctggccacatagcccactagataatcagttcccagcctcctttgtagctaggtatggccacatatcacagttctggccaaagagatatgagcaggtgcttgccagggatttccagggaaactttgctttcctgtaaagaggcctgccctttcctctggttgcttcctcctcctctgtccatggctggcacgtgggagggaggctatagcactggcatggatgccttggcattacaaaatgctctggagaacagtgtcctgcagctaccacaccagctcaggctacttacctcatgattttgctgagaaaaacaatccccactgttcaggggatttgagtacctgtagatgaatgcaattctaactggaagaacacttgaggtgaaatgtggaagagacttggggacattgggactaaaacttttggatgacgattgcactatccctgtttagggactgcccgtgtggtcagggagcaatttggggcccactcactgccctagcgcatcagtccttcaaggagaggaacttgctgggagaacctgagttagtgcctttctaccagcctttaaacctgcgccaggggaaaacaccgttttagggacttagtgaacaatgggtgcgccatgcagatgtcattcctaggcaacaccctaggagtggcagagcaaccaaagagaaggaaccggggtcccagatgctgtgctgctaccatcacagccccagacagttatgcttggaccagtaagtgagagtcaagtagaagacttacatcttgttcgagccaatgttatttgggcttaactaatacctcatctaagttatcctagaaaagtacatctagctttaaattgttaaaatttgtcagtctgtgataaaattgatggtacacaattttactactgtatgaaaatatatgtgtaaagtctattatggaactggtatacgttagggatctcacctagctcatttaagaagaaagggactggcagggcgcggtggctcacgcctgtaatcccagcactttgggaggctgaggcaggcagatcacgaggtcaggagttcgaaaccagcctggccaatatggtgaaactccatctctactaaaaatacaaaaattagctgggctaattagtggtggtgcatgcctgtagtcctagctactcaggaggctgaggcagaagaatcacttgaacctgggaggtggaggttgcagtgagccgagaccccaccactgtactccagcctgggtgacagagcgagactctgtctcaaaaaaaaaaaaaagaagaagaagaaaggaacttagagaatttggggtagcttatgttatctttaggaggacctgggaccaaaatttggatgctacaaagacagggacaatagtagccaagataaatgcccagatgttgtagacagttgactgtcaccactatctctcctcagcacctatgacactcaggactggccacaaaatgtccccaaagctgtcccagaagtactgaaatcttcaacatcacactggaaagaaaggccattctccctgtgaccctgtctctacccacttcctagaactgaagctgcaaatatatcttgggaatcacaggttttatcatcccaggctctgcagcaggaaagcacactagaagaggatggggaggcgtcgagtaagccagtcagcatctgctgcagaaagtgatactacgcctctgaagctcttcactgggaaacacagcatactgctattttcatgcatttctgaagtacttctaaagtgtgaactaaaaaatccttgctaatttggtgatttgttatattttcataaactccttatgcaaatgtaagattagtaaatgttgcctacttctgagagtgtattcttccattgtacatccaaaggtgctatggagcatacattttttaattctgaaaacattgggaacttaatcacgtaggataaggtgtatgaccagctagacagggaggcactccctgagcctttttcttccatcctcttctggctgaacaccctttcctttacgatctcaccttcagagttacttgattcctgaacccatgtttagagcctcacctttacctctgaaatcctgaattggctgctgcatgtgggccatctttcttttgcagtatctgtggaccactcaaacatgtaatttaaaatgtataaacagtggggcatggtggctcacacctgtaatcccagcactttgggaggctgaggtgggaggatcacttgagcgcaggagtttgagaccagcccaggcaataaagagagacaccatctctacaaaaaatttaaaaattagctgactgtggtggtctgtacctgtggtcccagctactcaggaggctgaggtgggaggatcgcttgagcccaggagattgagtcttcagtgagccgtgatcataccactgtactccagcctgggcaacagtgagactcagtctcaaaaaataaaaataaaaaataaaataaaatgtataaactcaatcttcctccttaaatttatttttcttcctgtgtttcctcaaaacctccagcttctgttgaggcttcccttcccccaactcccacatctagtctcctacctggatctatcacttccactgcctttgacccttgcttctgtcctctcttgctgagaggcagaggacgccgcgcttaaactgtggagtgagaccacaaagaagctgaatcccagatgttctttttttttgaaacggagttttacccaggctggagtgcagtggtgctatcttgggtcactgcaacctccacctcctgggttcaagtgattctcctgcctcagcctcctgagtagctgggattacaggcgtgtgccaccacatccagctaattttttgtatttttagtagagacggggtttcatcatgttggccaggctggtctcaaactcctgaccttaggtgatccgccctccttggcctcccaaagtgcagggattacaggcatgagctaccgtgcctggcccagatgttcttttttaaacaaattattttatgttttattttttaagagagagtcttgctctgttgcccaggcttgagtgcagtcgcatgatctcagctcgctgcaacctctgcctcccgggttcaagcaattctgcctcagcctcccaagtagctgggattacaggagtgtactatcacacccagctgatttttgtatttttagtagagatgggtttttgccatgttggccaggttggtctcaaactactgatttgatgtaatccgcctgtctcagcctcccaaagtgctgggattacaggcatgagtcactgtgcccagcctgaatcctagatgttctaaaagtcaaacctctccatgcttcaatttcctcatttttaaaaagggctgacactaacccacggggttattgtgagaatgaaataatatatgtgtagtatctagtgttgtgtaacaagcttccccaaaactgagtagataagaccacaattattggttgtctcgccgctgtggcaaggcaggagtgtgcaggcagtgcaggctacaggtctctcctgaggttgccgtcatctgaagtccaggtgaagaatatgcagcagctggggcagagcagccggcactcctcgggcatctctcgctctctctttctctgtgctgctccgtatggcagcctcaaggtagcaggacttcttacatggtggctgcaagcacccagagtaagtggcgcaagataaacctgcaaaagccctggggcgttttctaacttagctcgaaggtcactctgtatccatgtagaacagcaatcgcaaaatcttgcttggttttaaggggaggagatgtaaattctgtgaatgagaagcccgtcagaaaacctgtggacctttctacaaactatcagaggtgactatgaagatgttttgtactatttggatggtccactgtttatctcatgacggagtaattaaaagacttactaaactgaaaaaatgtgctacacgttttttttttcccacagataaccgatccaaattgttgaccatttctttctttctttctttctttctttttttttttttttttgaggcggagtctcgctctgtcgcccaggctggagtgcagtggtgcaatctctgctcactgcgagctctgcctcccgggttcacaccattctcctgcctcagcctcccgagtagctagggctacaggcgcccacctccacgcccggctaatttttttgtatttttagtagagacggggtttcaccgtgttagccaggatggctagtgtttgaaatatatttcatgctaaggaatatgctaccttaatagttatttttagataaaccatctatctcttcctagtggatgtttggaaatgtttccatctgatgtgtgtttt

SEQ ID NO: 1390 - DNA, 3869 bp, Homo sapiens
gcttcctccagagggcgggaaccttggacgtggcggggctgggtcagtcagggcgctgggcccagcctctctgcaggctggccttccgcgctgccgtgaagcccccgacaggtcccacgcctgcctaggtagaccggcgccagcccgagtgacgcctggcgtgtggccgcgggcaggcggctccctgcggcggggcgggcgggtgccacacctgtgcgggcaagggcggggcgggaaggtgcgcaggcgcgctcggggctggtgggcggtggctcctgggaagttgcgcagccgaactggccggctgggcgcgcgctcttgcggtggcgtaatctctcagcctttctgtgtctcctttcctccgcctcagtttggggcgggtcgggggaatggctgaggagatggagtcgtcgctcgaggcaagcttttcgtccagcggggcagtgtcaggggcctcagggtttttgcctcctgcccgctcccgcatcttcaagataatcgtgatcggcgactccaatgtgggcaagacatgcctgacctaccgcttctgcgctggccgcttccccgaccgcaccgaggccacgataggggtggatttccgagaacgagcggtggagattgatggggagcgcatcaagagatccagctatgggacacagcaggacaagaacgattcagaaagagcatggttcagcactactacagaaatgtacatgctgttgtcttcgtgtatgatatgaccaacatggctagttttcatagcctaccatcttggatagaagaatgcaaacaacatttgctagccaatgatataccacggattcttgttggaaataaatgtgacttgagaagtgccatacaggtacccacagacttggcacaaaaatttgctgacacacacagtatgcctttgtttgaaacgtctgctaaaaaccccaatgataatgaccatgtggaagctatatttatgaccttggctcataagcttaagagccacaaaccattaatgcttagtcagccccctgataatggaattatcctgaagcctgaaccaaagcctgcaatgacgtgctggtgctaaataacagtctttattatattatctaattttgactaaagaaatacttttgaagtatgacagtattaagtcataagatttaatctcaactataatgggtcatcttgacactttgctgtttgtcattgtcacgcttttgtattttgtatctacttaagtttgtcactgtgacaacacaggaaaagttggttttcaggtgagattgaaaatgaagcaaagataggatgaatctgaacatctctccatctagagcccaatgaaggaagcttcaaatgagaacatgatggaatcagtaaccattcaatcttttgtcctaggattggaaaaaaatgttaaaggtttaggacacacctaatagtatgtcctttgaatgggaagtgttcttaataggataaaaactggtatttgcctctccccagagtactttttttgttttttcatagagacggggtcttgctatgttgtccaggctggccttgagctcctgggctcaagcaatcctcccacctcagcctccccagtactgggactgtaggtactcaccactgcatctggcctttctttgttttattaacatatttagttttgttattattggtatgttttagagccaagactttagttccagtgggataagaaggcatagaatgttttctggttcccagtccataaagaatgacttttccaagagttctagatgtttgattttctaattaatacttatcagatctacaaaaatcattattattttaaaagagttatttgagtttctttctttctttttttttttttttttttgagatggagtctcgctctgtctccaggctggagtgcagtggcgtcatctcggctcactgcaacctccgcctcccaggttcaagtgattctcctgcctcagcctcccgagtagctgggattacaggcgtgcactaccacacccagctgatttttgtatttttagtatagatggggtttcaccatgttggccaggatggtctcgatctcttgacctcatgatccacccgcctcagcttcccaaagtgctgggattacaggtgtgagtcactgcacccagccgagttgctttcttactaaatcctattaaaatatgcaaaaataagtcagattttaaggcaaataaagtgacataaggtgctttatattttattttggtatatttaaacagtgaaaaactaactgaaagcacatgaagagttgtaacttgggggaaaataggtaaacatagcttctagctaacacaggagacctattcttagcctttactaatttcaagcagtgtatcccatatggtatctcttgctcttccttcaactccaataaatttaatgactaaatgccaagttaacaaatcaacttccatttggattgtaggtgtgaaggcacaactctaattgctattagtctacatgtatttctgtaatagtattgtgtcatatcaatttttaagatgtctaaattttatggtcacaagttatccctcctcagtatgaaaaataaattagatattgaaaaatgtctaaacttcagtgatggaaagaatatttcaagaagttttttaacctaaatacttttattttgaatttaagtctttgcacataaaatatagcaagcttacatattaaactatttacgtaaatggaatgtaagccatgactttaactgaagtgttcacattcactaattttgatagattgctgtccttaataattttggaggaaattaagccaaatgattattgtactacagtattttcagaatatgggaaatcaattaaaaatgtaatctaatctagtttaagatttttgtttaatcatcatggtggtcctacctggataatttaactataaagacaaagtaattctattaaatgaactaactgaaaataataattataggaagtgattattccattttaagtattagagctcaaattggctttatttgcatttagggagatcatgttttcttaatcatgctggaatttaaaaattgttttacttgtatcgaaattaaccttgatttataactatttttgtaataaaacaatgacagctgtagtaactatgatgggtgtaacaacatttttttaaagaagggaatctgtttatcgcttttcaaaatattttctaaagtgggggaagaaagtttatagactttccaagcacatttatggttttttattactattattatggttttaaaaagagtaactttatttctttttgtaaggaattaagtaatatcctttacagttctgtgaaaggacttattttttaactgtaatatttattagttttaaaatatttgtatctcatttgtaacaatttgttttaattttttatatatatgtttttatttttaaaaaacataccagttgaatggggttaaagctttcaatatcttaaaatatttataaaacatttcactgttgcaaaatcacttccaaaatgatagctatctaacaactaattactaatttttaaagaacaaatcacacatttaaaaaatctgtagaatttattttaactatgacctttaattgaaaataaataattaaaatatcagacatgttttggaaaagtcttaatttgagaacaccaaaggaaactaccccagaatctaatgtagttcgctattaataacaatgcattattgaaagtatattgcaaatacatgtttcctcatgaaatctaagtaattttgttgtggaatagtgtcactgttacatttcccccatgaagttcaataaaccagcttagccacaaagaaa

SEQ ID NO: 1391 - protein, 131 aa, Homo sapiens
MVQHYYRNVHAVVFVYDMTNMASFHSLPSWIEECKQHLLANDIPRILVGNKCDLRSAIQVPTDLAQKFADTHSMPLFETSAKNPNDNDHVEAIFMTLAHKLKSHKPLMLSQPPDNGIILKPEPKPAMTCWC

SEQ ID NO: 1392 - DNA, 687 bp, Homo sapiens
atggctgaggagatggagtcgtcgctcgaggcaagcttttcgtccagcggggcagtgtcaggggcctcagggtttttgcctcctgcccgctcccgcatcttcaagataatcgtgatcggcgactccaatgtgggcaagacatgcctgacctaccgcttctgcgctggccgcttccccgaccgcaccgaggccacgataggggtggatttccgagaacgagcggtggagattgatggggagcgcatcaagatccagctatgggacacagcaggacaagaacgattcagaaagagcatggttcagcactactacagaaatgtacatgctgttgtcttcgtgtatgatatgaccaacatggctagttttcatagcctaccatcttggatagaagaatgcaaacaacatttgctagccaatgatataccacggattcttgttggaaataaatgtgacttgagaagtgccatacaggtacccacagacttggcacaaaaatttgctgacacacacagtatgcctttgtttgaaacgtctgctaaaaaccccaatgataatgaccatgtggaagctatatttatgaccttggctcataagcttaagagccacaaaccattaatgcttagtcagccccctgataatggaattatcctgaagcctgaaccaaagcctgcaatgacgtgctggtgc

SEQ ID NO: 1393 - protein, 227 aa, Homo sapiens
MAEEMESSLEASFSSSGAVSGASGFLPPARSRIFKIIVIGDSNVGKTCLYFCAGRFPDRTEATIGVDFRERAVEIDGERIKIQLWDTAGQERFRKSMVQHYYRNVHAVVFVYDMTNMASFHSLPSWIEECKQHLLANDIPRILVGNKCDLRSAIQVPTDLAQKFADTHSMPLFETSAKNPNDNDHVEAIFMTLAHKLKSHKPLMLSQPPDNGIILKPEPKPAMTCWC

SEQ ID NO: 1394 - DNA, 110007 bp, Mus musculus
  misc_feature (1)...(110007): n = A, C, G or T/U
cttggccttaacccaatggggcttgtgacctcagctaaagtcccaagaaacagcccgtggacaaaaaggtatgtcacaatctctgccccaccccctacaaccttatatacatccatccctcatgcaagcccaggggaaaatgaacacggagtggttaagtgtggcattcctgagaagattctttctggggcatcttgtccccactcccacctcctcgtcttaggtgtcatactaccaagaaacgagcctgggctatcttctcctgagccacgaaggtccgcatggcatctgccaatttggccacaagccgctctcgtacagaacttggttcgtgctggggagaaaggaacgggggtggaatgcggatgaaccgagctatgaatctgcaaaaccaggaaagggacagaaagaaagagcgagaggtctgattccctttctttgtgccctgccaccatgccaccatgccactatgccactgagcataaaactgtaggcagactgcctcttcctccaggtaacagctgtggacctggtgtggtgtttctaatcagtaaatacgtggtgggagcaaggagcaagactggcagtatcagccgagacttctggaggaggggaaggcaggaagtcagaggccatgatggagggtctcacctgacacagggccagcgcttccttatagtatttcaaggcctggtcatgttgtcccagtctggctgcagctgccccaaggccctcacacgcctgccactgtcccttcacgtctcctaaggacgagagctcgaaagatcttctcatgttccctgttccacagacccttcaggcattgtgtaccctcggtctttgtgtccccctccctgagttccaagctaaccctctcattcttaccagtgtcttgggcagcctggagggcatgcaaatagctgtcccaggcagccctgtggtcccccagctggctcagtgaaaatgccaggccgctaaagctgcgaccctgctcccaccgctggcccacagagcctgaaatcagaacaggtcagtctgagtagggacttggttgctggggcaatgaaaccctgccctcaacaagggaggatcccaggagtcccaaagttcagcctcagcgcctgtaggtgacccacaaagacctaagttatccaggttgagcctctcaccttgttttaccccaaatacctccctagcaagttgggacctgtgggttaagagactatattaatatgctgaggaaaaaaaaataaaaaataaataaataaataaataaaagatcagagatctgtctctacctctggagtgctgggatcaaaggtatgtaccatatcgggcaggttaaaaaaaaaaaaaacaaaaactatttaagggctagacacccaggtcatagattcatagatacccaggtccaatctcacttgtgtgattggataccgtgtgtgtgtgtgtgtgtgtgtgtgtgtgtgtgtgtatgtgtgtgtatgtttctgtagtgctgggaatggaatccagggccctgtgcatgtcaggcaagtgctttgccactgagccccaccctcagctaccattgtttttaattttttcatatttgtttctgtgggtatatggctgtgcacagaagggagtcaggaccacttgcgggaattggtgctctctgacatccacatgggttctgggaagtgaactcgggccaacttgcttagcagtaagtacccttccctgctgagccatcccatctgcccctcacagcaccatcattatgtgtggcaactaaagggcagagatgggaagtggtttgctgctgaaggaggagattcagggcagcacctgtggcctcccaacctccagctccaggccactgtgctcactaccttctgctctgtctgcttcttccatttcaggtagtcccagcccagtaactggtcccagagattcagccagccatgctcccggtgtagcgccttgccgatcgggacccaggctcctcagtcccctcccaactcgtgggacaccaccccgttcattggaaacattttattctttttcttttttgacaggatactatgtaacccaagctggcctggaatttggatcgcttaaagcttctgattctcttgtctccacctactgagcactgagactgcagatgagcaccactgcactgggtctatgtggtgctgggaaccaaatcagagctttgtgtatgctgggcaagcactccagaaatgtggtgtgtgtgtgtgtgtatgcacacacatgcatatatgatgtatatgtatcctctccaagcctgaaacctctttttaatcctttagtcttggccccagtccccagtccctgggacccaccatgcagacttgcagccttctggtgaaactcctgggcttcccaatagttgccaaggacattgtgggtcattccaagattttgaagcactgtagcctgctctgatggctgtcgacacaggggtagggcctgcaggaaggcctctactgccagagggaacagttggagttggaagtaacccatgcctagatcattgtagaatggccctggagaatagaaccaaagtcactgatggccagatgggccatagctaaggctgtaacggtatagcttctgacccactcactcctccagattccccagcccccaggacaccaccgagcttaggctcagcacctctttagagcccacaccttgtttactaaggctcacctagcagtccctggtcggtgctccggtcagcatcagcaagcttgcggctctcctccagagcccgcagcacatcactcagtccatactgccgactgctcagcatacatctcacggcagccacctgagccaaggctgcatcccagagctggcctgcatgggcataggcctggcttgcttcctgtaaactgcaggctgcttgcttaggccatcccagggcctgatagcaggctcctatttttgcctgtgcctccccatggtagccctgtggttggtaatggaccagagccctgtggtaccagtccaaagcttgagtcaggtcaccaagggcgtgatgggctaaagccacattgaagcactggtcaccatgacaccagccttcggacttctcttcagggtgggctctcagaagtagctcaagacctgtggctgggtctccagtctccacataggcagcccctaagttaaaggcacaggcttgaagaatggagctgtctctggttgatggggccttggaggccagcaggaaggccttctggaagctgcccaaggcctcctgaatctgagcagcatgcaaggccctgtggccatccctggtgaggctccggatcttggcttcttcttgcagcctcttctttttctcctttttcttcctgcagtttgagggttttggcacagtctcaagcttccagtggctatccttagggataggggaagacccagggttgatgccaggaacagagaggtcagcatgtcagccttagttctcgccctctacctctccaataggatcccttaagggaaatttggctctacctctggcctccagggaccaaggattttcctctgaactcttaccttgcttcctgtgtcccactgggcagcattttgactttctctctttagaactctcccaaattcttcgtcaggactcagaccaagtaactttctgaacgctgccttctgtgaatccaatcccccatgttaccaaaaccaaaaccagaccaatcaaaagtcctgcaaacttctgtaatttctcaggattcttcctccctaagtctttcccctaatgtctactcccagcattggagattgaacccaactttcaaggcaagcactcaacactgatctgcaccagatgctctgtttatcacagtctgtcactggcctgggaatgagttgaaggcattagatctttaatgaaagtttactaaagggttggggccggagcactggctcagcagttaagagtacttgttgctctagcaaagggttcaggtttggatcccagcgcccacaaggtgactgacaatcacctgtaattccagttccaggagatccaactcctccttgtctctgagggcatcatatgcactcggtgcatggacatgcatgcaagcaaaacagccatacacataaaataaaaatattttttaagagggctggagagatgacttagtaattaagcctaattaactctgctttttccagagatcctgaatttggtttccagaatccaggtcagacagcttgctcacaactacctgtaactgtaactccaggaaatccaaagtttttggtatacacacacgcatacacacacatgcatacacacacacacacacacacacacacacacacacacactctctctctctctctctctttttttttttttggtttttcaagacagggtttctctgtatagtcttggctgtcctggaactcactttgtagaccaggctggcctcgaactcagaaatccacctgcctctgcctcccgagtgctgggatcaaaggcgtgcactgccatgcccggcaacacacacactcacacacacacacacacacacacacacacacacacacacactcttaaaacaacagcaacaacaacaacaaaactctctttaaaaggttagtgaattttaaaatttgagtcacagaagtgactcacccttgtggcttctgcaggcacttgaactgacatacacctatacacatacacattttaaaaataaaatatcttaagcctggtgtggtggcacagacctttaatcctagaattcaggaggcagaggcaggtagacctctgagatctaggccagcctgctcttctagataaccagagatatacagaaaacccctatttcagggcaggggaaaggaagaccagcaataagaaaagcatatatatatatgtgtgtgtgtgtgtgtatgtgtatgtatacatatatatatgtatgtatatgtgtatacatatgtatatgtatgttttatatacatatatatatatatacatatatgtatatatatatacacacacacacacacaatttaaaatcatcttcaaaggtccacttctgtgacactatatgaactcaactgtgcaccccatctgtcattccctggggattatggtcctctttagtcaacatctaaagggctcatttttgttattttgaattgtgtgtacatgagcacatgtggttatgtgcaccagaggctttgaatcccatggagctgaggtcatccttggttacgagctgcccggtgtgggtgctgggacctgaactcaggtctctgcaagatcaaaaagtactcagagctgtcttctcagcttatctgagcgccagcatctccgtcaaaacaaaacagacaaacaaaaggctgtcacacacctttaaaatcccaactcaggatgtaaagacaggcagatctctgggagttcaaggccagtctggtttgcatagtgagtccaggacagcagggttacaaaacccaaacaggatacacagggcttcccctcacctcttacacaaggccttgtgacctacgtgctgctgctttataaaccaacgggaattcagcacagccacctccagtggtggcaggagctgtactagccccgggcactcaaagctgaacagacactgagttaggaagaggctgatgtccaggaggcgtctgtgtgcattgactgtgcccttcctattgtctcctctactttctgccagtcggttcccgccttggtccccagagaactcttaagttcagatagattcttctcatcagcacatttctcctggactgcctctcttcccaggaaactgaaaaaaaaaaaaaaaagccgaaaaacgacccccccctcaacccccactttttctcttttacagagagggggcaaaagggtttctgcttttcaaagatattttctctggagttggggatttggcttagtggtggagaaaagggagagaggatgagagggaggaagggagggtgggagggaggaagggagggtgggagggaaaactagaaagagttgcttctgaaaacacataaaatnnnnnnnnnnnnnnnnnnnnttgcttctgaaaacacataaaatcccgacttcataaggctccccaccttgaggcactccaggctgtcaccttgaggctccggactgtcccctgcacagtcttggggaccccactccaggacctcttacctctgtctgtcctgttttctccacagtggccttctggaatggttctgctggcttaggttacttcccagcagccttgagcgcagaactgtgttaccagacacctggcactctcctttcctcccaggtaatccttcgagtgacagctgtggtaacctatcttagtggaggaccctaatggtgctcagacatagtcacctaagacctgtttcccttcctgcttggctgccccatccctgcggacacaccttccagttccttcaaataatatatcaaactaccatgagacagtcatctgttctttcccatcctctcttcttttttttttttttttaagatttatttattatatgtgagtacactgtagctgtcttcagacaccccagaagagagtgtcagatctcattacagatggttgcaagccaccatgtggttgctgggatttgaactcgggacctttggaagagcagtcagtgctcttaaccactgagcccccatcctctcttcttaatttaatttaattctaaggtaggttcttgtggtgatcttctttccttctttccttcctgagtgctgggatcacagattgtgccaccaagccctgctccgtctctccctttcagagagagacatgacagaccaaagaactccatctgctacagggggtgactacaagcttttttttttttaaattattatttattttatgtatatgagtgcactgtaaactctgtaaactccaggttctgtttgatgtgtttaatgagaggacaggaggccccacaatcaccaggaatctctaactcaccagctcaccaacccatgaacctaccaccagtggctgcaactaaacgaaatttgcccctttccccatttgcctaggaaaaagcctttttaagtagaagggccattgccagaaacagactcctgaagtagatgcactgaccatagttgcaacacaggcgtttgcgcaggcctggcacccagggccatctctgagctccagacaggctgaagcttctgctctggcctggctttcagaggtgctagcacagcctgtccaggccaagtaggccacagagtggtcccatactcagtaggctttccttgaggaaaatagggggcgggggtgggagggcctgaaagtgttctcagccaaggtcctaaggggctctctcccagatcctctgtcattctgaaccagcatccagttcccttcagtgccacacccaccatgtcctcgaatctccttccacatcactgacaatacaagcagcaccaacaatcaacgtggtcacgattaacacatacatttcaatgataactttaaatgccagtggaatcaactcttcaaaagacacagactgacaaaagccaggggctagagagatggctcagtggttaagagcactgactcctcttccagaggtcctgagttcaattctctgcagccacatggtagctcacaaccatctgtaatgagatctgataccctcttctggtgtgtctgaagacagctacagtgtactcttataaataaaataaataaaatttaaaaataatcaaacaaaactccccaaatccatctatctgttactgccaagaaatgcatcttagctgtaaagataggcactgctaaaagggtggacaaagtactccatcaaacagaaccaggaagaagcaggtatcaatatcctaataactgacaaaacacctcaaactaaaacaagtcaaaagagataagggggacacttcatcctaaccaaagggacaattaaccaaagagatgtcactattctaaacccagctctgcggtgcccaatttcatttttaaaagtctactactgtatttaaagacaaattatcttcaatccattaatagctgatttcagtacccttcttgtgtcatctggacaaaaaataaacagaaacacaattcattgacatcatacatctaatggacttaacagacatctacagaacattccactcagccaggcatggaaacttttctaaagtagaccatatctgggacacaaaacaggtctttatatattcaggaagatggaaataactccttatatcctatcagaacacaatgcaataaaacttgaaattgacaccaaaaatttctagtcaatatgcaaactcatggagatttaacaactcatcactggagttaatgaagaaatcaatcaatcaatcaatctccctgtaactaaaccaaggacacctctggcacacatggaaagcagccctacagggggaatctataagatgcctgtattaaaggatcagaaagaatggctccagaagttagagagacaagaggagctaaataaagaatccaaggccagatggattcacagacgaattctaccagacactcaaagaggatctatagccagtccttcactattacaaaaaagaaaaaagaaaaaaaaagagcttgcctgtgagagattatcttggccatgttaattgattaggtagaccctttttaattgtgggtggggccattccctggacaggggaccctggagtatacaaaatggagaaaaggagcaatttcatatatgtgtataaagtgttgtcatatttattcctcatattgtgtcatttgaaatatttctgtatagaaggaatattatctctataaataatcttcacattgactttgttagttgtgtaggaagtcttttgtttgttgtttgtttttcaagaccctgtttctctgtgtagccctgactgtcctgaaacttgctctgtggaccagagttggcctcaaactcacagagatcttcctgcctctgcctcccctagtattaaaagaatgtgccactccaggagaagttttttttttttttcttttaaagatttatttatttatttatttatttattatatgtaagtacattgtagctgccttcagacacaccagaagagggcatcagatctcattatggatggttgtgagccaccatgtggttggtggctcagaagagcagtcagtgctcttaactgctgagccatctctctttttttttaaaatgacttatttagttacttttattttatgtgcattggtgttttgcctgcatgtatgtttgtgtgaggatgtcggaccccctgaggctgtagttgggacagttgtaagctattatatggatgcggggaattgaacccgaattctctggaaaagcagcccgtggtcttaaccgctgatccatctctccagccccaacccttagctggcgatttcaaccagactccatggtggcgggacctcctttcccttcccacacccttttaattaatctgtttttctgtcctgctcaagatcagctgaagccttcactaggaaggtctctgcctccactgcagtggatctttccctctgtgcggcatagacctccaagcttttgactgtgctatctgttgttgctgtaacagcactagtctagaacatgtatatccctgcatttgtcatctagttcagagtaaaacaccaaatagcacacagggaggcccaggaattctataggaagtaggacaggttagtgaaaggaagggcagctgcaaggactatttgttaaaaagccagatgagcagcggggccttagagaaagcaaatcaagaaactgacctaagctagctcacgatctctaagaggaactacaaaacccagggttccctgcggcacgaacgggaagcgtcccatcccggcgtgaccgcagtgaggggtggtgtcccagcggcgggagattcaaaactggcaggagaaggaacatggagccgtgcgcggcaggccgagctcggacagcctgtgagtgcgggaaggatctgagggtggagcggggtgctgctggcggggcttggttttcgcgggattggctgcccggagcactgctcccccgggaattcgccgaagtgtgctccaggtaactgagctgcaaacccttcaaagggcgcactccctttttcccagtttctggggctccagggtggaggagtctagatgatctaaatggccccttaaaactcagcagttactgtatttgccaaaaagtgccacgggacgggattccgcattgagacgctgcctcccaaatgacttgacgcctgatcacctggacgcttttttaaaatgcagaacccggagggccggtttggcagcgcactccagtaattccaacagttgcaaagtggaggccgaaggtcaaaagttcatggtcattgttagctacatagtatagagaggacagcctgggctacctgaaacatggtaactcgggctgagaaaaactcgggttggtggggagggtggaaaggattccacctgaccatctgaatgaaaaacaatgtccatccacctcatgaaggaacggaagctccaggaaacctgtttgtttgtttgtttgtttgtttttgagacactctggtatgtgggcgtgtgtgcaggcaggaggctagcgcctcccttgctcaaggcccctcccattccacctcgctgagttcccaattcataactctgaggtgatgtcactcacttactggtttattttccatgcttcaacaaccaactcttgttcctttgtaaactccctcagagcaatcaggggatttttctgctgttggccagcactttcaaatctgtatttggaagcgtgtgtctgttgaactgccaattcaaataagcccagcccttcctgaagtcatactgcaggatatccaagatgaggaaatgggataaggaataaaaatgactggagtgcccagtcaaagacagagagaccatgctgtctcttgcgtattctctgagctcggttgttcgttgctcctgtgcgcagctgtcccgtgtttatgtttatagtgtgttccccatgaaaaacatagagaggtagtaagactgtggctaaggcaaaataggagtactccgtagcccagaaaggtctggcatgaatgaatgactgcgctaatggttgatgatgtcagccatgctcccaaggatgacagtgaagggggttcatgagaaagatgggaagatgactggctgcataggagacaaggaaatgtctctggtacagaaggctgcaggatgctccctgataatgggtacactgggaagaactggggcacggagagggtttctgtgctctgaggggactgctgagggaatatgttcagagctgaggtccctgtcttggtttttggtttttttatgatccatttttatttattttttattttttggtttttcgagacagggtttctctgtgtagtcctggaactcactctgtagaccaggctggcctcaaattcttgtctctgaagatttttttttctttctttttttgttgagacagggtttcactgtatagccctggctgtcctggaactcactctgtagaccaggctggccttgaactcagaaatccgcctgcctctgcctcccgagtgctgggattatggacatgcaccaccactgcccaagatccatttttatttatgtgcacgtgtctgtgtgaatatacaccttgtgtgtatgggtgcccacagaagccagaagtgggcattggtagttgtgagctgcccagcccagcgtgggtgctgggtttcctatctaacgctgcattccttgccttgtctcccctcacgatttagatgagcgcctcacagctgaggaaatggatgagcagaggcgacagaatgtcgcctatcagtacctctgccggctggaggaagccaagcggtaagcagggtccacttctcctacctgattccagtcacctgtccccagagcaaatgcaaacagacaaggggctgtgctgctggaaagggcaagttaaaatagttttgtctagccatgcatgagaccacacccctgtagtctcagtgcttaggaggtaagaggattaaaaaaaaaaaaaaatcaaggtcagcccaaaggaggtggctcagtaaagtgccactctggggggaggcagaggcaggcagatctctgagttcaaagccagcctggtctacagaggtccctgacagccagggctacacagagaaactctgtctcagaaagaagaaaaaaaaaaaaagcgaaaaagaaaacaaaacaaagtcttgattagtttcaggctcaatagaagacgccatattttccttagacaaggtctctcactgaacctggagctaggctgctggggtcaccagtacttgtggctatgcctggggttttatgtgggtgcagggctttgagctcaggcccccatgcctgtgtggctagcactctgacctgttgagtcattttccactccctttttatttccttaaaaaaatttgtttttaaaatttaacttaatgtatatgattgttttgcctatatgtttgtctgtgtaccgtgtgcatgtctggtgcccttggaggccagaggggttatcagatccactggaactagagttacagatgcgtgagccgccattcagatgctggaatcagaattggaaccttttacctctgagccatctctccagcgccaccccccctttttttttcttagccaatagtctctgttaatgttttccaaaaagaagataggatgaagcagataggaaatcagatgtctagcaaggacagctcgaaataagatctgcttggctccctttggaaacatactatctgtagacctcaatatctggagagtctgtttagggagtcactgtgcctgacttgtataacctccagcagtaaaatgcatttatattcaaagtgtgctcagactgatagctccctgatcctggcagctgcccactgaagaccggtgatgctggcctcatttctacagaatgcagtggagtctcagaggtgaactgaggaaatcatttcatcagacatgagctttctgtacctaagttctcagaaccataaacaatgagagaaatggcagagcccatttggtttgagtcaggtgtgtagccagacaaagtgagaggttaccttacacatcagggtaagagtctggctatacctccatgaagtcaggctgtagtgacagttttagaattttgggttttttggtttggtcttgtttttttgagacaggatttttttggtgtaatcaaccctggctgtcctggacttgctttgtagaccagactggcctggaattcattgggatccctctgcctctgcctcctctgcctctgctgggattaaaggcatgtcccaccatgctcagctgttttctataaaaatacagacatattgtaagactgtgctttcattttatcccaggttgggggggggtgtgtgtgtgtgtgtgtgcgtgcgtgcgtgcgcgcccggggggggggcgggtgtgtgctttgactgcccacaacagctgactatgatttgcctcctgctctagcagaggcgtggtttcaacagctgcatatagtttctgccattgcgtgttgtttggaattctgggaccttttcagagagtgagggctttaagaggcattggtgatggttgttcatgggggttggttgtagtttgttaatagccatagttaaaaagaaattagattaagagatctctctcccccacccccccatcaaactgggagggggagggggagaaagggtgaaaaaaagaagaacatgtaaagtagcaaagaccagctacagcaggcaggtatgggagccacccagggaggctttccaaggtgaatgagggaaagggttggcctattcaggcctctgtggcagcctggggaaattggggatcagcaagccaatagggtagggaagggatggagtgtcaggtcaaaagggatgggcagatcctgcaggcgcaaggacctgtgtggcctgccagtgggtaagacatgctctcctgttcatagttggatggaggtgtgcttgaaggaggagcttccttcccctgtggagctggaggagagcctccggaatggagtgctactggccaagctgggccactgttttgcaccctctgtggtccccctgaagaagatctacgacgtggagcagctacgctaccaggtggacacagtgtgatctatccccttaccatctctcccccaccaagatgccccttttcacagctataagggtatgggaccacgtcatttaagggtccatatatgagctggccgtgacatgcatgctttcatcccagcacttgggaggctgagacaggcggatctctgtagtttgaggctgaggccagcctggtctacaaaacatgtcccaagacagcaggggctggctacactaagaagccctgtctcaaaaaaacaacaacaaaaaagtccatatacagtcatttttgaggatgaaaagaagtataaataattgtatgtggttagtatctattcactagcatctctctgccatgtgggtgctcccctaacagcatggagccctgctgcctgggccataaggtgccctgaggtacaaatggctggaggtttttctaattacactgcacactccgaggctcgtgggctttgccaccctgaagggtcttgcttgtctcttcttgtctctctttttatttttagacttgtttatttattatatgtaagtacactgtagctatcttcagacacaccagaagaaggtgtcagatctcattatggatggttgtgagccaccatgtggttgctgggatttgaactcaggaccttcggaagagcagtcagcgctcttaaccgctgagccatctctccagccccaagtctcttcttcatgctctaaccagctcgagcctcttgtcctgagccagcttggaagccttactgcactgccctctctgtccctgcctccccactgtccagcccgatcaccatttctggtggtttccactatttttctgttccatggggcagagaatccacagggtagcatccgttggatcctcttatccttcctccccacttaagctggcatctgggctcctcccatagggagtcctgagaccggtaaaacattccctctttcctccctttcaggcgactggcttgcatttccggcacacggacaacatcaacttttggctctctgcggtagcccacatcggtctgccttcggtaagactccatgtgatctaagagaaagttcctcgggggactctgggcctttgaactaggttgttaggtctctgctgtcacctccctattaatgaaaggagggaaggtctcctggactgaggctcatcagtactgtcacgtggcgcccctgtgtagtgtagatggggctacacagagaaaccctgtctcgaaaaaccaaaaaaaaaaaaaaaagtgaaagggcagctggagagatggcttgaaggttaagtgcccttactgtatctacagaggatctgggttcaattccccaatagccacttggttcataaccatctggaactccagttccagggacccctattccctcttctactcttataggcaccaggcaggcatgtggtacacttgaatacatataagcaagacacttttacatattttaaaaaaaaattaaaaaaaaaagatttatttattttatgtatgagtgttctacctgcatgtacacctacatgccagaagagggcaccagactgcatcacagatggctgtgagccaccatgtggttgctgggaattgaactctggaagagtggccagtgttcttaacaaccaagtcatctctctagccccattttttttatttttatttatttttattttttaagagagacattttaggagacagaagcagtggtgggcgtatgctgtgttggtgtaagtgggacagctctctagctttggtcccttgttaagctgactataacataggatgtactaagcttatgtttcgtttctttctctctctctttttaataataatgttttatgatcgattgatttatttttacttttatgtatattggttttctgcctacatatgtgtctctgtgagggtgtcagatccctggaactggagttacagagagttgtgagctgccacgtaggtgctgggaattgaacctgggtcctttggttgaacctcttcctttggaagagcagcaagtgctcttaaccactgagccatctctccagccccaggtttcatttcttagaggtttttgcagatcagaggcccttggcttgaaaaacagcgtggcatgcttggtgcctttgtgggtcatagcaatgcatgccttgttcagccctgcctaagcgcacggcccagagtacattatctatgtggtgaaaatctccggtcaaggaccagactcactcgggctgagtgcctgggacctgatttccctacaggagactatagcctgcatcctgtagctccagaggtcccatctagtggtcagctgaccctgaacactctgtgactatgtaactggctgcgtcttggcttacttagtaagcctttttgacatctgactaaatgggaatggttataggaactgacttagaagcctgggttgcaggcactcccagctctggttggagagggatgcattgttcaacatgatcctccctccctaggccagcttggaagctgtattgcacagccctccttggtgccgctcttcccaatgtgcagcaattgtctggtttctcctctagatcttcctcccagagaccacagacatctatgacaaaaagaacatgcctcgggtgatctactgcattcacgctctcaggtgagacagcctgacttgtcagccaggctcctctacctggatcagccaagagcaatcaatgctgtagaaaggagggagggcgatagccgactgagcagttttgggtatttacgttcataagcgtgctcgtgagcacgtgtgtgtgtgtgtgtgtgtgtgtgtgtgtgtgtgtgtgccttgcaaatgaaggaacagcaggatgaagccatgacttggacgtgaatgagtcagaacaagggcccatcaggagcagctcgtgcaagccacttagtgccagcatgggaggctacttggttctattcacaggcaggcattacagttggccgaatcatagaatgggcctggccagatcccgggtcctcagtgtcacctcttcacgccctctcttcccggacccttctttgcctccatttctggcctctgtggctgtgtttgctgtaatcttcctcttgtctccactgtgacttccgctgcagcgtgccctctgtggagctgccacagctatagagacttgtatggtattttattccttctgtggctcttggctggctattcccatgcactggagtgactggagggcaactgctaagtgctctccacctctgggtctccatcgtcattttacacacctgtggtcaaggtgtggaggttagtacatcccaatgtcctaataccttctgtccttcccagtctcttcctcttccggctgggattggctccacagatccatgacctgtatgggaaagtgaaattcacaggtaagccagctcctttcctttgtccatagactaagcaggggcttgggggttctaggcctaatgaagagcatccctggcgtcattgcagctgaggaactcggcaacatcgcctctgaactggccaaatatggcctccagttaccggccttcagcaagatcgggggcatcctggccaatgagttttcagccgatgaggctgcaggtagggctggactctgcccctgggtaggatgtgggagcatggggcagcatggaggggagggggcgccactgcaagcttcatagcccttgggagggatctggcacctcatccacaggcaagggggtcaagctccctggtgcttcggccaactgtgctctggtctgggtcccttctggcttcttgaccttgctgtgttacccctccaagtccatgcagctattctggccatcaatgatgccgtggagcgaggggtggtagaggacactctggtcaccttgcagaatcccaatgctctcctggggaatcttcgagaacctctggcagctgtctaccaagagctgctggccctagccaagatggagaaggcggccaatgccaggaatcatgtaaggagaaaccttgggttataggggccaggaagttgagaggcctagggagtctcaagcgggaactaggactgtgctttgtcctgcctcgggggaccgttgagaaggagcagaggagctggagggtgatctctgtgagggagcaggctggagggatgagcctcaggcagctgaagtgggtctggaaggaaacatgagccctgaggccagactgcagagtctacaggccgactggcttaattgttggtgtctgggggtagaccccacgttctcctcagtcctcagcaggctggtcttggcctggctggctgtcagtctgcagaaatgacaaggatagggaggaagagattgtgctgtcacccccccaccccacccccgcacctccccatctcaagtctctctccatctcgcttttgcaggacgatggtcaggagcaggacatctatgaatcctgcctcacccaggcagagatccagggccacatcaacctcgccaacggtaacagatgactgggagagcctgggatgctctacacagcctcatggccttatgtgagccagagcctgccctagggaaagatcagaggccagggacgctgtgtcctgctctctggcctcagcagagaggttcttaccagagagatcctgtggggatggagagctattaagacagaggctaatgggcaaggctttcagctcccgggcctgggggtggatattgaattcaggtccttcagtaataataataccacgtacctgtgatcccagcagtcaggaggccaagcaggaagattcagagttcaagacctcacagggccatattgtgggactttctcaaaagcacaggaaagagggaagaaagcaaagaaggaaggatgcgggtcgatggggtagagaaggcagcgggcagaggagcaacctgaaggctccactcgtttgtctgatcggatcagagtgttctcggggggtctgggacagttagacaggagggctgtgaagagcaagaggaagatagaggctggcccacatggccctctgtgttagaggtcaaggacagaaacgacttttaggaggtcggaagaaggtacatttccaggagtggctggggtgcataggggtaagctgccacacgcttggagatgttctgtctttcagtccagggggcactggaagttgttgacgacgctctggagaggcagaaccctggggccttgcttgaggcccttcacgatcctgtcctggccctacaaggggtgagaggaacctttgctgactggtacctggaacagctgacttcagaccgagagcagaaatcacaggtccgctctggccagcacctgtctccccctagggtgggaaatggcctcttacgtgcatgtcatcgctgactccatatctaaatgactgagtcactgcgcaaagccttgtggaccaggcgggctgtctgggtctatttagagtccctcagagggagatggaaggaccaggccagtccattaggtaaccatatgcttcccattgctgaattgggatcttgatttatcaattttatttccaatgctgtgacccctctcccacatttttttttcgtgtatatatgtccagggtatgggtgtatgtctatagttgtgtgcccacgagggagggccaatgtgtgagcatgtgtatagggggctccaaagttggtgtcaggagtcatccccaggcactcctccaccttattcactgaggcaggttctcgtaactgaacccagagctcaccagtctgcctagtgttgctaggcagctcgatccgggagacttgcctcttgcatttgaggctacaattacaggcaaggtttctaagggttctggagattcagaccccaggcctcttacttctgtggtaagcactttagcctggaagccgactctccagctcttaatgctttggtgttattttagatgtatgcggggttaagaatcaattagagtgctagagataggtaggccaggtcctcctacctgaagggagaggcgggactgaggcctggcaggtcccaatattcattcatgacctgggaactctcttttcctgcacctctgccctcttgcaggagctgggcctggtgagacttctagaaaaggaggagatccaggctggtgtggctgtagccaatgagaagggggatgaagagcaaactagtaagtcatctccgggtgggggctgctggcccttgccaatgtgtcttggccctttactggcatatgtattggacaacgcaaactcccaaaatccagctccaagcccgacaaggaactttacccttcatgccctctgtcctctgcaccccctggagggacacgtcgaagggaagatcatgacatcttgttgtcaatcaggactaggctccttctggggacttggcttctaattctgtttatgcctgtttatatttctttggcttctaaaatgtgatttctcaggtaaggatttccaattcagggtcctgtgagctcacttcattcctgagcaccaggggtgatcttggcgcagatctctcagtagtacagctctctgttcttggttaggttctgtttttgttttttgagataagatcagatcttactgtgtagctcatgctggcctggagcacaagtgacactgttagcttagtgctcccgttacacctcccgagtgctcccgttacaggtgtgagccaccactcccaacctgctcatctactctttttttttttttttttaagatttatttggggggtggggtggcggcgcatgtctttaatcccagcacttgggaggtagaggcaggaggatctctgagtttgaagacaagcaaaggcaacacagagataccccgtggagggtgggggtggtaagaggatgtatttgcttttatatatttatgtctataagtgatttgcttgcatatatgtctgcacactgtatgcctgcagtacccatggagaccagaagatgctatcagatccctggaactgaagttacagatggctacgagccaccatgtgggtgctaggaactgaatcctcgcctctacaagagcatcaagtgttctgggctgttgagccgtctctccagccctggctccttcactcttttttttgtttttttgcttttttttgtttttgtttttgttttttgagacagggtttctctgtgtagccctggctgtcctggcactcactctgtagaccaggctggcctggaactcagaaatccgcctgcctctgcctcccaagtgctgggattaaaggtgtgtgccaccaccacccggcaggctccttaactctttatcccacactttggggttttttttcttttcattttttgtctgtttattagtcatgtttttgcagacaggattgtttctctgtatagccctggctgtcctagaactaagcctgtagaccaggctggccttgaactcacagagatcctgtctcccaagtgctggtatgaaaagtgtgcaccaccactgcctggtctcccttgttcttccttgattccttctcagtccctggcctctgggcctcatttcccccacatttcacctgtcagaagccggtgaaacatctccaacgctgtctccaaggcgtcagtaaagtcatttgcttgctctcagtcagaatccttcctcatcaacacggccatagcactgggatggagctgcttctagaactgtgtcctttcatatccttattcctcctcccaagggtgcgtgctccttggagccagtgtccatttctgctggtatttgactggccccagagtggataaactctaaccacactgtgtgccatggttgctcttagcctcctccacctgctgtggtgtaaatggagctaaaatggagctggctctttattcctctcactgtcactagggtttggtccctagagccccttgactcacttcatcttagttctgcgccattgccacctgtcaatcttgttctcgctgccttaggaacttgcctctgctgtgacagccactttctgctgccttctgagctatgtacgcagctcctgggcctaccacgctgccttacacagagcctctcatttaaagtgccccatccccctttcctgcagaacatttaggaatgcattttgaatctagtagaatggctttctagaagcgtcacaaagccatttcccttagaggtcccagcagagcctggttggtaaggacagccgagataacgggaccactcagcctgtgtggcttcttgctgtcctcctctgcagtgctccaggctgtgtggaggatcaacaaagccatccggaggggagtggctgctgacaccgtgaaggagctcatgtgccctgaagcccagctgccccgagtctacccctttgcctctgctttttaccagcaagagctggctctcctccagaagcagcaacagggggtaagctctggggggtcccaggcagctgctgggatagctggtccttggatggccagaaatcaggatgttaggaatgatagaaatcatggcagccagagctgctgcacacactgtgccagcaacagccctactaggtgagcgctggtttcctgcttcaggagctcagggggctcagctgattggtaggatgtgctttaaccactaggctgccccacctaactcctgtccacacagctctctgatagtgaggcatgagctctccttagagtcatccctgtcggctgcaggagttagagtgctcccagggggtcaggcagaggcagagagaaagtgatggaggctgaataatgtaggttttacagcaaggaccaggaaaatagagcaagcagtgctagaggaagtctgggaaggcacctggaagagactgcacagtgactccctccatagaacatttactgtggacacgacctgcacacagcactcatcttcagcaagggcatggtgacagcagccgtgggacagaaacacaagagttgacagcagagcgctgagggctatggacctgagagtttaagtatgacttgtgacactggcagtccgcttactttctctgcttctccgtttcttcataaatggtagcaatctcataggattgccccaaggactccgtgagttagtgtgtgtgcctagagaagcacctagccaagtctcagcagtcgttattgtcctttgcagctctccttgttgaatacaggtagagtgcgccagacaaaggaggcagcctaaggggtgtttgaagagaagagggttgggaaatagagccagggcctcatggtgtgtagcatagcatgagatagccacttggtcttctctgcctaggaccttgtgcagttctgtttgtctatctgactcttccccctagccccatctcatcctttttggctttttcagacatcatctcacatagctcatgctggcctcgaacttgttaactttgttatatagatgaggatggcctcaaactcctgattttcctgcctctgcctcctgaatatgggaccacaggcactcacccccacaagtaccttaatgtagttcttgatgggacatggggaccagaaggctgctggcagaagtcacattttgagtgtgggctctgtagctccatttaagatatgttcgttggggctggtgagatggctcagcagttaagagcaccgactgctctttcaaaggtcctgagttcaaatcccagcaaccacgtggtgactcataaccattcggaacgaaatctgatgctctcttctggagtgtctgaagacagctacagtgtactcacatatgataaataaataaatatttaaaaaatgttcgtagcgataggcttggctagggaagggatattaatgatacctacctcatttggcttgttatggaaagtaagatgatactgtgtgtgatgtcttcatgatcatgttcacagtaaacatccccaggtatagagtataaatgttggtgagtgaatgcatccttggtgttgagcaagagtactgtgggtggatgaatgtggcccaggtgttgagcataagtactgtgggtggatgaatgtggcccaggtgcagaccaggtgtagcccaggtgttgagcaagagtactgtgggtggatgaatgtggcccaggtgcagaccaggtgtagcccaggtgttgagcataagtactgtgggtggatgaatatggcccaggtgcacaccaggtgtagcccaggtgttgagcataagtactgtgggtagatggaagtggttcaggtgtggcccaggtacagtccaggtgttgagtatgaatggtggtgtaaagtgaatggagccagggatgtagagttggcccagtggttaagagcactgactgctcttccagaggtcctgagttcaattcccagcaactacatggtggcttacaaccatctgtaagggaatccaataccctcatctggtgtgtctgaagacagctacagtgtactcagatacataaaataaataaaatcttttttaaaaaataaataaataaaaaagaagtgaatgaagcccctggcccttgggaatggaacagggaaggggcaacagtccaccaacttccctcacgtctcttcctctacaggagctgggccaggaggagctctttgtggctgtggagatgctgtcagccgtggttctgattaaccgtgctctggaagctggagatgtctgtgccttttgggacaatctagtgaatcccgcaactggcctagcccaggtagaagaagaaaatgcccaacggtgagtgagaaagtttgacccacatgtcagaagtgaagggatagcatgaagatgctcacaccgggcagacggtggacagttctgctcgaagttgcccctcctgggtttcttccccagttggggagcacaagatcatcccccttcatttccattttttttcagagcaaatgtttgagtgcctacacactgccaggtgccactctaggtgttgaaaacagtgactgaaaccaagcatatgcatatgcaggacttataactggatggacacagctactggatgggccaaacaaaacgggacagagtgggtgtggaacagttttttagccacaaaatgtagttatagatggcttttaggtcatgtggaggacaaggagccagagttagtcccatgatcctcttcaggacaggactgtcctaggtgcactcatagaacatcaggaagggcttggaagcagctcaatggtagaaggcttgctttgcatgcctgaggctctgagtttaacctcccagcgttgcaaaaataaaaacaaagactaccaagaagccagagtagtgagaagctaaacagagtgaggcagggaaggagtgggctagcaggaaccagcctgtgtcctccaacaaggaaggaagctgtgggctgtttggcacaaaagaagcccatttgacctgctttaccaagatcatcctggctgctgtgctgagactccaccacagggccgggcccgggcagagcggccgggatgcctttaggcatgctgctagttccacggtggaaacagcaggagtgggaagaaggtggtgaagtgtgaatgtattctgaaagcagatctgacagggcttggtggcagagggaaccgagagggaaatgactcaacagatgttcatccagaagggacaggctgaggtgcagaggcagaccagggtgattgggagttcagatgatgcaggctggggtgtttcagacctccactggcatttgggtgcaaatccttgggaggccctggggcctgtgagggatggacgtatgcttttggggttcattaacctaagtctagagagtgggtgagatctgaggtaagaacatggatggaaaaggggtctggagcttgaagggctctgtgctccacacaggaagggggcttgtaactgtctgtgaagggagaagagaccctggaaattatggtgtcccagggaggaaccaactcagagctttctccacttggtggctgtgtggctcacttctcttctttgttgctagttactttgatgccctggtgaaggttcagcagtttcaaggaacacatagaggcatcctgagctggaatgacctgcaggctgctgtgagccaggtcaatgaacaggtccaggaagaaactgatcgtgagtaccccctcagacagctccccctcggacaactcccctcagatagcccccctcagataccccacctcagacacttccccttagacagcccccctcagacagcccccttcatatacccccctcagacagctccctcagacaaccccccttcagatagtctcactcagacatcttcccctcagacaactcccctccgatatcccccctcagacagctcccctcagacaacccccctcagacatctccccctcagataaccccctcagacactcccccccagacagcccccccagacagcccctcctcagaccgccccaactcagacatctcccttcagacagccccccctcagacagcccagttcttcccctagttttgtgtttggagctgctgttcatctggatctcttcctcagaggtcctcgccatcagcctcatcaatgaggctctggaccagggctgtcctgaaaagactctgtctgccctgctgcttcctgcagctggcctggaagatgtcagccttcatgttgcacctcggtaccatctcctccttgtggctgctaagaggcagaaagcacgggtaaggttagggagagatggctgggttagacactaaagcaggaggaccagccttgagcagagctgtgcctggcatgaactctgaaactgttccaggccagtgggtgcagacccttccctgggtgaggcacaagcaggatttggcctgttatgggaaagtggacttcattccaggacagttgtggggaaagagcaggcctgagaagcaggtaactggattcactgttctggtccccagtgatcacctagtagtagcccctcagtacccctggggtatggaaaacactacatgctctgcccttgcaccttgtgcatatccggtgagctgaggatgggacagggatttgaactgacacacccctgagctgtgtggccgcagaatgaggccaagccctgtgattgagctgcagcctgcaggctcaccctgcacttactgagttttcattccatgccaagtattgcttgatgcacctcaagtattgattcatgcgtgaggctagggaggtgactcagtggttaggactgcttgaacttgagccgcatcaggcagcttacaaccacctataattctagatacagggatctcatatgctcttcagggcactaaaacgcacatgtacttacctccacactgatacatcatccatagatacctaattaaaaataaagtcttttttcttttttttttttttttcctttttagttcataagaaaagtcttaggaatagtaccccatagctcacaccagcagagaggctgaggttggcttgggctactgactattagaaagataagacagggctggagagatggctcagcggttaagagcatttactgctctttcagaggtcctgagttcaaatcccagcacccagatggtggctcacaaccatctgtaatgagatctgaagccctcttctggtgtgtctgaagacagctatagtatacttatatacataaaataaataataataataataaaaaggaaagaaaaagataagacaagcagtcacctgacacataattggtgctcaataaaatgttataaaatgttaattttacaacatttttctgtctgtttctggtgaggaaagtgtggagctgggttgggtttcagactgaccgtaggaggcacacaggcttactggacctgtgtacacacaatcttcctactactttttggtgataaggaatgtgtagccagaaggcgaagtacagtcagggccaggatctggctgagggctgtaaatgatatagagggctttggggagggctgtagggtaggtgttccagccatggctaaggcacaaaggctagcaagagagcaagcggttaggaggtactggatactgagagtatgaaagccatagagagccctgaggccaagctgagtcgatgctgaggactctgaaagcagaggaagaaaagagccttcggtgtctggcagccatccaaggagaccacaggaagtagggagcagagaaagccttccccactgccccagagtctgcttgtactttggttctgccactgggcttgtggtggctcagagataccagtttggggtcttgtctttttttttttccctctcctgcaattttgccaggtgacaggagaccctggagctgtgctgtggctggaggagatccgccaaggagtggccagagccaacgaggacacaagcacggctcagagaagtaagcagcggggcaccctgcagggaggggccccccacgccatcttaccttagcatcttagcttcctactgctggataaacaccatggctaaaggcaacatggggaggacagggttttattcagcatcacatcacagtccatcactgaaggaagtcagggcaagaactcaagacaggaacctggaggccgagtccgtggagggatgctgctcactggcttgctcctcgtggcttgctcagtttgtttgtttttatacaccccaggaccaccttctcacaggtaacaccatcatcagtgggtttccacatcaattgttaatcaagaaatgccccgcaggcttgccgataggctacccggtgggaacattgtcttaagatatatcttcccagatatatctggatttgtgtcaagttggtagagaccaacaagcacagggacaggtcagaactggagcaggagggtgctttgaccataagatagacttcccaacacacagctgggcagggaatacccaagtttagaactgccttccacaggagcccttgcctggctgctgcctccgtggacagctgtgttaccccgcacactccccatctcccccatcagccatggtggttttgtgtgtctcctgagtccagcccccctggacaggacggggctcaggggaaggaccccagaaggactgacttctctttcctgacgcccatcagtagcccttggtgtggctgctatcaaccaggccatcaaggagggcaaggcagcccagacagagcgtgtgttgaggaaccccaatgtggccctccgagggatagttcctgactgcgctaaaagctaccagcaggccctggaaggcgcagcggcaaagaagcaatgccctggtaatagctctggcctccaccttcctctgtgctgcctctggcctcctctgagccttcttggctcacttgagtttctatacaggggacacagccttctgggttcaacatgacatgaaggatggcaccgcctactaccttcatctgcagacctttcaggggacttgggagcatccttccggctgccacctcaatacctcccatctaacctgggaggagattcaggttggcagggttcctgccagggtgagggactgtacctgggaagagactcctacccaccagaggactactatctccacagtcagtcatcaccaaggtcactgctgcccatgaccgccaactgctctggaaggccaatgttggctttgtcatcaagctccaggcccgccttcgtggcttccttgttcgccagaagtttgctgagtcttcccacgtcttcaggaccttgcttccagccgtcatcaagatccaggtagcaaccctagcatttccccatgcctgggtgtcctccctccttcccttgccctggatggtttgaatggtttttagacctctgggcaatagtgatgaaagctgtggactctgcagccaaactactgtggtttgttagctgtgtggctttgtaagcttttctttctgtttatgcctcagtttcttctcccaaaagatggaccggcagtgctgccttacagggtagtaaggaagggttagtaagcaaggcctagagtgtctgtacaggaaaagttccagttatgacatcactgtcaccatccaaggaagcgtgtgctgagattcagacatcaggaagacactcttcctggagcaggatatgtgaggagtggccgttggctagaaagggagtctacccaccctgagggatgttagttagcgactaatctgtggtcctctccagtgggcattccattcagttctagcctgtgcatggctctcggggcctttggagctgaccagccagtgattggcacgggagagtagctaggagagtaaccagagccctctgtgagctagaaatgaggaacaccttcccgtggcaggcatgctggagtatggttgacactcaatggaacaggaaagacacaaagattgatagccctggggggcctgaagggaggagcatgaagctgtggggtggcgtggcctaagctgcagtagtaagtgaaggctcagactctcgagttggcctccccgtcctccttccctctgactgagggctgtgcgccctgctcaagcccctgcagtattcatttcctctgtaaggacacttgcttaacacattggctgaggaatgtggaggaagttgcatatgccttgagtgtgacagaggctcccttggatgctggtgtcagcactggctcagtcatgcggtgacccaggccacagtctggtctgattccagactcgggtccacatgcacgtaggcagaggtggcctgctactgtgaccatttgcctcagctttgagaaagtgaggctcagaagtgaagcagcctggatgccccgacactttactctgtccattgctggatccccagtgttctctaatgactaatccagattggggggaatattttggttttgtctatgttgtatgtggggggcagggcgaggcagggcataccctgaggtcagaggattaccttaataggagtgagttctctccttccactgtggggtcctggaaattgaactcaggttgtcaggcctggctacaatcacctttacctactaagtcatctcaacagcccgtgaacatgtttcaggagtctggtcagggcttacagagtgtatgggggcatggtgccttctctggtgagcaggggctggggaggggcatggcacattctctgaagctggtaagcatttgtgctttattaatatttttgggtccatgtctcacatctgagtttccatggggaggtattagttaggtagttagtctttctcataaagccggcagagctctgggaacaaggccgatttcccttccccgtccttctgtcttagtttctgttctgttgctacgaagaaacaccatgacaaagtaacttagaaaagcgtttccctgggggcttactgagactgagtttcagagagtcaatccatgatcatcaggcaggaaacatggtggcccggacagcaggcgagcaggcactggagtagcagctgagaatcttacatctgttccacggtttggagacagactcaatctggtgtgagttttttaaacctcaaagctcaccccccagtgacatagcacctccaacaaggctacatgtcctgatccttcctaaacactccatcactgggaaccaaccaaacattcacatatatgagcctgtacagggccattctcactcagaccaccagagcatcctagagagcccggaataaagccgcctgagtaagctcaaggaggctgctaggttccctcttgtgctctgcaggctcactggcggggttatagacaacggaaggcttaccaggagcggctgcagcattttaaagcgaacctggatgctataatcaaggtaactgtggtggtttgggcaaattcctttctcttgagggatccttagaacacattttcatcctgtcacctcccgtggctctggagttggctgcattgtctagggcctgagggtgagtctcagcccgaggttctgaaggtagcgtctcacctctcagatccaggcctgggcccgaatgtgggcagcacggaggcgatacctcaggcgtctgcgatacttccagaagaacgtgagtgctgcccccatcacacctgtctgtactcagagatcaaagcaaagtgcacggaaggacagccaccctgttcccttgtgttcgtgctaggttgactccgttgtgaagattcaagcatttttccgagccaggaaagcccgtgatgactacaggatgttaggtatgctggggagatagaaacccagagctagacaggtctctgtgtcacccttgaggatgcacagcaggaaagggtgaggccatcctcaggttatctgaggagtgtagagtcctcacctcccagtagcacatagttttgtcatagacaaggctcctctgaccaggtcctttctgagcaggcctaacatacctattcccctgtggtaggctttctcccctccctgaacttctagccttgctgttttccttggctcattcactggctatgcagctcccaggaccctcctgtttgcacctcccagcctgagattacaggcatgtgcctctgcacctggcacttcgtattattcaggtccttatgcatgtgtagcaagaactttctggtagagtcccatttcccagcctagtccctgtcctgcaagtctagaattccagccttgggcgtgaattagcactttggtccatctccttgatcacctcctgctctggattcctgcagcaggaggaccctttcctttctgtgcttcaggtgggggccttgggcggcttgcgcttagtcgtcctccctctggctgtaagcttgggctgcttcctcccgccccgccccgccatctcctctgctgttacacgctctgcctgccctttatcttccttccttccctccagtcctcagtatttctgggggaaagttactcctccagcttcctcggcccagcatcctcccagaatggaccacgtatgtactgtgtggtgtggtggcctctgcactaattcctcctgtcagaggtggtcacttgtcatccctgcaaccattttaatccactaatcctgtgcctaagctgattcccattggctgatctctggtgtccgtgaggtcgaggtcctgattctcagggctgactggaccagcctgcccacttcttcatgggggctgtaacatctccactgtagctgagcagtcctgctgcttgtcccattaacgtgctgtggctcccgttgcctgaggtccagcctcctagccacagcaccacccccagccagcccctccagccgcaccccccccatcctcctgtactttctcacaccttgtcttagttagattcccatggctatgataaacaccacaagcaggggaggaaagggttaatttcatctttacacctccatgccacagttcatcattgaacgaagtcatggcagaaactccaggcaggaactctgtaggaggggactgaagaggaggccgtggaggggtgctgcttactggcttgctcctctttttttttttttttttaatgtttacgtgatggtttatttttaatttttaaagattgatttattattatacataagtacactatagctgacttcagacgaaccagaagagggcatcagatctcattatggatggttgtgagacaccatgtggttgctgggatttgaactcaggaccttcagaagagcagtcagtgctcttacccactgagccatcttgccagccctggcttgctcctcttggcttgctttctcaggactatctgcccaaggatggtcctggccacagtagactgggcccttccacgtcagtcactaatcaagagaatgcccaacgacttccctacaggccagtctggcattttctcagcagaggatccttctcagatgattctaactcaaatcatatttacagaaagcaaaaacaccatggtgtgccatactccaggcctactggattcccagcttctgaccctgctgctgctctttccccgcccccctgcggacagtaggtgggactgcacagcctctttgctcccatgtaggagtgaggctcacttttgtttccctaagatccctcctgctggcccctcccaaagcagcagctgcgcagtatctgccagtggcttctttgcctagatcccttactggattctctctagccacagagcctacaatcactcagcctccaaacatgactgcttctttcattgctagcggggtaacctggggcacggcacctacccctctctgcctttggaaactcatccataagatgggtgccacagcgctggacccattgaggctttgttgggtttttgttttgtttttaaaccacttaatttgaggctggagagatgattaagtgattaagagcactggctgctcttcaagaggacccaggttcaattccaagtacccacacatgacagcccacgactgtctgtagctccaatcccaagggttctgatgcttttcttccagcctttgtttgaatagtgcatggacacacacacacacacatacacacacacacaagtacacacacaagatgatgcctggtagcagctgcttgagaagcagagcagggggatcctgagttcaaggctagctaggactgcataatcataccacaggagcaccaacccagtgataacatgaggaaccctgcctgtctcacagtgaacatggcatgtgtcgtcatcttgttccacgaagcttaattcagaggcttctttttgagttttgttgtaggattttgtttggctttgttgttgtttttttatttggttttgatttttttttctcttcattataaagttgaccaccttacctcaaggacactcctcacaggtgctacatgcagcgggcagagctatgtggtagacgacaggcggggggtgggcatgagagacgggtcaggccagcaggaagggggacaggtgcgatagaaccagggtgcttttgcagaccatggagaagggttgtggccctggtttggtgggaaaagtcaccagagatgccagcatggttggtacatgaagggtatagagaacagccgtgacatctctagatgtgagacaaagcttatcggtagacctagcagttaggagaggcctggggttgggcacggggtcgtcatggggcaggtgctggcagaggcttgctgacacttgcctgaccaatgtctcccctcctgccagtgcacgcacgccatcctcccctctgtgtagtccgaaaattcgctcacctcttgaannnnnnnnnnnnnnnnnnnnnnnnnnnnnnnnnnnnnnnnnnnnnnnnnnnnnnnnnnnnnnnnnnnnnnnnnnnnnnnnnnnnnnnnnnnnnnnnnnnnnnnnnnnnnnnnnnnnnnaggacctcaacctcatggacatcaagattggtctgctcgtcaagaaccgcatcaccctgcaggtgagctgccccaagacctgccgctcctgagagagagccctgccccttcttcaactggtagttcagtcggtccttcagatgtgtgtaggttaccacctggctcaggcccctgtgcctatggttctccacccttggtcagctattggatgtgtgtagtgcagaagaaagaaccctgcgggtagaatatgaacggccagctctgccgagtcctagtgctggggccatgggtgattgagatcaatcagttaacctcaaagtctgtctcccctttagctcgctggaataaggagttgatctcttccctggcagaatgcagagacagatacggaagctcctataaattacattcagatgtggagtaacaggctgatgctgctgtcacgtcttcccccatgagattgtatattagtcgataagaaataaaaggaaaagccccaataggcacagggcctctgcctggcagcccagagctctgaagccccacctatgaaaacagaggcgccaagtggagctgtgggcagtggcaagggctttctcacctctcatgagccctggctctcccagtcactgagtctggaccatatgtttcatgcttggtaccagtccagcctcattggtttgcccctacacccacatccaggaggtagtctcccactgcaagaagctgaccaagaagaataaggagcaactgtcggacatgatgatcctggacaaacagaagggattaaagtcactgagcagagagaaacggcagaagctagaagcctaccagcacctcttctacctgctgcaggtgagcaaaaagttcttcccaggaggagccttgggggtgtagggggatggtagcacggtggtgagtgcttgctcagcacacacataacactaagaatccaaagcaattaaaaaaatccaagaagcctccatcacctcctgagcatagggccttttctttgcctttcttcatgccctgttccagtgccctgggaaaggtgatactttctccacatcaggaaaacctttgtaactcatctgattgctaattctccaagaccattcctagccctctgtctccctgatcgttcacagactcagcccatctatttggccaagctgatctttcagatgccccagaacaaaactaccaagttcatggaaggtgtgattttcagtctgtacaactatgcctccaaccgtcgggaggcctaccttctgctccagctgttcaggacggcgctccaggaggaaataaagtatgctctcctgactccagtgtgggggacagggaaggtgggtcagagatggcagctgttgttacacacctaggatggtatcaggagtccactcttcgccttataggaagtatgtaaggctctgcaacagcacagcaggggtggcaggctgacttgtcagcaggaaggatgacatccagacagcgggaccattcttagggtgggcactagagttggcttgaacaggcaaaatctggaagacaaaagaaagatagctatgtcctccttaaaggcatgaggccagtgacctattgcaccacaggtcaaaggtggaacagccccaggatgtggtgacaggcaaccccacagtggtgagactggtggtgaggttctaccgcaatgggcggggacagagcgctctgcaggagatccttggcaaggtcatccaggatgtgctagaagacaggtcagtcagcatccacacagaccctgtccacatctataagagctggatcaaccaggaggaggcccagactggacagcgcaggtgagccagcaggacgtgggagggcatgctttgctctgtaggcaagcctgggaatatttgaaggtgacatacgaaagcagaggtgatgccccgcctataggagacttgggccatgactttctctgctaccacagtttacaaagatgattttgatagagtaccttgctatctgcctttggtctggcaggcatttctccctgctctgttccagctgctcggtagcacttgagtcctccctcctccctgtgtatcctccctgctgcagtcctccctcctccctgtgtatcctccctgctgctgtcctccatcctccctcctaagctgtgaatcctcactgctatagttcttgctgagtgctgcctttttctctggctcttctcttggaatggtctgtcttgagcctatctgtagaagcccatatagaaaaattgatgagaaagcccgggaagggaggcaacagaaggggacaccagctttaccacatctctctgcccacagccatctcccctatgacgtcacccctgagcaggctctgagccactctgaagtgcagagacgattagacatctccctgcgcagtctcctcaccttgactgagaagttctttgtcgccatcagttcatctgtggaccacattccgtatgtgtcaccacctccccagggccaggctggtttggcaggggagaacagcacacgtgatattctaagggaagcgggtgggaaaggaggcagacagaggggcctggagcggcttcaggtatgttgaagcccttgccagcaaactgacctgggatactacagatgggtctgtgtgggtgttacgtcactggtcaaaggggagtccaaaataacagagagatacttttgtctgagaacaattggagaaaagatggggttctctggcccacaaagtcaaagattagtatttcaatctagtaacgtccttcatggttacagtcctccctcccatactttgtttctttgagacagggtctctctacataaccctggctgtcctagaacttgctattatagaccaggctggcctcaaactcacagagactcacgtgcttctgcctcccgagtgctgggattaaaggcatataccactacatctggcccttttaatgtgatgatgttttgcctgcatgcatgtctgtgctccatgtgtgtacctggtgccttcagaggccaggacagagcgatcccctgagaatagagttagtggtgattgtgagccaccatgcgggtgctgggaatctttctctggaagaacagccagtggtcttaaccactgatccatctctccagcccccagctctcttcttaaaaatcggccagtaacccggaggtagatgcaggggagtcaggctataaacaaaccttactacaaataaaacttccaagttagagtccagtctaagctacatgagaccccagtctccagacaagacaaaacaaaatcactcaataaatgttttgtcgaaaactatttgaagctgggtgtggtggtgggtgcttttaatcttagtactcaggaggcagagacaggatttctgtgagttcgaagctaaggctacacagagaactctataaaatgagttctaggacagctaaggctacacagagaaaccctgactcagaagaaatagagaagaaactatgaacgagtatcgtctagatccttcagccactggacttggttcttagtgctgaggacaaggttgagtgccaaaggggaaacagccccaaactggattgagatggattgaggctttgcaattgggagtaagaaacgactgaagtctaaggagagagatacacaatgagttttaaatctccatttgttcgctaggtgtggagatagcttttaacacagtctgaggctgggcagtggtggctcacgcctttaatcccagcacttgggaggcagaggcaggcagatttctgagttcgaggtcagcctgttctacagagtgagttctaggatggccagagctatacagagaaaccctgtcttgaaaaaccaacccccccccccaaaaaaaaaaaacacctcacagtctgattaggtttgtgtagcaaacctgtcacaggagttgacaaagaaattaggttggaataacaccactgctctgacaaaacccccgagagactgagtgctcactccagtcttcctcaccaggagacaggggcagttgggaaggaaatggctgagaggaggaggcaagcagtcaggccctgccccagcccaggctactcaggacctctgggagctggcaaagttggctgccttggagcttcctgggccgttgagtacccagaagacagcatagcatgcctccctagggatggtgaggtatatagtaagcagaggcggtcagtggggaaataagagggtctcaggtaaaaggttctcgggctggatatgtcggcacacaacacaactgtagcagctcttggaaggcagaggttgagatcatgaatttgaggactgcctctactacatagcaagaccctgtctcaaaaacaaagagttggaggcagggagcgctgtagggggccaattagggccctgtccctggtacaacataaggacaggaggaagggcaaaggcccaggggtggaagattgcaacggggagcaccaggagatagaggtctgccatagggagcactagaaggtggaatgtatgtgggctcagctctagaggggctgagcttagaggggaggggctgctagtctctcgtaccttgagtcagggatgaggttgagaagagccataacttccctattttgtccctaaggtatgggatgaggtatatggccaaagtcctgaaaacaaccttggagaagaagttccccaatgccaccgagagggacatctataaggcaagtgttgtctcttttgccacctccaagaccctcctgtgtctgccaatgatccccaaacagacaggatgacaaatgatgtcatatgtatctaaaggaagaactgggccccatcctgtaccccgagctttgcccaccagtggggaatgtggacccacggctgtccaggtggcttccagacctttctggaatttctcctctgcactcaggtggttgggaacctcctgtactaccgcttcctgaacccagctgtggtcgctcctgatgcctttgacattgtggccatggcggcaggcagcaccctggccgccccacagcgccatgcgctgggagccgtggctcagctcctacagcacgctgctgctggccagatcttctctggggagagccggcaccttcgagtcctgaatgactacctggaggacttgcatctcaagttcaggtctcaactcttatcacccttttcctccctggacttctctccacttcccttggttcacttccagaggcacagggtctatgggaggtagtggcaggcagcagaaagcctcccagagacagagaggagcatcagcaagccagcttgggtggcacactgagagcagacaagagcagagcggggaccaagaactgacctgatgtgggtggtggccatccccatggtaaacacattatcccagttcactctggcatgtcctctctctgggacaggaagttcatctgcagagcctgccgggtaccagagccagaggagcgcttcgccatcgatgaatactcagacatggtggctgtggccaaacccatggtgtacatcactgtaggggagctcatcggcacacacagggtaaggggtcagcaccagagggctaggccggaattccacacacagccctgagccccaccccccaaaaccaagcctggcttatctctgcaccctctttccttctaccatccacagctcttgctcgaacaccaagaccagctggccccaggtcaccaagacccactgcaccagctcctagaagaccttggggagccacccaccatctctgacctcattggtatgtgccttcttggcttctggagccttcaggggtggttgtcaatgggcagctcgttgtacccctctctgttccccatgactgatgtacacagactcacagccttgtggccagtgcacagatgttgatggtagaagagaccaagctatggccgcacaatcatcagaagagacatgagggcaaagtcgactaggtctggtctaggtgtctagctctggaaccttgggatgagaggggtttggaggggcagtgtcagtaggatgataccaacacctctaagctgcatggtacccagagtgagatcatacagaggctgggtgatggtaattcaggtccgtgggtgtcaaggttgagggcatggtatggtcccatgggacagtgtgggagggcttcctcaaaggtatacagaagagcacctctactgtgacccccatctttgcgtgcctgtctcactcatctctcaccccatcgcaggggacaacatagccacagacgggcatgtggacctgagcaggctcgaagtgtccctgacactcaccaacaagtttgaagggctggagacagatgctgaccacaacagcaaccaaagtctgcttctgaggtgggtgtggaggcccaggtagccctcctccctatacagggcccccactcagagagggctgtcatacttccttgttgccacccctcccctaccgccattcttcagaaagttctccctgaagcctagctcacgatctccgtactcagaatagtcttgggcaagtgctcagcctttccttggagttgtagctgaaggcatgggacgatcaggagcctgaggcagcagggtgcttgcagactatgctttggctcacttacttttggatacgggacctcctgtgtatgtacatgtgtgattggaggagcacatgtcacacggcacacgtgtggaggccagaacagccttgtgcactcagttcttctgaatgacttccatctttacgtgagtctggggcatggaacttagtgtccggcttgcacagacttcggacagctgccttatcaacgcaggccaggaattcacctcacgcctctcagtcggaatgaagcagcacggcgggctgggctggtcatctgcaccagttagcggcaccagctccctgaaccagctctccactcattcacacgctgtcgctgtcaacaagagttggagacacaagcagagagcttcccagagggagagggcagacatgagggtggctaccaggaggaagtgaatacttgggctgagggatcagaggaggccagtttaggggagagtattctcagggacaccgcctccccctggaccctccctctctctgcatcctgggcatccccaacagtccagacctggggcaggatccacttatccttggctctttggcctaccctgtccagacctttcctggtcctcaccctgcccttccctgcagcaccaaacagatgctggccgacctcatccagttccaccctggggagtccctggaagagatcctgacctcctcggctcccagagagcatgtgagtagccaggacagtcatgacagctaagccttagacaccacctcacccttagtctgccacagagaccagtgggcacatagaaggccaagcctcagaccttgatgccaagggtcacaagctgaaggagcagcctaagcagctctctcgctcgctctttctctctctttctctctctttctctctttctctgtctctctctcagtctctccctgtaccgtgcaggggttaggacagtgctgaggggcagtctgttctgagaaccacataagggaattgctctggaaatggaggctgttggagggtttggaggcaagagaggatgccaggtggacttgctgtaggggttggcgtaagggcaaaaccaggagttagttccctgagtaaaagtggtagtggcaggcagaggcatggcccaaaacagttaggcaggctccacctacactttatgcccacagagagcaccatgctgggttgggaagctgttagcagccagtgtctccttggtctatacaaatgctttgggccaccatagatgatccttaagactcttctatgtctgggtttttttgtttgtttgtttgtttgtttgtttgtttgtttgtttggttggttggttggttggttggttggttggttttttgagacagggtttctctgtatagccctggctgtcctggaactcactctatagaccaggctggcctcgaactcagaaatccgcctgcctctgcctcccgagtactgggattaaaggcattgcctgtgtgttctccatcatccccatctccaccccacccccaccccccaggacctaggctgggaaggtagaacgtgaatagggctcccaggctctggggtctgaagtaggatgttagggcccaggaccccctcatcgtctctgctgccctcccaggaagaagcccatcgtcggttgatgtgttggcgccaagcctgtgacacccagaaaccagagccacttcgacgacaccactcactaatggcacacagtctcctgtcactgtcggagaagcagcaacgcgttctgcggaacctgcgtcggctacagggcctggggctggtcagggccagtgactgctaccagggacttgtagacgagctggccaaggtgataacccaagccaggactacgtggggctgctgtaaagccatgtgctggcattccaaaggcagtcttctccagtgggtgccatcccaaactgcctccaacttgagaaaggcccagggttccttttttttttttttaagattttattatgtatgcattgttctatactgcatgtatgcctgtatgtcagaagagggcatcagatcttattacagatggttgtgagccaccatgtggttgctgggaattggactcaggacctctgaaagagcagatggtgctcttaacctctgagccatctctctagccctatccccttccagggttctttttaaaggaaaggtcctaggactaagcagacagacagatttcctcccagctctcttcccctgggacatggtaacctggagagaggctctgagttcctgcctgggctgttaggtgtgtacagtatgcttagattgtctcctgggtaaagcagccttccgggtggccatgtcctggtgtgggaatggaacctgtatgctaggtggacattctgccctaagccactcctgccccacaacctctttctatttctcttgaatgtcctcacagtaagccttgtgaggtgttctaggatttatgaagggtgctgacctgcttcctcacccccatcctcaggacatctgcaaccagcgtaggcaccggcaacggcggaaggcagagatgctgaggctccggaccacactgcagggcctagatgcaaaaaccatcttctatgaggaacagggtgactactacaaccaatacatccaggcctgccttgaccacctggcccccaaacccaagtaggtgctggaaacccaaccctaagctcttggttccctccccaccactcctcatccacctttgccctgccatctcccaaccctggctaggaattcatcctagtgtggtactgcctgctcctgaccctggtgtctgtggttccagatcacctcccacagcagggaggttccttggggcctggtgtcttctgccagccaccaagagccaacagccagtgttgaacatttgtctccgggctttcttctaaacaggagttctgggaaggggaagaagcagccgtctcttcactacacagccgcccagctcctagaaaagggcgtcttggtggaaattgaagatctccctgtttctcagtatgtgtccttgggggacagaatgtcagactcttcctgtctccagagagggacaatgctggaatgaagctctgaaaggggcactgggttgaaaggaaggaggtggggaaatggggcatcttggagcagagcggagagcagtgggcatattcctgctctagtaaggattctgggaaagctgctgggaggtgagaacagcttggtggaccacgcaaaaagactaaacaggcagagctcaaaccagaggaagagagagcaggccctgcctggcaaaggagaagcttggtatgggaccataccgccccaatgagcagcagaggagtgggggtgggggctctgaacagaggagccccgtgttgagtcttatccctcacagcttcagaaacgtcatctttgacatcactcctggagacgaggcaggaaggtttttcgtcaatgccaagttcctgggtgtggacatggagaagtttcagctccactaccaggtaaggtcactaattacattacctgccagagccgaacccatgagtgcaggtctgtaatccaagcaccaaggaggctgaggcaggaggatcaaaacttcaaggcccagagctggcaatggctccgctgatgacactacttactgaaaaagcctatgacttgggtgttgatccctaaggccacccacagtggagggaaagaactgactccggtgggttgtcccctgtcctctccacatgtactgtggcgtaaatgaccacatgtatatgcacacgcacagataaagctctctcttcccctgtgccacacatctttaattctgtactgggaggcagagtcaggtgtgttctcactgcactctctactctcccggaggtcctgagttctattcccagcaaccacgtggtggctcacaaccatccgtaatgggacctgatgtcctcttctggagtgtccgaagacagcgacagtgtactcacatacatataataaatatataacgagagagagagagagagaatgagaatatgaattagggattagagatatagctcagctgtacagtatttgtttagcacacatggtatcaaaggttaaatcccaacactggaaaacaaaatacccctttgggctttaggttcagttccctgcactgccttgtttaacctcctacccactctgcagccttcacctgttctatagtctctgaggctaaaaggttaagggaactgaccgaagccctagctgatgttcggggaaacagtgatttcgttttgacttgaaacaaggtttcctgtcacctaggatggccatcactggctgaggatggccttgaatttatgattatcttgcctctgtccaaatgctgggattgcagagtgtgctaccacagctgatctatggagtacctgggcttcacacagtttagacaactgagctacaccccaagcccatatttttaaagtattatttttacatgggttctaggaatccaactcaggtctctgataagcacttttgccagctgaactatatcccagccctgttttccattgctggtgtgcggatgtggatggggtgcagggtgtggatgcgctcacgtggacctgtctctctcttgccagctcactgtattgagtaggttggctacccagggagcctctgggctctacctgtccctgcctccccgtgctgggttatagcgaataccactgtgggtgctgaagctccaaactcgggttctcactccactagcgccatctctgctgagacacccttagaccccttgtctgtctgtctgtctgtctgtctgtctgtctgtcttagggtatatttgatctatttgtggatgggtgagtgcctgcacctatatgcttatggagtccagaagaggacaccagatccctggcggctgaagttacagtcatttgtgggatgtgggtgctggaatctgaactctgctcctcatgactgaacagcaaggcctctctctcatctcaaccatctttccagtctatctttttttgttttttgaggtagcatgtcccctgtagctcaggctggtcttaaactcaaggccatcttcctccctcagcctcctgggcttacaggtttgcgccaccagtgtgaacatccaatgtgaaccagggcttttatatttatttgttttcctttgttttgttgttgtttttaagacaacgtttcactctgtagctcaggctagcctcccaaatgctagaattaaagacaggcaccaccatgcccagacatatttactgtttgtttttcttaagatatattttatttttttacttgtgtatatgtatgcacacattcattcagatgtccagggaggccagaagaggaccccttggaacgagatttacaggcagttgtaagacatctgatatgggtgctggaaaccaaatccaggctctctgccagagcagcaagtgctcttaactattgagccatctctccagccctacctgttgtttgtttctttatttttgagaaagggtcttattttatagcccaggccggcctggaattcataactatcctgccacgttctccccatgtgtgccggagttccaggtgtgtgccaccatggcttgatctggagccgtgatttttcagtacagattctccggtgtttgccttgagtaagaaacccgctttcaagtcctggctccacttggcctgacattggctcaaatccctgggcctgtttttctcatttgcaaagtgggctttgaacgccccgcttcagtgcccggtgctctggcaggtgtaaggctgtgtgacactagcatctcacgggctggccgagccactcccagaagctcttaactccccctccctgtctcttccctcctaggacctcttgcagctgcagtatgagggtgtggctgtcatgaaactctttaacaaagccaaagtcaacgtcaatctcctcatcttcctgctcaacaagaagttccttcggaagtgacggatgcaggcggaactgaggcctctcagctgactggctgctgcgcttctccattacccagctcttttctccgaagaccagagctcgggccacaatgcttgaccctcccgcccaagaggaattgtcctacttggctgaagtgggccatgctccaggtccggccgggtggcttttaccacatccccgggaaccaggagcctgcactcagtcctgcaaagaaccatggttttgtgtcgctactgctctcgtgtggtcaccacggtgtccgccagtcgtcctagcactgcccagcagccttatctcccttcctttccacgggcttccaaagcccgggccaggctgtctgcccaactccgcttcataagccatgggtgtcgctgtcccctacagcccaggtccctctgtgctgtgcccctcagccacctctatcatcctgtcctagccttgacttggtgcagcacttgctgatgtccatgacagctgagtgcacacctcaaatctcctttccccacttgtggtggttcttatgtgggtcactggggtatttattctaacctgattgttgtgtggccttaatcatggttttaattctcactttctgaactcagagttcttgtcttgccatcttctcgtcacctcagagctgacttccaggtggttctcatagacctgtaggccagccttggccatctctgtcctccccacatctcccatcttcctgcctcactgccctctagatttcctcttaataaaatgttatttcctatgttaacccctgcgttgttgctatagtacagccatcaggttctggggtgcagcttgtgagaattcggagatgcatccttcagcagcctctccccgccatgggcacaggcccactatgtctgcctgcccaggcttgcacacattggggaagtggcgtctctttctctctttccaccacaggggacagagggacagagagggagaggannnnnnnnnnnnnnnnnnnnattgattcagttagccggccactctaacagctaaggctgagaagagcccagtaccggctcctcctcccccccaccccacctcccacatacacattgtacacagctccagtctgtgccgtgcctaagcctggacattccacatgagccacagctccttctgtcccctttccatggagaaagtttccctgctttcgggaatctaccggggcctgtgggggatgggacgatgatggacacctggctgacccttgaactcagcagcatctattgggcgcccacatgttcctggcacagcctgcctgcctctgctccattccattctgtcacccagtatctgtgtccttgtcacattcaatctcactcaaagcctcctcctcctccttaacatgtcacagtaaaaacttcaagtgctgccttgccctgggtgacagtgaaatgtaccaggatcgtagtctctctgcctgctcagttgtaggaacatttttaaaaaaaaatctcacactcaccaagtagttctgacactgccctgctgcaggatcacacaccccacccccacaaatacacggcagtcacgatctcagccccacacaccacacggagaaatgtcacaatggctaagccgtaaagggcatcacaggacttcatcattgattgtctccttccaccactccctggctacacacacacacacacacacacacacccgccttgtgccaacagtccccagtaagcccaagctgattcacctgggcctaccttccaaggcccaatctgacataccctgcaggtgggagtatcaaaaataataccaagtgccaaccagcagaaaaagtattctagtccaggcatgatggcatacatttgtcatctctgcacaggacagtagaggcagtatatttaagaccagccttgactacacgccacagtcaaggctagcttgggtaaatgagaccctgtctcagacaaaacaaaacaaaacaaaacaatgccccaggggctaatggtatataatttagtggctctctggtctggtaattgtctagtttgcccaagttcttaggctgaatccctgcaaaggaaaggtagttgacttcagtagatggtcctgagaaaaaccagaaattcacacttttagaaaacaatggcattgagccctaaaaccctgtcatacaacatatgcaaatgctgattcttttgaaaaagaattattttatggatatgagtacactgtagctgtcttcagacacgccagaaagggtatcagatcccattacagatggtagttgaattcccatgtggttgctgggaattgaactcagggcctctggaagagtagtcagtgctcttaaccgctgagccatctctagctctcccactcttaattttaatctttacttgtatccttttttttttgagaaccatctctctaacctgcaaatgctattatttgagacagagtctcactacatagtacaagctgtccttgaacttgtgatcttcctgtcttagcctccccagtgttgggaaaaaaaattcagtgtggttcatgggatctaaatgaaaaaacataactatagaaacccttagaagaaaacacctggggttacagctcagctaggagggagcctgtctggcaagcacagcgctctgggtttgattcccagcactgcataaaaacagatgtggaggtgtaaacctgtaaccccagcatctgaaggcagaggaaccaaaagttcatgtttgaggccagcctggtctacagcacaagctccaggacaacagccagagctacacaaagaaaccctgtctggaaggacatattttaaatgagatggttcaggagttgaatacttctagaggacctgggttcagttctcagcacacacacacacgcacacacacacacacacacacacacacacacatggtggctcacagccgttggtagctccagttccaaaagagctggtaccctcttctggcctgcacagatacagagcacataaatacatgcaagcaagacacttaaacaaatcaaataaaagcaagcctttaaaaagagcattcatatattcacacaaaagtctttcataagtattcatgttagcattgtttgtaaaagctccaaatatccaccaactgatacctggataaactcaaggagagccgtccacacagtggggtagtagccatcaaaagcagcagggttctgaagcacagacaaagcttgacacacaaatcaagtcagcctggacagccatgtgttagatctcccatgtgaaatgcccaaggcagacagagccatgacaccaaaagaaagtcaatgacaagtcaccaggaaaaggaaggcacgcacctagggcatggggaatgatgaaaacattttataattagagttggcctcagtggtgcaagcctgtaatctcacaaatacaggataccgaagcaggaggagcagaaggccagcctaagctagtgtctgtctcagggggtcgtgcagaactatagctcagtgagtcagtgagattaccagcctaacccatggtgctaggtttgtctagacactgggggggaaaaatgtgtgtgtgtgtatatatatattttttctgtaattggatagtgataatggcaatctaaataatgaacctttatttagattgtaaatggaagatacagggctgtttgtcacatttcaccagacagtgttgagaaatccctttcagtattataatttaaattttttgaatgagagtaactacaaactttagtaataaaatgaaaatagttcctttaagaaaaatagtgaacaaattcttagagaaaatattttctatagcaaggttatttggctttggtcattttaaatattgaatcactcaactgtatattttaaagggctgaatattatgacgtactaattatacttcaataaacctttgtttttggtgtttttcttgattaaaaaaaaaattaggtggtggcacattccaagtcccagcacttgggaggcagaggcaggtggatctctgtgagttcaaggtcagcctgatctacagagtgagttccaggacagccagggctacacagagaaaccctgtctcaaaaacaaacaaacaaacaaaaaagaaaatgcctatacaggccaatctgacacaggcgtttactgaactgaaattcctcttcccaggtgactctagcttgtgtcaagttgacaaaacctaaccaggacatttccttatttttaaagttaagtgtttgagatttgccagtgtgtatgtcactgtgtaccacagtgcctttggaggccatcatgggggacagatcccctaaacctggagtaacagagggttgtgagctgccatgtggggctgggaattcagtgcggatcctttgcaaaggcagccagagtccttaaccactgagccatcgttccagcacagccagccctcttccagctctggttttttttgttttgttttgttttgttttgttttgttttgttttgttttgtttttttaagctggggaaagatcagggaggcagactcctgtcaggtcaaaggacagcttgtagggatcaatcctctctaccacatgggtcgcaggaattgaacttaggtcaccagacttggcagcaagtacttttacctgctgagccacccacccacctcccaggacaaaaactttattatttatttatttatttatttatttatttatttatttgattttctgagacagggtttctctgtgtagccctggctgtcctggaactcactctgtagaccaggctagcctcaaactcagaaatccacctgcctctgcctcccaagtactgggattaaaggtgtgtgccaccattgcccagcccttaatttttataataatactttttttttccaagatgggctttctctgcatagccttggctgtctttgaactcactgtgtagaccaggctggcctcagctagctttgttgctgctgctgtgactgtctgtggccacctcctagtgagagactccagctgggaggcacccagcctcagcgatgggcacctcccaggatttcagcacctgacatgtgatttggctgtccttactatttttagactcacttaataaattccaaggcatgtacatagttgtatatgtccccttgcctctgctgctccagataaaacaccaggccgtagacaactgaggttatcaaggactctcaaccaggaaaaaaaaaagagagagcaaatctgtcaagatcaagaaaaacaagtgtttcctggagcaatggctcaaccattaagagtacttactacgggcctggagagaggctcagcggttaagagcactgactactcttccagaggtcctgagttcaattccaagcaactacatggtggctcacaaccatctgtaataagttctgataccctcttctggtgtgtctgaagagagctacagtgtactcatataaataaaataaatcatttttaaaaaataaaagtaaatgctggtgttggtggcacatgcctttaatcccagtactcgagagccagaggcaggtagatttctgtgaatttgaggctagcctggtctatgtagtaagttccaggccacctaggactagacagtgcaactttgcctccgaagaattattttttctccagttactgattttgtgtggtggccaaatgcgtgctgcgatgagcacctggaggtgctcaaaggacaactttcagttctttccttccactacgtggactctggggacgcaactcaggtggtagttcaggctacccacccactgagcatctcactggctccacagtaagagcctctctccagaaatataaaataaaagctatcacaagcaaacctacttaaatgccttgttaaattcaggtgtgtcatgcagcatttctcaaaaatgctggccccagaaatattaaacctttttataatttttattttttatttttgagacagggtttttctgtgtagtcctgactgtcctggaactcactctgtagatgagattaaagatgcgcatcagcactgcccagcttatttttatttctgagacaaggtctgacttattcatcccgggctgggccttgacctccccgcgtctctgagggtaaccttgacctcctgactctcttacctccgccttcccagcactgccaacacagaggaaaataacttattacaatgtttgcttttcaagactttcctaccactagaagtgtgggattcatcagggcccttcgctggcagccagggcagggagctccaagtgactcttggtctgtgatgaccaaggcgtaaaggcatttgcagcagcaaattcttttatttttttttaagcatttatttattttatgtatataagtacactgtagctatcttcagacacaccagaagagggcatcaaatcccattacagatggttgtgagccaccatgtggttgctgggaattgaactcaggacctctgggagagcagtcggtgctcttaacctctgagccatctctccagccctacttttattttttttttaattaagaaaaaaatcatcttttttttcaagacagggtttctctgtgtagtcctaaaactcactcgagttgttctggaactcattatacgaacaagctggcctcaaattcacagaatcccacctgcctctacctcctgggtactggaattaaggacatgtgccactatgaccagcactaaataaatggtttttctccttggtcttccgagacagggtttcttctctgtgtagccctggatgtcttggaacttgctctgtagaccaggctggccttgaactcagagatccgcctaactctgtctcctgagtgctagaaccaaaggtgtgcgccaccaccacctggctaattattttaaagagaaaatttaattaaaggaaagcaaaacaagggggctggagagatggctcagtggttaagagcactgactgctcatctgaaggtcctgagttcaaatcccagcaaccacatggtggctcacaaccatctgtaatgaaatctgacgccctcttctggtgcatctgaagacagctacagtgtacttagatataataataaataaatcttaaaaaattataaaaaaaaaaaagaagaacgtgagatcgaggtggcgcacgcctttaatctcagcactcggggggcagaggcaggtgagtctggatctctgagttcgaggccagcctggtctacaagcaagttctaagatagccatggctacacagagaaaccctgtctcaaaaaactgtcaagcaaacaagcaaacaaaaccactagagagatacagctcagtggtaaagcatttgattagcacacacaagattctgggttctgttcccagcaccacacacacaaaagaaagaaaatctcaagagaactaggagaaagggagaagggaggggaagctaagagagatagacagaaagaagatagaagagaggaaggtggggaaggggaggggaggagcagagagcagaggggagggaggaaagaggagggcagaacttgtcaacatggccacctgggcaggttccctcatagcacgtggggaactgcacagggctgggccaggaagtcgtggagctaaaggggctgcagatttcattctcatatctacaacttttggtttctctgagttttctcaacatctgccttacagaagcagagaaagaggagctgggagtttcgctctcacccttggtcattagcacccatctgctcctgcaggtgaggctagcttccaagcccccttgagaacttttgctccaaacatgactccatattctgtctcttgccttccaccaagaggtcttgaatctgactttagtgacatgtcttctgcaggaggcgcaagcaaaagtattacaggcgtttctaggcaacggtgggcatttcactttgtttacattatttgctgttgttttttcagccctctatgaataactctccttatcacagcactagagaaaccgtggctcagagagagtcagtgactcacccaagctcatactagaaatgagggtgctgggactggatcccagaagggtctgacccaaccttctcatttctacatatgagcaactctgagagcccacgggatcagactggaggttttgtggatgtgtgtgcattcttcattttttttttttttagagacttattatttagggcccaaagagatggctcatcggttaagagcactggttgctcttgcggaggacctgggtttggttcccagctcccacatggtaatgaacctgtaactccaggaacaggagagctgatgcctcttctgacctctgtggactcctgcatgcatgtgttatacaaaacatacatgaaagcatacacatatagacataaaatataatttaaaattttatatatatataatttgtgtgtgtgcatgtgtatttgtcctcagaggtggaaagaaggcattggatcctttgactctggagtcccaggcaattttgagtcacctgataccttatttttctattgtggtaaagacaccaggaccaaggcaacttacagaagacagagtctactggggcttacagatttagagggtgggcccatgaccatcatggcaggaaggcagcaggcagcaggcaggaaggcaagggactggggcagtagatgagtgagaacttacatttttgacccccaagcaccaggatgagagggaggggaaagatatggggggggggggagagagagagagagagagagagagagagagagagagagtgagagagagagagagagagagagagagagagagagagagcctggccctggtgtgggcttttgagacctcaaggcccttctccagtgacacacctcctccaacaaggccacacctcctccaacaaagccacacctcctccggaaaggccacatctcctattccttcccagttttaccagctggagaccaagcattcaaatatgagtctgtgggggacattctcattcaaacaaccacgtgtgacctgttgtcctgggaactgagcaagtccggtcctctgaaggatcagcaaacattctgcccacctgtaccatgcgcttgtaaggtcttgttctaagtgcctgagtgcttctccagcatcttctctgtactctgtgccactgtgagcatggagtgccggctctcttccttggcattggtgagagctgagctggtttcccctgtaccctttactcttgtctgggcacgtgaggtactgaatgggaatcccacagatactttttgagttttgtttcatttcattttctgagacaggagtctcactaactttggcctctctgcagtcttcctgccccaaccttgatgtctcagttagaagagacaccatgacctaggcaactcttataaggacaacatttaattggggctggcttacaggttcagaggttcagtccattatcatcaggacaggggcatggcagcatccaggcaggcatggtgcaggaggagctgagagttctacatcttcatctgaaggctgctagcagaatactcacttccaggcagcttaggatgagggtattaaagcccacacccacaatgacacattactccaacaagccataccttctaatagtgccactccctgggccaagtatattcaaatcatgacacttgggagagctagggttctaagcatgaggagccatccagtcccacaaggacttgttgcctgttgaacatgagagaacccattggcttctataatcttcaagcatccttgtctgagagacctccaagccgtcacggacagtgtgatggtacaaaaggctgccgggcataaagcaggaatgaaaagaataaacactcagacctttcggtcctcaactttttctcttcataaagtgctctcttactgcctcatgtcttgttagcagtcagctccgacttgagtctagagcatgtgagaccaggacttcagctttcatgtccttttacacgaggttacagtatatgatcctgtcctctagaacagcaacaaagctggccgtagtgacatacatctgtaatcccggcactcaaaggcctgaggcaagaggattcctaggagttcaagtctaagctacagagtaaggaggcagaggccataccaggatgggtggcagaagactggtagccagcaggtaccacatgtgggatctcattgtataacaaacctactgaggtgccaaccagctgggtatgagcacccagtatgtcctcgagggtctcccataccttgaccagtgggttgactcagttaaggcctgttgaataaaagctctcttggggggggggggctggtgagatggctcagggggtaagagcacctgactgctcttccaaaggtccaaagttcaaatcccagcaaccacatggtggctcacaaccacctgtaacagagatctgatgccctcttctggtgcgtctgaagacagctacagtgtacttacatataataaataaataaatctttaaaaaaaaaaaaagctctcttggggggctggaaagattgctcagtggttaagagcacagactactcttccagaggtcctgagttcaattcccagcaactacatggtggctcacaagcatctgtagtggggtccagtgccctcttctggggtgtctgcagagagcaacaatgtactcatatacataaaataaataaatctttagcaatctcatcaggagagacagagcctataaagcacagcaaactcgggaggcagaggcaggccgatttctgagttcgaggccagcctggtctacagagtagttccaggacagccagggctacacagagaaaccctgtctcaaaaaaccaaaaccaaaccaaaacaaaacaaataaagcacagcaagagagtgatgctagccctggatcaaagtcctgccaaagacacagtcacttgagtgaaggccaggggaggaaggacagccctgacccatgggccctccagcagatgggtcctgctcatcgctggcacggtgcagccaacctgaaaataggagttggcatagaggcacagcctttgattctagacctcaaaggctgaggtaggaggatcacaaattccaggacagcctgagttacagtatatgatcctatcccctagaacagcaacaaagctggccgtagtgacatacatctgtaatcctggcactcaaaggcctgggacaagaggattcctacgagttcaagtctaagctacagagtaagactctatttcaaaatacacccccacacacacacacacaaagcaaaggaatgaacctcacaactgacatcctgctacactctcagcaattgagaagtaggagagtcaaaagttcaaggccatcctcaactacatattgagttcattgccagccaagtctacaagagaccctaagtgggctggagagatggctcagcggttaagagctctgactgctctttcagaggtcctaagttcaaatcccagcaaccacatggtggctcacaaccatgtacagctacagtgtagtcatatacttaaaattaaataaataaatattttaaagagagagagagaccctaagttaggaagcaaaataataactaaggaaaggcagtggtgtggtagagaagctagattcgaaaagcactagaggcagcctagtctatgctgtactaaggggaccagatgttgccagctgtcaccagcttccatccaggagccatccttgggcttttaaacagaggtctccacttttgataggcaaatgctccatcctgagtgacactaaagcccaggcactcttcaaccaggttactgcagcttaaccttacagctcctgtcctagcccagcacagtccaggccctcagatagtcctgtgagtgtctgagactggcatctgctatcaccaagctagagaaggctcatatccctcttcctcagtgctcgcagagctgtggtcatccttgctctgtagctacagggaagcaggagagagctataaacttggcccactcatctctttccaggctcctcaacctccatccgtgccaggacccctcctatatgctttctgttgcttagtaaccatgcctcctctccaccctgcagcagcaccctagaaactcttggggtgatgctgtagggagggcctgccaaggtactaggagtcagtatgtgggaacaaggtcccaaaaggcctaggtgtgaactgggctatcttcccacacagatcatattgggaggagcctcaggagcattgcttctgtctcaaccgggttcctagagaaactacactggacttaggaccaggcagacaaaggctggacctgaaatagaaaaactttgtacccttactttgcttctcttatgtgggcagagttcccaagaggcagtcctgagaggcccagtgtctatgctaaccaaaaccactccaccagcagccaacagcaagtgccctccaaaggcatggtacatccaactgtcctctgccactcagttgtcctgggtcactgatgctgggtttgacaataattttttgtgggttaagaatctggaaagggaatgggggggggcgtggcacatgctttaatcccagcagatctctgtgccagtctggtctacagagtgactttcaggatagccagggctaaacaaaaaaaccttgtctcaaagaacaaacaaacaaacaaactaagaagaacaagaataatactaagaagaacagaacaaggaagaggaggaggaagaagaaagaaagaatatgaagaggagagagaggaggaagagggagaggaggagggggaggaggagaagcagcagaagcagtaactgctgctgaacagagaggttagcacagagccagttgagacaagacagactgaagggatatgcaagaatgggtcacagataactcccagcaggctggaggggcatgggagtgggtagcctgcaagctgccttctggatgaggaggccagcagacagtagacagcagaaggtacttccagtcctgggccaagtgatctcaccgaaacccattgcctgatgctgttgcgacctggcaagtctcccagctctcctgggtccccaagtagaagggctttatatagctcactcctcaacttgggtttgaataattaaacagagtggacagaaatagcagccggacagtgaagatgtgttattttggggttttctggaacacagggctcttggtgtcacccaacctctatagagggaggagccagcacaaagactgctgggagattcctgtggggaaacccactgcactctttgggctccatgagctggctgttagggctgctctgagccagaggagagtctcagctctattcatgcctcctcgtcaaggatgagttggtgcctctgctagctgatctcagttactcccaggcaggaagtgccctctggtgtctgtcaggtcttcagcctgggaaaggatgacagaaattgacaagcaggtcgataagcagctgcatgcaggatgaacaaggactgggtggtctgtgagcacaagaagccagaatcaggtgacaggaggcactgtcccctcaccagaggcagaaggagagaaagagaaacggcagctgggactggagtggggaatagcagtggtgaggctacaaagaagagaacgcctaagatgagttagtgtctggccaagaagttcctgcattggacactgtattatatgtctgtaattatactctaggctgaggttggattgcagattcaggcttcctgggctacagcatgagattgagggttgtgagtcccctggcaggaagcaggtgcagttgcccatgtttcgggagcaattggctagctgaggcactttttagcaacagagctgaacctcagtctcaagggttaaagtctgacatgggagaagccaggtcctacactctttccctccagataatttcagtgtgagagagttcagatttgggggacactaaagtcattaacattttgatttttttattcatgtaacaaggtgtgttgttttgtttcagatggaatctcgtgtagcccaggaggttcattatcatcatgacagggagagtggcagcaggcagccatggtggaggaaaagtaggtgagaccttacatccagatctacaggattgagagggagagagagggagagagagagagagagagagggagagagagagagagagagagagaatgagcaagcaagctaggagtctggcgccctgggcctattgaaggcttttgaaacctcaaagcccacccccagtgacacatctcctccaacaaagcaacatctacatcaacaaagccacacctcctaacccttcccaaacacttccattaannnnnnnnnnnnnnnnnnnnnnnnnnnnnnnnnnnnnnnnnnnnnnnnnnnnnnnnnnnnnnnnnnnnnnnnnnnnnnnnnnnnnnnnnnnnnnnnnnnnnnnnnnnnnnnnnnnnnnnnnnnnnnnnnnnnnnnnnnnnnnnnnnnnnnnnnnnnnnnnnnnnnnnnnnnnnnnnnnnnnnnnnnnnnnnnnnnnnnnnnnnnnnnnnnnnnnnnnnnnnnnnnnnnnnnnnnnnnnnnnnnnnnnnnnnnnnnnnnnnnnnnnnnnnnnnnnnnnnnnnnnnnnnnnnnnnnnnnnnnnnnnnnnnnnnnnnnnnnnnnnnnnnnnnnnnnnnnnnnnnnnnnnnnnnnnnnnnnnnnnnnnnnnnnnnnnnnnnnnnnnnnnnnnnnnnnnnnnnnnnnnnnnnnnnnnnnnnnnnnnnnnnnnnnnnnnnnnnnnnnnnnnnnnnnnnnnnnnnnnnnnnnnnnnnnnnnnnnnnnnnnnnnnnnnnnnnnnnnnnnnnnnnnnnnnnnnnnnnnnnnnnnnnnnnnnnnnnnnnnnnnnnnnnnnnnnnnnnnnnnnnnnnnnnnnnnnnnnnnnnnnnnnnnnnnnnnnnnnnnnnnnnnnnnnnnnnnnnnnnnnnnnnnnnnnnnnnnnnnnnnnnnnnnnnnnnnnnnnnnnnnnnnnnnnnnnnnnnnnnnnnnnnnnnnnnnnnnnnnnnnnnnnnnnnnnnnnnnnnnnnnnnnnnnnnnnnnnnnnnnnnnnnnnnnnnnnnnnnnnnnnnnnnnnnnnnnnnnnnnnnnnnnnnnnnnnnnnnnnnnnnnnnnnnnnnnnnnnnnnnnnnnnnnnnnnnnnnnnnnnnnnnnnnnnnnnnnnnnnnnnnnnnnnnnnnnnnnnnnnnnnnnnnnnnnnnnnnnnnnnnnnnnnnnnnnnnnnnnnnnnnnnnnnnnnnnnnnnnnnnnnnnnnnnnnnnnnnnnnnnnnnnnnnnnnnnnnnnnnnnnnnnnnnnnnnnnnnnnnnnnnnnnnnnnnnnnnnnnnnnnnnnnnnnnnnnnnnnnnnnnnnnnnnnnnnnnggatgggggggggggaactgtctgcagggggaccaggtagagtatatataaagtgaatttaaaacaaaacaaaacaaaatagggccgggcgtggtggcacatgcctttagtcccagcacttgggaggcagaggcaggcaaatttctgagttccaggccagcctggtctacagagtgagttccaggacagccagggctacacagagaacccctgtcctcaaaaaccaaaaaaaaaaaaaaaaaaaaaatagggactagagaaatggctcagaggttgagagcactgactgctcttctagaggtcctgagttcaattcccagcaacttacggtggcttacaatcatctataatgagatctggtgccttcttctggtatgcataatacatagtattatgtactgtacacataataaataaatctaaaataaccaaaccaaacaaaacaaaatgtttaaaaacctaacttccctcccaatcaggctttcatccccaggactccggaggcagagaggatcaacagcataaggccaggctgtgctgcccagggagagtctgtcttaagaaagactgaaatccccacaatcctctgcagtactcctgtttgccccaagcaactttccacgcatggggctggcaagcttggtaagctgcatgttgctcttcacactcgcactgctgcatatgtgcacatacactaacaataactactttttaaagggcgtgtgagatgactttctgggtaaaaggtacttgcaatcaagccagatgacctgagtttgaactcccacagattgtgtcctccgacctctacaggtgagcatgacacaccctcacacacagtaaggcgcacgcctttaatcccagtacttgggaggcagaactcagtcgatttctgagttcaaggccagcctgctctacagagtgagttccaggacagccagggctacacagagaaaccctgtctagaaaaaaaaaaaaattgcttagctgggcactgcggcatacgacatacactttaaaactagcactctggggctggtgagatggctcagcggttaagagcaccgactgctcttccaaaggtccagagttcggatcccagcaaccacatggtggctcacaaccatccctaacaggatctgacgacctcttctggagtgtctgaagacagatgtagtgtacttacatataataaataaatcttaaaaaaaaaaagcctttaaaaaaaaaccaaaaaaaaaaaaaaaaaaaaaaagcactctgaaggcagaggcagggggattttcatgccacagggccacaggatgagaccctgtcaaataaacaagtaaaaagcaccactgaaattgcccaattcaatgctcacagcaagtaacactgtccaaggtcagccagctaataacagtcgaagctgggatctggctgcgcatggctctaagggaagaagacaagagctgctcagaaaatgctgtatgtattccaaaagcaagatcacctgagcatgtgctctgtgagcctgacagaagtaggagaggctcttgaaaaaggtgagcctgcacagggctcaactctcccatccacaaatacttaactgggcgactactctgttctttacactagctggaggcacaacacttgtggacagacacactgaataaggtgagggaaaagactgcactcatgtgcttggagacaaggtctcactatgtagctgtctgtccggcaactcactatatataccaagctggcctggaactcagagttccactagtccctgtctaacacttccactcagctaaagcgcatgcctcctttgccttcagactgaacctgctcttccagctcctgggtttctttcccaaaggcaaagcctgctttaggattcgctctcttgagctggagatgcggcacagtggtagaatgtgtccttagcatgtgtgaggttcaggccctacaggggaagaagacaggaagggaaaatagggggagagagagagagagagagggagagagagagagagagcgcgcaaagaaaggatttaaaaggggctatggcatggaggctctgctgtaaagaaccttgcagccccaaactgcccaatgatctgagtttgaaccctagaacccacaagctggagagaaccaactacaagttgtcttctgatctccacaaacacaatagaaagtaaaaataaataattaatttaaaaaattaaaaagcgccaccgggtggcagtggcacttacttttaacacctgcagaagctggcagatctctgagttcgaggtcagtctgatctaaagagtgagtttccaggacaaccaggtctacaaagagaaaccctgtcttgaaaagcaaaaacaaataaaaaggaaaagaatacactctcctacctcagaaattctttttaaaaatatttattagtattgtatggtgtgcaggggagagatgttatgtgtgaagctcagaggataactctgggaagttgcttctccggctggtaccgaagcacctttatccgctgagccacttcgtcggccttttgcagtccttctgaatgtctctgcaattcttcctgttcctatagtttctaacaccccacttcgcttttcctttctccagtaacaggccctgagctactggccctttaagattgccttcttcccccacgtgctgtctggttgggctggcgatgctgacgcatgcttgacgtcaatagcagctggtggagtttgggcacgaggagagaagttgggatgggggttggggggagcggagcaagaaggcgattcatttgcatttaaaggggcctctcttgagttaattcgcgctttacagaaatacgtcctgggcaaactttctgccctaggctgggaatagaggcaagaaaatggcgtgatacaacttaagtccaaggctatgagtttggtatgttcttccgcggaaaaagagaaatagtccgtcggtgcccaagctgggagcacgtgacccggagggggtggaggcatgaagctgggggtgggggggagactactgtaaggttnnnnnnnnnnnnnnnnnnnncccaactgcagctgccaccacatcctggcccagccgggggcagggagctcctgtggggggtacacggacccgagaccgctctggcaccattcgctgtccctcagctccagggccctctgctcttgtccccaggtctggtcccaaggcacccggttctcagcatagggtactactgtgccacacggacctggacaagtttctggcggactctgctaccctttaccccaactctggcttgaagtggagttgtaggacccccagactcaacccctgtccttatctaccatggttatgaatgcagaaatgaggtattcagcagagtttgcacaattctgactcacagggctgcgcgaatacatttgctaagcgcgttccacgccagctctgcatccccgcaggaactcaggagctggtgaggaataccttaggaaataaacaaacccagcaagctagtgcgtccagaggagacaagggcggagtggagcgtcccaccttcccgcggagaaaatacacgcccacctgctgagggtccggttcgcaagcttggtggcagatgcggggaagaattgggggtctttgcggtgatcatccaaaaactaaaggaaggatgactcggtggtggagtcgcgggtggaggtggggattgagaactgtccagatggcgcaggggaggggaaggtgagaggaggaggatctgccaagcagctcaccagactagaggggaaggctagagcacttttcctaggttgagtaaggactgactgccaggtagaagagggtgctgagaggaacagggacctttccagttcaggtgaactggagaagcttgagaaggggtggataaaggaggattaagttttatttgccagatagctttgtgaagatgcatgtgagtttacagggtgttctttttaggatgtcggtgggtatcaaggttttacagcagggctggaaggtgacttttctttagaacagatgggcgagatgactgaggcagtaaagcgcttgccatgcaagcctggccacggaagtttgatcctgaaacaaatggaaaagtggaagatccacgccgtagaattatcctccgacatctaaatatgcagcatggtacgctaacagaataaactgattaacaagaaatggtgcacagccagaggtaggagaggaagcacgagactcagtcatttgccacccagaggattctgggatgggaaattcaagggccagaagaaaagaactcagagtcactttcaggaagtccaattttcatctaacttccaacattaccttggcccttttcagtctttcgtggaaatcaagacctctcccaagacgttttcacagtctgagttttgtcccacttgtagttttactgccccctattctggtctcctgtgagttgtcaagtcagcagtgagtgtccagggcccccacctccctgagctctcggagctcttcctgctagtcttttaatatcttccccaggtgactcaccttccttcctcattcctttttaaaggactcaacattccaggtctaaagagggccagccaaccaatcacagccatggacggccagcctcatatttgagattggctgggatcatggctcgctggaagctcaccaagttagttagggagaggctggggagggggattctgggaaaaaaattttcttctggccttggttatgttttgagaaacaaactgagttaggttctctagcttggagagcctccaaggttgaggcaggttgaacactcctgagggcttagctgtcccgggcccatcctgttttgttttcctacaagctgggacccaatggcctgaaggctgtgttcccaggcctgttcctaagacgtcttttccagcagccctgaatctctccagtctcaacattctgcttttcccgacgtcgggaaacagccggaaaaataaacaccctgatgactaaacggtttctccagctagagcctggggaagcactaaaaatagaggccacaagtgaggggaggttccccacggggagggcactttcccattctgctcccaccatagccacaagcaggaacaaggctgtgttctcccagggcttggggaagggcagatgccttcactcaagtcttgggggcaaaccagactgctcaaggagtactggcagctctgtgcccccaccccccatactactaggaaaactaaggagcaacatttggggaccatgtgtgatcctacataaatcaggcttctggaaggaggggcaaagtggaagggttgaaaagggaggccgagggactagaagcctacgtgcttcctgtttaaggaggtacatatatgcctccaagctctttgcagaatagtcctattgaactggcccactatgagccttttctgaactcacgcaggccctaaaagggctcattttcagctgagcagcccgtgtgggtcatacagtgcaacacgaggcactgtactagtctactgggaactaaactcacaccaaattcacaagttatgtacctggccttaccaccttcagcttacccaagaggatggagagttaagagatgtgctttgctcttttcagaaatagtggaaaattttgaaccaaaacagtctgactccgagattataaattttctaacccaccacttgtcgcctcttctcatctctcccacaagaagccagaacagggactttgttcagtaaagcagaccctagcttgttgaagaacctcttgcttctgttttgctaaggctttgaagtccacgccagactctgtcatttcctcaagctccaggtagagccagccgaggacttgttagtgacaggatgcggacaggaagtctgacgggttaaaggtccagaagcaatggagcgcacaatcttgttgtgaagcacttaaaaattcaccacgcccagaggccgtcggggattttaaaagatttttttttttgagagagttatatttcttcaagacaaggcttctggatgtttcctgtgaggcaagggaggtagtggttggggtcccgcccctttaaattgccccctccgtagttaagtgcgctggggcccgcaggcactaaaagattagatcacccgagaattatgcactgtagctttaaatgtctgggcgtcaaccgagccgggtcaggggaaaggaggggacctgtcacaggtagagggagcagcggagctccccaggtaaccacgagataagagagcgcgatctggcttcggagctttgtcacacagtaagtgtaggagctggggcctaccaacactcttatctccccagaacttatttacttagatccctgccaactctggagctggggtgctgaggtacccgcagcctcgctctgtcccgcaggcggagggatctgggctccacgcgccgtggtcgcgcgccccaaaggggtggggcgcaggccgcgggcagggggcggggttnnnnnnnnnnnnnnnnnnnnctgcggggccctcccattggccccctgcttgtccatcactctcgtcttttccccccctcccatctcgcaagctaggctgcgcggtgcctacgtcggcctcgagtctggggctggaggagttgcctttggagcccgaaaggaggaaggaagcaaaatatcaacaaccgtcgaggcggcttgggcgctcggctgcgtgcctgccgcccgccgccgccgcccccgcgcgcaccagggggtcccggccctgtggcgccgcccaggccgcgtggacgcggcgccttcgctgtttcccgtcggagctgcggcttcgcgtaaccgaggattcggcggaccgggccgaggctccgggcgccgtgacaccccgtcccccccacgggctggtgagtcacgacgcgcgtcggcccctttaagaacccctcccccacgccgcgcggccgggctcagggtggtctggagcgcgaggggtgtacgggcgccctggcacgagcgtcccggtccgggcggggcgacggaggcagtgttggtgctggggtgtctgctgtgacagccgcgcctggtacccgagcccccgtcgcctcgcgccttggcgggcgcaacgcacgtggctccggccgcgatttcgcgcccgtgggggcccccttggtcgggcgtgtcagcaacgccggctggagaacccctggacagtagtttgcagctgttaacacctggcaggacctctccaggcctttctcttggacggtgcggtgcgggccgagtcagtgcgagtggggttcgagtggtgaggctggcccaagggactactgtgctcccggcctcccacctcagagatggggcagggaggcctcccagagattccatcgagccctcggggttcccagtggccctggactacccagcttgtcctgagtgccagttctgcctacgactgaccggcacattggggccaggctaggggagtacagtgggtggatcccgttccctcctgccctacccgtgtgagtttcctccgaggcctgtttggctgtgtgagtggtggatcttacccctccccctagccctcagtgggtctgagctgcctgactgtgggaagtttgccgtctgggacggtgaccttgggctgctctggccggatctcggagaggagcctactgagtgcgcttggccttgggagctgtccaccttctgttcgtctccctgtatccgcggtaggtatccgccgaggggagcattggcgagttacctgacagtgttctcagacacccagcttctggcctctggccaccgagccccagtgctcagcctggctgtcccaactcccatggccttgcctgtgaatgaatttccttcctgcgtcttccaggatgggggtggggtgggatgattgtgggagtggctgagaaccttgttatgtagggtggttggggaattctggagcttctgtagagcacttttcccatataccccagaaatggacactgaggctttgggatttcagtggtcatgttctttgtttgtgactgctgtgcccttcatacatagaccctgtgtgtgactgctgcgtgtacttttagggagtcaggagctttcattcattcccatacttaccaaagtggtagagcattttacttaaggtcacacttcagcttttgtatcagacttatgtcttccctctttctgccatatatttcatgtagggagagactctaaagattaagaataaagacacaacaagccttgctcatgcaggcgtgagcctagagaagaaacaggacccagacagaaagtatgggaagcctcgtgttgggggatgggcacagggcttgtgctgcctctgctaagcccagtggctggaacagggtgtgggggacttggacaggaggcaggtgcaggttgcccatccccctctgtgtggtgatatggggctggagggccccagctctctgctctggctctctagcttctagtgcacctcctaggctgggcgatgtgacaggctggctggctgccgttatataatctctctccagcaggtttttttctttcttctcctggtcttccttggtggtgtgttgaaaggtagaggcagtctctccaggttgggagctggaccgggggatgggtttaagttcactgaggccctgctctgaccctgctctggaaaggggcctatgctgcagcatccttggcccttatgtccttggcctggaggtctgtccatcttcctagctttatcttctgtgccaactgagtttcctgttctccatggtttttctggcctagcacaggtccacactagagttgagttggtaggctggcttttttctttgttgcctccacttctctgtcccctacctagacaattgtgtggcctacagaagagctgcagacaagggggacactatgagtcacaagtacagttggtgttgtccaggttccctaatggggctgatgatctgaggcaggcccaaagccatcggccagggtcagatctagggctgtggatctgtggtggtgggctctccccaaaccttgagaccttggccaggacacctggcctgagaaaattatctccctttacagggaagtgggaaggaggaatggtcgcatgccgcacagcctccgcatcgctgtaatcactggtggcttttatggggccagagtccagctaaccctctctgtcctcctgtcctagtttggtgacttactcattggggagggggtggcattagctgctagaagctgtgctatataagcagacatctggctgtgtggtggctgacattgtctacacagttaagagaaggctggatggagcctggatatcagaacttccattgaaaccaggttagggaaaagatagcttttaacttggccaggaaaaagaggggaatctcaggcattctccagtgactctgctaaaaaggctgttgacctttggcctagtgggccggtgctatttggctcctggaatattttctcatctctccctgcctaggacaaaacatattctgaggagttgtcctggagctgtgagaagactgacctctgagccccctccccagaaatcctgctgaggggctcctgtgggctcctgtgggctcagctgcacatggcagtctgcagcaggtcatggaacacatacgggaaggtgtgcagtgcacccttggggtgcgacacccacagagcagctgttgcactgtggggggtggggtgggggcagtggtggtaaagatgattaaaggattggagagtggggggtggtgagggactggaggcaggaaggcgaaaggctcacagaacccagagagcctgggctggaagcaggggctgaggtcagagcacagatgggcaggcagggcctgtctgtggagagcatgctttgtgagtcagggagcactggccgacttccaccctcccttgctgctctgttccctggcttgccactgccccccaccctggtctgagtccttgggtaagttgccccttctcccacctcagcctcagttttccaggtgtgcaggagctcccttttggtggcataggcatctgtgtttgatggtccttgctgttgtctggctccagcttccatgagggaagctactccactgcattttggggcaaatcctaggtttaggatttcaaagcattcacatctacctttgctttgtccaggccaaggccacatgccacccctattccgattgccagtggacagagttgcagtcctgctagtatggcatggattgaggcagctgactgtggctgacagccccttctgagtgggatactgaagggagtgacctgccccaagctctggcctgtggcaaaccacacccaggcgggaccatatttactcatttaaacttaccctcccgggaggccctgagctttaggcttggtcactgaccttggcttggtgcccctgggtgttctggggccactcccctagcattgggcagacaacatgccacagggaaggcgtgtcctgcctgtccctaactcgcccctctagcatcacccatgcacaacccagtttaaaacagggtgcatggttcagacacaaaaatgaggacttttgggatccccagatctgggggggggtaccatttgttatctctgtgaagatcctaggctgggtagggttctgtctgctacaggtctttggtattggggaaactgaggctgaaaggcgaaggagttatgtaatgaaaagtctattgtgaggcgttgagggctcttgtcaaaaagagatctgatgccaggaggtggtgatgcacggtttcaatcccagtcttgaggggcagaggaaggtggatctctgagtttgaagccagccttgtctacagagagagttccaggacagccagggctacacagagagaaagagagagagggagagggagagtgagagggagggaggcaggcaggcaggcaggcagaaagagaggaaagaaagaaggcatctgaaggagcaggaagtctaggctggtacagcactcagaggtcgtgtgtgtctctctctgtgtgtgtgtgtgtgtgtgtgtgagagagagagagagagagagagagagagagagagagttagttagtttgagggtgcattgttctgactcctgagacagtaattccttcaagaggccccaaagcaaagccctggagcaggagtcagcgacacacagaggcccccagaccagctgctgggggcagacaggaaggggactgaaggtctgaagggagcagggagggtggggggaggacagccttatctccctccagcctctgccttttctagagaagatgggttcagtgagagtgtcacaggtgcaccttccatcaggatctttagccaaacctaaggtgtggggataaagagtggaaggggcttggaagggaccaccagaccctgggatgacatggccgtctcctgtccttaaaacttgccctgcagacatcctaggtcctaggtcctttgctattcctagtgctatcttcctcccccagactggggttgaaggctggatgaataaagactagacaagaggttcaacagggtggaggtgggggcaggtggcaaggggaatagacctcttttctgggttcttcctgttccagtagatggaatgtgaagtaggggctctgagcaagggagttagagggctgaccttggtcctacctgccttccttctctgtcttgtactgtaggcgagggtgatgcatcttgaagagggtgcttcttgctctgtctctccccttgacatctggacccctttctttttgcccccacacctgcctgcctgttggcaaactcttcttgtatggtccccatggcaagcctttggctaggcgtggggtggggaacaggtgtcctggcccagctgttcctactcttctcctccacctgtcagcctgcagttgggggtggggagctaaggctaaaggaaatcttcacctgttcccaggggtgggccttgcttgtaaaagcccctgagagcttcccctcagaggaaggccaatgcacagacaacagtcattgctgacaaagtcagagggtccctgctgtgttctgacaaacagtgaaccctgtttgatgaaggtatgttttgatgagagtgtgtttgcccaagggtgctcagggcccattgggttaggccccatcctcacctagtgtctttcctgaaagcagtaagctaatcctcataaaagccaccttgccaccttctgcctagggcttagagaccaagccactgcccaaggctcctttaaacccttggtactccttgaggtcacaataccaggaggatttgccttccctgattggattggcctctttctagcctggcctgtctgagtgcgggtggcctttcagtctgcactgcctcacattcccccatgccagaagcccagcaattagggctcagcccttggtctgttcctagatgcttgaacaaaaagtggtcctcctaggagagagcttttctaagattccacatcctgctctgtggcccaagtcttgctcagatttccctgctcttctcatttccatgggaagtccttcaactcatctagctagcatccacttgttgtactagcaggcagccctaaaccagccctaatagcatgctcatcccaacaacgcctgtcaagatgaactgtcctcaaggccccagctgtgactttcacttctgtctcctgagaccccagggggaagtagggtagggaggtggaaggtgacacaccaacggtcccaactgccccacctctcctcaactaaggcatccaatggccaagatcccccgtgtgcttttcttgtttagatggctaaggtgggcctaaggttgccatggcaggattggctatgagagaagggtagtagttagataggactactagaaaagacttcccagagtagagaggcttcggggcttccgtatggagggtgtggctgtaactggacaggtggaggttaggctgacaagtactcaggggctggttgtctgctagcatccatggtaggagcaagcaccgtcatgactcccatatgtcctggtcttggttagttagcttctgacaaggtgagcttgaggcccagagtctgctatgagtataggacccagcctttaaagtcttgtttgaaatgtagtgctgcactcagtggagcaggataggagaggcctgctgctgctgccccaccctgagactactggctggactatgtgcctctgatcctttccctagacaggaatgaaggtcccaaggatgggagcttcaggctacatccctgtgaattgagggttgctttctggaacagaggatggaaccatttctgaggtcttgagggccactggatggcctacactcgggagtgggaagttgaatttggaggaataagggtggagacactatgcaaatgaccatgcaaatgagcaccagtgagtcaggctacttggcctgttaggcagagctaaagcaaagtacaaacttggatttcaaaaatgggccacactagtaacagtgaccttggttgggcctaaccaaggccaggaccttagaggccccgaactctgggttcataggtatttgggggaaccttgataactgcaactgtcaccaggacctcctgtgctccacctggcactgtccccaacagagtggccccgagccaactctccctcatctactaggggtgacagttgagaaaatgtcctggataggctccaggaagcctccctctggcctccacctagcctagctcaccggctgaagagagcctagcccggcacttctcctttactgcagggctgacttttctcccagggaacctcaccattctgcctctctctctgttggggggtggggtagggggaaactgtgccttaatttaggcacacatcagtacaagctagaaaagcccagcccagcccctgcaaactcatcctttcttcatggcctgacctcactcactgattcactaccaggacgcagtcttcagtagcccctaatagttaggcccagcgggtggctctgggaactgtattgtgggtgggaggaattttagctagaaggagggtcgggagcactcttctgctactggggagtgagagctagactacaggaaggacagggagtgggacacggaggggaaacatcccctcttggagaaaacaggataacaatttcccaagaggtttgctagatgggagaggtgggaagctgagggcggagtatgggagaattgccctttggaagctaggggagagctcctaggcctcctgggtgcttctcaagtcagtttctgtttttacaggccacagtgcctgggaccaccccgcccaagccctgctttcctggactctccccccccccccaactccaccagcccgcccctcaggtctcctgttggtgagttaaaattagctcactgcccaggctaaaaatagcccctgcccagccccaagctgctgtctgggggaggggatggtgggacttggtgggaacccgggttttaggtagtcagcctgacagaacttgggcttgggcctgtgcttttggatggtgatgggaactgtggagaagaaaggcagcttggggccaggagaagcgaggccctgaagggtgccctcgggcaggctgccggggcaccccttggctgctcagcccagtcttgtgcctttgcctcactggcccctttctgtcttcttcctctgtctgtgcatctgtccccaccttgcccacgcctcctcccactagcaagcaggctgcccgactgtgggggtgacaggtggattggattgtcgccccctcccccagcgcatgctgcttatttcatgccctgcagccctaccagggagagggtggaggagggtgacagctgtcttcagtgcagcctgccttcccgagttccagcctgaggccccccagcggccaggaaggaagggggagcgcctaatgagagcagttccctagctgtctcccactcccttcaagaagtgctcaggcttggcctttctggcctctgctctgttggagcctgctggtatagggctccagaatctgatgcatgcagctttttagagcctcaggacaccaggacacagtgctcagggcagaagggagtgagggagcagaaatgggggtacactgctaaagagtggagggaggacaagactgtggggaaaggcgcttgcttcctccctggcttctcagcagtggctacaggaacctgtcttgacctcactcccgtctccacccaggcccttcacacaggaactgtggtgcctcattctgaaaccccagagtggtttgcgtatagctcaggtaccaagaggtgtgtagggagatgggcctagtctccatgaccctccatccagcaccccttcagtttatcacttgcccctcttttgcatataaacagtgccagttgccatgggatcctagctcccagacttccctgcccccatggccaccctgctgttggcttcctacagatctcaccagccagtgctttctcctttctgctgctgttgtcacagcctgcgggtaataccaccctgcccagctagaacctactgagggccattgctgctgtaaggtcaggatgggaaggcccctggggcctggcaccctcagcatgagtgcccagagctgtagactagacttagaagagcagcagcccagccagtgcaggccactaagcccagcactcaggagacagaggcaggcagatctctgagttcagggccagcctggtctacagactgagttcaaggacagccagggcgacacagagaaaccctgtctggttgaaaggaagaggagagaagaagagcagcagcccaaagaccagagcctcagaaaagaggggctggctaggttaggtgggagcacagcctgcatctggagagcagacgccccggcctctggctcctggcagttagttaggttgttgagcagaagactaattaggcagatccaggtgttcattagaacttcctgataagactgggcaagtttgggcaggacagctccataccttgaatggggtcagtttggggtactttgtgaccatctcagcccaaacaccattcttccaggacgaagattgagttcatattcttgtcccagggcttccaaagaacctgaagcaatgtggaacatacagcagagggcactgagcctgctttgtaagagagtttatggttagctaggaggaaggactggccaaggcaggatctgtcctctggcagggtagtcctggcagaggaagagagtgagtgagagagaccctgggaggcatggggttataaatggctgagctagtatagagcaagtcagggttgttgaggcttggcctcttagacagacaggttccgtctgataaaggatgctcactaggtctctctggcttccttgccttctcagccatgatctctctcatatcctagctcccccagcatgcggcagggatgggggggcagtgtaggagatcagccagggagctggttgccaggcgacagttgcctaagcaaccccatcctctccatctccatgtgctcagggctgctccttagaagacttagagtctcaccctttgcaccagccagctgagtgtagggagggatgagggtgagggtggcagggttggttggagagttggtgatgtctgaaccaataggctttgagggcagctggtagaaggttctaattccacagaggacagtgagaatagcagggcagacagagattagactgcaggaaggacttctacaggctcataatattttctttgtataggtatttcctgagctttttctacaggcatagcatagtaaaaagacagattcagttcctgcttcatgaatctctaaccttggggaaccgggctcataggagaagcacaattgataatgctagaaagattgttgggttagatttttggaaaactgtgaaaacactgggacagctcactaggagatggcactggccataagcaggagagaggttctgtcatcaagaaactgttcatggtctgggtggtggtagtgcacacctcagcacttgggaggcagaggcaggcctgtgaactcttgtgaattcaaggctagcctggtctacaaagtgatttccaggacttgggaggcagaggcaggcctgtgaactcttgtgaattcaaggctagcctggtctgcaaagtgatttccaggacaaccaggattacacagagaaactctgtctcaaaaaacaaagaaaaataaacaaaaagaatctgttcatggtctgaaggtggagagcaggaaacaagaaagggataagaaggaagacagctacctagccagtggggagtcagagcaccccgcattgtgggtctagattggagttccgaggctgagccagagagacccacctaaaaaaggccaatttaccgtagccctttccccattgtgccttcccagctccccagcccaaggagggcagttgtgggtagctctgagagttatagtaaagcctggaggttctggatggagcccctacagtagattgggcagggatttgggtcacagacctggagagagaccagatttgggccacacagagctctaggctgccactgctggtctgggatgtggggagtgaccagaggaaggccagggactatggaactcctcagatatcagagcaagaggagaggtgctggttccctcttttggtgaccttctatacatgcagacaaattacccttcctttagggcaagggagccgagatgctctctctggatgcttagagtggaagctagacaagcgtgaggggcagtcctgcaatctgtgatgatcttaagcaagcctagacctccccttccccatcctatatagtcaggtaaccagtgaactaactacttcacttactctgtaacctttaggccttgtggaatgagctagaaaggcagaggttccactcagcagccactggtactcagctattgctgaggaacctcttacctccttgcctgtgtgtctgttcaccatgtatgtgcagcatctgtggaggccagaagatgacgtcagaccccctggaactggagttacagatagttgtaaccctccaaatggatgctaggaactgaacccaggtcctctacaagactagcaagggctcttaattaaatgctaagccagttcttcagtttcctcagtataccctctttgtgtatctctcccctctccatccatccatccatccatccatttatttatttatttatttatttatttatttatttatattgatttttttttttagatttatttatttattatatgtaagtacactgtagctgtcctcagatactccagaagagggcatcagattgcattaaggatggttgtgagccaccatgtggttgctgggatttgaactctggaccttcggaagagcagtcgggtgctcttacccactgagccatctcaccagccccatccatttatttatttatttatttatttatttatttatttatttaggtttgttttgtcaaggctggggtctcactatgtagaccaggttggcttcaagtcactgatgcctgcttctgcctctcaagcattgggattaaagactttagctaccacacccacctactctcccattgtctttgtcagttaggctgcctgcttgtagcagagcttaaacagtgcaaaagaatttacagcctgcagcgctgactctcttgccttttacagaaactcttacctgaatcagagtaactccaaagtggagcatttacctagggaatgtgaaactttagcttccactcttggcatcgcagtaatcagagaaaaaagccagactttgtgatataggcctgtgaccatagcttatcagtgggtgggggcaagaggatcataaaccagcctgggaaacttaacaaaaccttagctcaagaaataaaaatggggccgggcgtggtagcgcacacctttaatcccagcactcgagaggcagaggcaggcggatttctgagttcaaggccagcctggtctaaaagtgagttccaggacagccagggctacacagagaaaccccgtcttgaaaaaaacaaacaaaaaaaaaagaaataaaaatgggggttgaggatgcagctaggcagagcaccttcccagtgtaagactactgggttcagtccccagtgtaaggtgttctggaaaagacatttgctgccctctggcccaaaagtagcttgtctgtctaagcagcagaacacccttcaaacagaactgtacttgggctgagcaaatgaagcacactcatgtacacaagctctgactagggggtgcacgctataactccagcctccactgaccccagattctgagtccatgtaagtaaggactgtggtgacaacctggactgggacgccactcacccttacaggcatcgagcatcctctctctgcctgctgcctgcagtctgggaaggcgttagctcaatatgttctcacttaggagcctccactagtccaggttgtgtggtgggtaggaggtcggcagcgtacaacaatacagtgcataatacagcccaacaagctctatagagaacaggtgtgggtgctctccaagaagcagaccttcagagccccgtatcttctgtgtgacctaaagcccaagtacagcagtgacttggggaatcaacctagactaagccctggtcccagtgggaacccaacttgtatctggtatggggaagggggacatttcctctatagccaatattgttgcaatttggggatggggcagagctgccaccagtctctcacaggctgtgatgaatttggcctacatcctaaaccaggctgggaggttgggtgtctaacagtcctcttatgacccctcccaggaggctgtgcataggtgttctgcagaccatgaactgatcactagtccccagacattcatgagcacagtgtgaggctcctgatcaccacccagcagccccttcctctctggcactaaggacccccggagaagatggggaggaaaaagattcagatccagcgaatcactgatgaacggaaccgccaggtgaggaggtcccagagcccttgtggtaggtgagcaaggacagagagccagctctgtcacccatgaccagttctaaaagagagttttcttggcaacccagagcctcatgggaggttccaatagagagtgggtctaagcagagagaggagcacttagagagaggtgtaccttcttagctcactggcctgagatgggccagggctccacaccattgccatacctccagcttcctcatctcagcaagaattctccccctcctcaactgggaggtgtgctgctctcctcagcccactgcacacacagacgtgtggcctcctttcttgtctgaggctggctctggtgctattttgttcctttctagaccatggatttccatcaaccgtggctagggtaggtagaggctatgtctacgggcagggggactcttatcagacctggccacacgatgctctcctgcaggtgaccttcaccaagcggaagtttggactgatgaagaaggcctacgagctgagtgtgctgtgcgactgcgagatcgcgctcatcatcttcaaccactccaacaagctgttccagtatgccagcaccgacatggacaaggtgctgctcaagtacaccgagtacaacgagccacacgagagccgcaccaatgctgacatcatcgaggtgcgcgcctgtgcccacctctgcccatgcgtaaacccatctcttctcctgaacccagggtccaaggaaggaggggcctgacagcaaaggcatgagacatacagccacaccaggcctcagcttaatttaggcagtctgtgatctgccagtctgaggaggtcctgctgttgtatgctcttttagttcctccttccttcatcctctgtgttattctttcttgtgtctccctctttgttccgtctcctttccgtcctgttcctctgtgggtctgtgtggctctttcctctgtttcagagtcatctgtgaaatgttaagggactgggctctggcctttccttgccatgtgactttaggcaggtggtctggctactctgcagatggagcagtgctggcctaagtgttcttctgtgagcaaacaagtcaacccagttcatgcctcttaccccaggttgccagtttggggtacagaggttaatgacactggctttcttccagtggacctgagttccattcccagcacccacatggcagctcattactacagttccaggggtggggtcctccttcctctgaccccctgggcatcaggaatttatgtggtacacatatatacaggcaaaacatacacacatgagataaaatattaaaaaattaaaacaagccaggcacacacctttagtcccagcactctgtgagttcaaggtcagtctggtctatagagcaagtaccagaatagccagggctacacagagaaaccctgtcttgggggggaaaaattaattaattaattaattaaaattaaaatgaagcaaaggctggcaaaatggctttaggtaaaggcacttactgccaagcctgagtttaattctcaggaaccccatggtggaaagaagaaccaactcctgcaggttgtcctctcccatatgtgctacagcatgtgcatgtgtgtgcatgcactccagggcaaagcatgctctcaggtaggtaggtaggtaggtaggtaggtaggtagatagatagatagataaatagataaatagataaatagataaatagataaatagatgtgatttgattttaaaaaaagaaggcaggtatctaaagttttgagtgaccgagggtagcttgggtctgagatggtagagagcaaagagctcaatgagtgcgggtcctctgtgctttcttgtattgtcctttcctgtctccattcagtttctctcatctaagtagaacctcgggtttgcatgggcagagtccccacccccaagcacactctctagggagccggcaggacctggcttctccctagacagctgtgtagcatgcctgccccagggaacgctgtagggaggggaggatggctctgggtggggattggggggggagggggactagaacatctgggaaccacgggagagaaggttggagaagagtaggggatttgggggaggagcttggaggatgcccgagggccatcgccggctggctgactgagtgtgcggttgcagaccctgaggaagaagggtttcaacggctgtgacagcccagagccggatggggaggactcactggagcagagccccctgctggaggacaagtaccggcgggccagtgaggagctggatgggctcttcaggcgctatggggtgagccctcctcaccttttctctggcccccttccggcccctcccccaggcgctgcacaagaagcacagggagtgtgagagccccgaggtggacgaggcgtttgccctgaccccccagacggaagagaagtataaaaagatagacgaggagtttgataagatgatgcagagttatagactggccgtgagtagtcgcatggaggagagcctcctgtgctgcatggtgtggcttcactcagccttgcccggccctcggctgcctctgatggatgtactatgctgagccatccttgagctggtactgaccactgaggaactcctgaccttggtcttgataaccctcttgtaaagttcttcttgcataaactagagagacctgcagtatcctctccccagcagaaagtgcagtctcaggagggaaagggagtggagcgagttctttgtcccactgttttgggggatcccccttggggtgctttggcacccctgcctcagtcattcagctttatgtaaaggaagcggaactactaaagggatggtagaaaggtgggcttgagctgctcttaacgcaggccagaaggtggtggccacttagcgaagccatatcctcagtactatgcgagttcgggtctgtacccagggcactaacttgctcccagtgtgtcctgcctggctgaggactaacccacctccactgggggtatccagtcccacctgcagtgggcagagcctgcctctcttgccttgggtcagagctgtattgcaaagtgctcttacctttctgatgggaggtaggcaggactaccaaagggctgaaggcagggagcccaagcttctggcctttggagatatagttcaggaaccaaagaactctgtgtctaccctcaggcaaaacgggtatgggggagacactgacctggtgtgacattaccctccatcttcctgtctagtcatctgttccggcccccaactttgccatgcctgtcacagtgcccgtgtccaatcagagctccatgcagttcagcaatccaagtagctctctggtcactccttccctggtgacatcatcccttacggacccacggctcctgtccccccagcagccagcactacagagaaacagtgtttctccaggcttgccccagcggcctgctagtgcaggtaagtgggctggagggtgagtccctgaggtcagagtgagctgtggaggggctctgggcttctgttttcagtggagggtcttccctttgcagcgtttctgtatgtgtatgactcttgaggggaaaaggcctaggactcctcagagacccctcttcttgtcctgtcccaagacaaagctcatggtagctctgcttttctcccaggagccatgctgggtggagacctcaacagtgctaatggagcctgccccagccccgttggtgagtgtagctgcctccacagggtggctcagaccaggggagggaaataacagggcctgagcaggatgcatcagaagatgttagcctcccaccccatcttgtttgtttgtttttttttttttttttcttttttcttgagacaggtcttactatgtagccttgctagcctggaacttgctatatagactaagatgccctcaaactcatagaatccacctgcctctactgtctgagtgctgggatcaaaggcatgcaccatcatacttggccagggtctagcattttcagattaaaatggggcatcttgttgggatcaggacttgtctcaacaaatggtaggcacccaaacaccaccgtgcacacaggcctccgtgttcctatggagtcaccatacagatgtgtacctataggcattcacactagagctataggaagtaaccaccattgcccctgggccccaacacagctagccactcttgatctgtgctgttggctagtgacctccttctaatgtcaccattgacgtcaccctgtcattcttgccattcccagagtgatcttggagttgggatagaaacagcaacacactttgagggtaaccatgtgcttgtagcagacagagaaaggtgaaatttctcactgtggggacaacttacattcctgaacctcaggctcttccagctcagtctcagccaagtgctacctgtttcctgtctggtcattatgggtcctgtgtgaggtgggtgggcgtgagggtactgtagaagtggttgtgcactagggccatgagactgtagactgaaggcatacaccttctctccaggccttgctcacaggccctggagctcagcgttgggacctcagtaagatggccctggatggttgtggagaagtcaccacagctctctcagctagtgtcatgcttcctctaatgtcatgttcccagaactgacaaaaagtccatcccatgcacttcacagggttgatgtgagcatgggtgaaatactgtgtttagaagacctggacatggcagagtgcagagccaatgtagaagttgtgatgcctttttcccaggtctagttatgggagtgaccatatcgccagcccccagtgccagcaacacctttaccaacagtcagtggcctgtttccccatggtggcaagcagcttgccttgtgctgatggaaaacacagagttccagttcctggcaaggaaacagtctaaatggttgcctggctctggtggtcacagcctgccacccttcccactcgagtcatgcatcctgtgtgaagcctatggaggggtctgagtgccaggcttggggaaagcatggctgcagggctctctttaagtgcctggggctggcagtggcaatggttgcgtgtcagttctacctctggttctatcactgtggcttggaggctgacttatgtcaagtgattgggagccaaggctttaggcagtgacaggcaggcagcatccatgtcgaatgctggcatgcctccgagagcctccaggtgacagatatgcttgtctggggcagttggcaggtacagaggcaggccaccatttttcgtttctcatctcacttttccagggaatggctatgtcagtgcccgagcttcccctggcctcctccctgtggccaatggcaacagcctaaacaaagtcatccctgccaagtctccgcccccacccacccacaacacccagcttggagcccccagccgcaagcctgatctgcgggtcatcacttcccagggaggcaaagggttaatgcatcatttggtgagtgtgtttccgggctttggcagggtctgggaggtgggaataaaagcaagaaaatgaaggttagtagcaggtaggacttcttgagggcctttggaccatagcagtgctgaccagagggcagtaaaaatgaacaggagataggagaaaagggtgtatgatgaagatggtaaaaggaattcacactgcaccatgagaataaggactggcagacgatatctggctgatggaggccaggatacagcagtttatggctatcagatagacagactatctagatatccttttgggccacaaagagcactctgctcttaggcaaatagggggactggggtggccatatgggaagggcaggagccatagcctgaaccttccttttggttttatttctgctcccagactgaggaccatttagatctggtaagtgcagctaagatgttaacagtgtctttgagttccagctttgcccagtgttattcagtctgtagcatgagtttatgtacctgtcttctccctgtgtgtttaatgtggttgtcaggagctgtgcatagagctgagtgggatactaaggtaaatggggtagcgggaagggctggacatggcatgcatgtgtcatctgtgtgtgcatggatatttatatgttaccacacttattcatatatgtgtatgtgtgtgcatgtagaaaagagcatgaggctattcacggccctttgaggccccagcagatacctgaattaagcccttagtttccattggcctcctgactccacataggcccacacaacattggaatccaagacacaagcctaatccttacaagaaaatctaggaaagtccaaggccagaggctgtcattaatggagttgtccttagcaaggacttctctgcctgcctgttcactcccgtcctcctccgagcccatctcacaggcacttagagacgtgcacagcccctcctgtgcttacactcatcatcagccaggaaagaggagggtgcttcctccccagcttgctgacaggaggccagaaaggctggaaaaggcaagcaggctttggcggccaacacaccggcagcctcggccccagcatggagctggaataaacaagtgactcagcagcagatggagctgacagccctacacacgtgtgtgcatacatgcaatcacatgccaccccagatcccacgttccattcccagatgccagtatacatctcctgggacatctgctactgtaatgggtacagaggagactctagtggtcttagcccaagagagaccacatctcttccttctatcattccacccaggtaccagggcagggttcacattgagctccaggctgctcccatgccttcctgtctgttgggtgcagatgcaagtgaatctgtgtgtgcatgtttttctctgtgagtcttgaggccttcaaacacaacaactgtgttagtgagtctgtgggcctccatgctatggtaccttcccttggaattcagggacctagttcagatgcagtataggttgaccacctcgagacagccctcccatttgccatctcttgacagacagttttctcctacagaacaatgcccagcgccttggggtctcccagtctacccactcgctcaccaccccagtggtttccgtggcaacaccaagtttactcagccagggcctccccttctcctccatgcccactgcctacaacacaggtgagtgttgatgtaacttggtactttgtgctcttgtgcatagggcagggaagtgaccagagatggtcactggatgctccttccaatctgaggaaagtccttcactaattagtgtggtaattagtagatcaaacataaaaacagaatcctgggctgggggtggagctcggttggtaaagaaagggtttaccttgcaggcatgaagccttacgttcagttgctagcactatttataagccagatgtggtagcacttgtctgtaatctgagcaccaaggaggtggagaccagagaaccagaagttcatggtcaccctcaactacacagggaattaaagtccagctcagttacatgagactttgtctcaaaaaacaaaacaggggctaaagagagtgctcagcagttagggaaacttgctgctcttccagagagttcactttcagttcccagcacccacacagttactcacaactacttgtaattgatccaaaaccctcttctagcctcttccaggcacctgaccacatatggcatacatacaaacatatacacataaaaaaattaaatcattttttaaaagtttataaacagaaataaaattcttgatttgaacttaagacaaaacaatttctttttcagtcttaaatgtatcccaaaggcactatttgtgctaaagtgcatcccaaagacatactttttaaaaatgcattgttaaggtaaaattcacttttaaccagtgatcttttatttttagcataggttcttgtggaagagtaactgctgtccagtgtgaggggacggacagaccagaggtggctgagcacatgactcagccacaccaggctgatagagttatggtttgggggctggggaagggacatggtcaatgcagcagagcttcctagaggatgcagagtggattggctagttgcctgagcagagatggctcggtacagcagtgagtgggaggcaggataagcctgggaaggctggataggtctaaaggtgagcagttacctaaggacatggcagaggcctctgggaagaactgtgggacataatgcaagctggcatggctctgtcagcctctcacaccttccccagaacagtgtgatgcccgcagccatcctttgctgcattcaggctgctgtgtctgcccaggaaggacttgctagtggggaaatgtgttgtcacctggtcttggagcttttgtgtggcagtaagctctttctttcccacttcattcactgatcctcacgcttgagtgaccagtattcaggccattctgtggtgacagtaaactcctccacctctgccagtcctttgggagctgaagcatgttagggtacagatcccaccacagttcccacagaccccacctttgccctttcccagcagcaggagagatgctgaggagcaggcagcagcctacttcacgcttcagcaggggccaggctgtagaggactctgggcagatgtctctgaccctagttccttggctgcctcacaacatacccactcccacgttattgaatcttgaggctgaggaggggctggctgcttcagaagtggcagcctgaaggcctggttcagggcacataggtgggtaagagggtgataagctccctcagcctgtcaaccattcccaagacaaggagaaaaaccaactttctgagtctaatggggaagtgggcattgttcgtttaggaatcctaccatggcagctgcctgtgcttttgccattcagtcttgtgaagtaggagggaagttagttcatctcggctctcttcgtggcctgcttgtgtctctagggtgtgaaagcagctttggcccgaaagctccagttgctgttgctacaggagtagttgagcagacttctgtcagcagcagacattttcgggtaccacatctgatgtgagccaaattccagtaggtgctaggcgatctactatggtagtatcctgcatgagaggagaagggcctggcctttgtggacactaccttagaggtctgtctgtgatgactacaagagcagcttaaggaggtagccgggtggcctggagaccgacttcttgacccgtaggaaataaccctcccagtggatagagctccagtgctgggatggggcaggactaagagctgggttctgatttctcccctgaggtccttaggtaaagcactgacctattctgggcctgattttcttgtttgtaaaataagcacagaatacagttagtcccagaggccacattttgcatttatactagtttttaaaatgagtaaccagggggttggagagttggctcagtggttaagagcacttctaggggacccaggttcactcccaagcactcactggtggctcacaactgtttgtaactttagtttcagcgggtttgacacccttacacagatgtgcatgccagcaaagcaccaatgcacataaaataaactatgtgtaaaaaatctagcgggagccgggcggtggtggcgcacgcctttaaccccagcatttgggaggcagaggcaggtggatttctgagttcgaggccagcctggtctacagagtgagttccaggacagtcagggctacacagagcaaccctgtctcgaaataccaaaaaaaaaaaaaaaaaaaaagaaagaaagaaagaaagaaatcaatcaatcaatctagggggaataaataaatagaactagtaaactagagtgaagtttaaaggtggtggggaaagctgggcatggtggtgcatacctttaatttcagcactcaagaagcagaggcaggcagatctttatggattcaaggccactcaggcctacatactgaggtcagccagggatagatagtgagaccctgtctcaaaacaaacaaacaaaaaaatggagagggctgtgacacaggtagatcagtggtgggtgcttgccctgtggtgcagggctgccttccacccctggcacggcagaaattcgataaataaaggacaaggcgtcagggcttatgagtgctgccaactaactagcctagcttttcctgtgagcaggcagcaggcagctcctccaacttgaggctgcactgtctcatgtgagcattggtgcttagtaagtcttggagttcaccagaagcctgatagcgttgctgtcctacatggctttgccatacctgcttctcctgggggctgtgctgtaggaaggcgtgctgtctctgctcctgacagtcagcacttgtccaggatctcacagcctgtgactgtggggaggctgccaagagtctgtcatggcttcagccgtaaatgttgcagaggtcaagccatcttcctgcacaaacagggctagagcaagtgaccttggattcacaatggaacataggttgggtgactggactggacagtacatatctttctaacatgtcctcccactgtgtacacatctttatggctcttggggaaggcatttctaaatacctcaaacagtacagcacgaggcatattagagctgtgtgactagcaggtgaggtgcttaacaagtcacttgttaacaatgcagacatcacagtaccttaagatcagtgcctagacaggaagtaccccataagtctcccggaacctaagtcacttggccctagcttaggccctgaatgaagccctttctgcttcagggacatgaagactggatgtcggcccatttcctctgtgtctgtatgggagcttaagcccatgtggggccaaggcagaagggagagtgtttgtgcttcctggtcccattaccctagggttctcagagctccctgctgcctctccactgcctgaagctgggcgggtgaagagactgcagttggatcaatactgggcccttctccatttcttttttgtaactgcccttatgaaagcaatacttatacatgattgattttttgttttggtttggtttttggtttttgaagacagggtttctttgtatagacctggctgtcctggaactcactttgtagaccagactggccttgaactcagaaatttgccgccagcctctgccaccaccgcccagccatgattggttttaaaactgatgatatcttaaaaaccgcttgtccttttaccctgttaaaaaaaatatgccggctgggcagtggtggcacacgcctttaatcccaacacttgggaggcagaagcaggtggatttctgagttcgaggnnnnnnnnnnnnnnnnnnnncagccaggactgcaccgagaaaccctgtctagaaaaagcaaaaaagaattaagaaagcatgccgtgtgatcatcaggcttgtcttctctgtcgttgtcatgaagtcttcattcttcacatctgtgcttagacaccactggtcctcccgaaggggggggaggtgaggagctccccacccaggtcccccactttctcttactacagattaccagctgcccagtgcagagctatcctccttaccagccttcagttcacctgcagggctggcactaggcaatgtcaccgcctggcagcagccccagccgccccagcagccacaaccgccacaaccgccacagtcacagccacagccaccacagccacagccacagcagccacctcagcaacagccccacttggtccccgtttctctcagcaacctcatgtgagtctttgggaggttttccatggggacggtggggagtgagggacaggtctcctggagttgtgtgtgtgttcagtaagtggcagtcctgagcccctccccccagccatcagggctgagggtgtaggctttagaagatggacagagtggtgtggacagactgcagctaacactcatttctcttctttccctttgacacgcatctccctcccccgactccccactctcattctgttgtgttgaccctgtctggtgacttcttcccactctttctgttactgtctctgtgtccctaaactccagccctggcagccccttgcctcacgtgggtgctgctctcacagtcactacccacccccacatcagcatcaagtcagaaccagtgtccccaagtcgtgaacgcagccctgcacctcctccaccagctgtgttcccagctgcccgccctgagcctggcgaaggtctcagcagcccagctggaggatcctatgagaccggggaccgggatgatggacggggggactttgggcccacactaggcctgctgcgcccagccccagagcctgaggctgagggctcagctgtgaagaggatgcggctggatacttgggtactgtaacattgcccttctgtctgccggtgtctgcgtcacccagggatgccccacatgcactcagcctgttttctttcccacctgaggccttgtggccaggcatttctttgggtcagtactcacagccctcgaccccttcctgcagcactgtcccctgctcagtgacctccagctagcctcgctcgctcgctcgccctagagtgttaccccttgggagagggttgggtgcatcctataggccacattgcccctcacaccaccttctccatctcctttcttcacagacattaaagtgatggttcccactccctcctttcagcctccctgatgaagagttgacaatctcaccgcccaccccctccttatcctgggctcctcccgctcgaccccacttcctttcttctgctccatgtcctgttgatggttacatttgtgtataattatattattattattgttattattattattatatttttaaattcgaattctcgctttagagagagggatgctcttgcccctttcttgcccccaccattttcactgatggggactctctttattgcgggaaaggggggacactttgcacgttgtacacatatgctgcaggaaggggggaggcggtaggccttggagaaggacaggtgccgagccctgcatgtggagccctcccatcccattcccagatagacgtaaagaaccaaaaactacccaacaacaaaacccagatagtggactgaaacccaaagctggcttgacgatgggcttgtgtctcaggggataggaggaggcagtttctgcttctgggctgttcacggctaatacccatcctggtccctccagcttcctgcatacgtatcacactctctgatcctgtgtgttacaccccaagatctgggtgatagaaaggctgcctaggaatctgaggccagggaaggggcttgaggttggaatctctagagataacatggagagagacagctgtagaaagagggctgatgaggacagaaggactgggtgtggtgaattgggaccctacccccagcttttcctttgagatgtacagtgcaatagctccccgtcctttagcctaccccaatcctaaagaaagctggccatgtactgggagatttgggagaggaccttcattgaagtggctccaggatgggccagagtcgtcctttggttccctggggcactgagagcaggaggcttgtcaggggcagggtgaggagggcacctcttggctttgtgcacctgtgtccagaagagtacttactgggcacatggaggctcctgtagatgaggcccgggcccttccccaggcctctgagctcctgcccctgacccacctcccagctctctgcgtgctccttgtctcgctacctcctgtccctccacctccaggccacatcccaaacctgccctcttgctactgtaattgtaaatagagacctttcaaatgttagtggtgtaaccgtccaggaaactgttgtgtttgttgttgttgtattgatatgaaatgagattctatttttgtcaaagtatattgtaataataatgactcaaatggcccgtactgtacagatgagattcttctgctgtgttcttgccttcctctccagactaatgctttgttgcctcctcagtggggctgcagcaagcaccaggggcagtggaagaagcattgggtccttggacctcttgctggatctgaggtcagactggagggaatagtttgccccctccccagcctgctgtcaccacccctgcccttcctctgcttccccacctggggaaaggggatgggagacagcacacactcccttggagttcctcccagctggagggtagagttagacaaggctcagtgttgtagtacgatggtctttgcccacctgtgacccagccttttgtagtattttgacacttgatgcagggaaggagccagaagcagaggggtgtgagcatgctcgtggaggcgtatctgggttcaccctgtatttatgtgtttgtgtgcagctgtgcggatgtacctttgagtgactcaagctccaagggcctctgtgtgagctgggtgtgtttacaagggatcagcgccttccaactctgtggcttcaccccctccccgggctgctctcagtcccaaaacattttactaaagtcatgggggacgggtgctagttggccttcctgtttctccccacagcctacctccaccagggcttcacatttggagctctgcctccatatggctgtccactagccccacccaggcatggttcatccctggagttctgacttgtttatggagccaactcaagttcttcttgcccggagctttgccttttgtaaggcagggaccctcccttaaccagagtttaccccagtagctgaccaagcatggggtgctacccacatgcctcaccttcccactcctcctcacaagtcctggagggagttttaagacttgcttatggccttgaaagaagccagggttgtagccctgtgctccccttgaagtagctggcacattgtaggccctcagtaaatgctgaatgggtggatgacaggtgctcaataaatgtggattcacggcctcatctcaggcccatccttcaaggctgagcttggccaccattacagttgtgggtgaagcccctatagttcacagtgtgctactcaacagtttgccatctgcttcccgaaagcaaacctggcttgtgattgccatgtacggatgcgtgcatgcactgtgtgtgtgtgtgcgtgcgtgtgcgtgtctgtgtctgcacacacacgtatgagttcttgtgtgtctctgtccctgactgaaggggcagtctgtgaatgagtatgtgacatttctgcagtttagtatccccaggtttctcctggggctatgcaggggcttctggctggccaggtaaatggatccctgggaacctagacctcaaatggggacttattttcttcctctcacaagccaaatttgcctactctccactccctatacagaactgggtatttgccaaagtagcctctggcgtcatccagtgcccttcccacccaggttcccctctgctttcagggatagtgggaccgagggccacccccacatgcctcagtttagcacatttcctccatccccagcagtgcatccacccaccctccccaactccaacaggaaggaagaaagaaatgcaccttctcttgctcgttatttatttgtttggagagacagaaatgatggaaaagtatctaaatctatctctctctctatttttacctaactctctggaacccctgtgggggaatgtaggctctcctaagaggctgggagctccttgttctaccctgtctgcctctacataagcagaaggggtgggatgtaatggggcaggagggctgagattcccaaggagaatctgaattctctacccccattcaagtcccagaaagagggaagaagggagggatgggccagccaagagctgacccgtccccaaacttgacaatcacccacactcctggctcctgggtctgggtgagtccaagtgtgtggctgttggtttgttttcattatttctttccgtgctgtacggtgatgctttctagtattctgcacattaagaaaagtcctcgagattcttacgagtttggtttgaaaactctttcactatatttgttgtaaagaggtttactattaaaagaaaaaaaaaaaaacatgtttctgatacctcagtttgggttttgatttctttggtgcggcgaggaaggggaggaagacctggtgtgcctggcagagtgagtgatgatttggagggcaggctgtgagatgccaggtctctcaggcactcttaaggcagaactgtgggcagttgctccaggtagaagccttgaaagggatcctgcaacatgggaagaacaaatgttcctagggtcagatctagccttcctactacagacagccattcttagcagatttcccttggcctagtcaaacagatggagtccaccttcacagcccaccagtgtcccaccagcacagtaatatgctcctaacacttgctggcacagccaggctgtgggcagatttcagcacatctggaagccttgatgtactgccctggtctgtcgttggtgccgaagcagcaaaacaagtgagggggcctttgctcagtggctaagactaccctataaatgcttatggtgatgtggtctcctgatgggggtgctggagaggagaggagaggagtcaggcaagcaaggcacagaatgtcctccagcctcagatttccatattgcaaaatacttagcatctgtgctggccccgccttcctcacaaggccactggatttcacctcacttctccctcagcagtggctaagggacagtgtcctcatcaagaaagggttaatgggatgttgttctctaggtggggtgggggtggggaggctgtggctcaggtgatatagagtgcttggcctagttcagtctcctggaaaaggaggcatggtagtgcacactagatattctagatataggcaggaggatcagaagtttacagtcattctcagctacgtagggaccctgtctaaaagagaaaggtagtactgttgtccactatctctgcctgttcccacactgaaaaaccaatagaagaaagcaagtgatggcatgtgctttcaaatgggaagggtggcttctgtttctcttataaccctaatactatgctatacaccagccctgtggaaagcccacatgccaaggaccagtggcctcctcctgccacctgccatttgaatgaggtcatcttcacagtatagttccctgacttctccagacattgctccaagggagaatgtacaggcaagatggactgcgcagctcatccatgctcatgggaggactcttctctgaggtgacctcagtctgccttgcctcctcttccttcctgccagtaggtatcactcactggggtctgggataagccttagtgttgcttgcaaaaacttctgttccctgtctcttctgctgttttccatatagttcagtggggtcttggggttggttctggccaagggactaatgagctgtaatgtgcgtcccttctgaaatacaggtagttcctgcctgtccaagtgctgggttttttttttttttttccctatcttgagcattctggaagagcatgtcagtgtgaagtgccatggagcaaatcagcctgagttgggggtctgatgccctcttctggcctctgcaagcactgcatgcaggtggtgtgctaacatacctgcaggcaaaacacccctgtacatatttatttaaagtagtctggattgccaaaccacttcagggtggtattagcaccaggagaacgttagaaatgtgaaatgatcactataccgccctggccagtgtggtgcctttcccactcagttgtaaaacacttacagtgtgatacagagttctgtggactctgcatagtcggagtgtggtcaagttctgacacttgttgggtgttcctatacaatgtaaacagctgcctatttcctgtaattcacacctgcccttctcaggctatccccctatctggctccattgataatctgaccccttcacggtactccatagctcaccacgtaaagtgcaaaggccttgctggttctcaaggccttcaacaggccaagaaaagcccctttccaggctcagtccatgccgctccttggactctaggtgtgcaccagaacagaaaggagtcagtgggttcctactgctagtaggaacagtagactaaagaaccagcagaaactgggcttcccagatgagactaggcacatccgctccaaactaggggtctgggaagtatcttaggaagagtttgagctgaacactgaagacatgtaggaattccctaggcacatgggcccctacggaaatctaaccctggcgaatagacaagaatggcatgcagagctgaaggggcaggcagaggccatgtgaaggccttcgttagcaatgaggctttattctccacagtctaggtcttcaaaatagtttaaagaaatgactgaggttagctaggagctggagtgacacagcagagaatggggagctcagggtagcctgggtttcacagtaggacctgtgtcagaacaaactcagaaaagagacgcatgcctgcaacccctgcatggacaagcagaggtaggaggatcaggagttgaaggacatctggattacagagtgacctgtggggcaggctggcttacataagacactgcttcagaaaactgagatggaacacttgctagcaaaaactgacagcaatgtctctgtctctccctccctccctttttctttctagtcgggagtctatcacagggttctttttccctccctccctccctccctccctccctccctccctccctccctccctccctttctttcttcctgctgtttgggacaggttctctctgctctcctggaactcactactatatcagactagctctgaatttccagagatctgtctgcttctactgggatcaaaagtgtgtacaagcagctctcaaggcttcttacactttccttctcacaaacctctcttcagctgaattcatgttctgtacacccagaacgtgaaatgtacaaatcaaacatctgctggaaatgacaagtttgtgtatttgtgtgggtgggtgggtgtcctcctcagtcattcttgaccgaatctggagtttgtcattttagtcatactagctggccacatgcccaaatgattctcttgtgggattacaggcacccacaactgtacctagctttgctgacctgaagacatacttgtgccatctccatagccccccagatttgttttaaataaaattctttaatacacataaactatctggtctatatttataatcttaatagttattaaagattaaagcatccagcccagctaagactacatgaagaaattaaagcaagttttcatactaataagatggatttatttttatataactcttggctgaaggctgggtatagtggtgcatgcctttaatcctagcacgtgaaaggcagaggcaggcaaaactctcttgagttctagaccaacctgatcgacatacagacagccaaggctagagtaaaaccctgtcttaattcaaaaaacaatcagtcaagcttggctgaatatttgacagttctccatgtagaacctcttcaatatttttcagaactaatactttgatttgatacttgtcaacactgagtgtgctgcttcatagagtacaaaatggcaggtgtagtgtagcctggttggttttgtcaacttgacacaacctggaatcacccagaaagagacaacttcaattcaagcactacctccaagggctgcagagatggcacagggatgggacagcccagcaagcaagaagtcctgggctcacacttcactcagcgcttaatacttcaagaggcagtgccacacacctggaatcctagtaagagatggcggtgaaactcgggggtatcctctgctgtacgtgagctcaggataactggaatacatggaattctagtaaaaaaaagaataaaatgaaactaagccaaacattctaacatgatcccaaggatcttaaaaaatactgactggacattatctggcatggtgcctacacaaatgaaagacagtgcatatttttgttgtgttttttatgtgattttctttttcttttttggtttttcgagacaaggtttctctgtttcctggctgtcctggaactcactatgagaccaggttagcctcgaacgcagaaatccacctgcctctgcctcccaagtgctgggattaaaggtgttcgccaccactgcccggctttttttgggcgggggggattttcttttctttttttttttccattttttattaggtatttagctcatttacatttccaatgctataccaaaagtcccccatacccacccacccccactcccctacccacccactccccctttttggccctggcgctcccctgtactggggcatataaagtttgcgtgtccaatgggcctctccagtgatggccgactaggccatcttttgatacatatgcagctagagtcaagagctccggggtactggttagttcataatgttgttccacctatagggttgcagatccctttagctccttgggtactttctctagctcctccattgggagccctgtgatccatccattagctgactgtgagcatccacttctgtgtttgctaggccccggcatagtctcacaagagacagctacatctgggtcctttcaataaaatcttgctagtgtatgcaatggtgtggattttattttcttgtgtgtgtgtgcatgagtgtccctggaggctggagcagggcatcaagtttattggagctaatgttacaggcagttgtgagatgttggcatgggtgctagaaccaattcaggtcagcaaacattttttgttgtttatgtgcattgatgttttgcttgcatgtctgtctatgtaaggacagttgtgagctgccatgtgggtgctgagaatggaacacaggtcctctggaggagcagtcaatgctcttaaccactgactcccccagcaaacattcttatacaacacccctctggtctcctcaggacacatgtgtacatacacatttttttttaataaaaaatactcccaagttgcaactttttgaagctgatctcttttttagctgaaggacgagttcctcgagtattgccatataaaatagaactagggtgtgggtctcttggactcagctatcaaggtcagtggttcttaggagcaatcagtgctgtctaactgttcatgccacgaggccagtggttattttggtctgactcatcctttagtcccatgggctatcttttccagccttgtgattgtgtgggaacttgttcaaggatcagcagatgtggaagggacccaggcgatctcatctcaggctctggacctgaatgtttgcagcctgaaatcactcactacctggacgaagagcaaatccactttcctgtcctgtttcagacttgggtctcaaatagaagaggtagccttagcatagtttacaggtcccccccccccccccccgttctagccacccagcctagcgaagttccttggtagtttgcagcaggtcagttccggcctctcgggtgagtcagatttaccccttagcctcgtattggctcagctccacctctcggtgtctgtccagtctcggggagcgtctccaccctcacaggatagcggcccaggactactcctatttaggacatgagctgccacgtgcccaaagcatgctgggtgcccctggggaggggaagacccgcaggacgccggatcacgcgcccgttacgcaccgcccccacgtgacccgcggtgtgttccggagatgaattgcttccgggtttcaaagtaaccctccactctaaggcgaaagggggcgggtatagaaggtaggctgtagagtcgcctaacatccatttccgtacgttctgccccactcccccaaggtgtcgctgagacccttgactgcgtctccggggcttagcaggtggcagagcacgctccggagcctctcgtaaagttccgccgcgcgtggaacaaaggccttcaagccacgcccggcgccgcctgctactcagggggaagtaggtaactaggctcactccattggcccttcgggtgagtgatggaagcaccggccaaccgctgcctgcacaagatgcgtgcgtagtactcagaaggttcagcaagggtgaaactacgtgaagctctagttttgggcagtttctctggggctctgaggaggtgcgcatgcgtaaaacccccatcgtcaacttcctgcacaaattgagaattagcaccctcagccttggcaattttactgagattgacagcactgcgtaagatctggcattgcctgggcgttccagaaggagaatccgacaggcgaatgcaacgatttgtcattgtcaaaactgttaaccacaaagtccacgccgaaaaactgcgtgattgaattatttaaaaaagggggctggagagatggctcagtggttaagagcactgattgctcttccgaaggtcctgagttcaaatcccagcaaccacatggtggctcacaaccatctgtaatgagatctgatgccagtccagggtgtctgaagacagctgcagtgtagttacatataataaataaataaataaataaataaataaatgaatggtgtagttacatataataaataaataaacaaacaaataaatatttaaaaaagaaaaaaatcgcggggctggggatgtagctccgagcccggagttctgctggagttcgacctggtgtgtgcatataggattagaagttcaaggctatcccgaaatataagagactctggtctaaaaaaaaaaaaaaaaaaaaaaaagagccacaaatgattttgtttggagaagtagtcacagatgccgtccactttaatgggccacaggttggacacgccttgctctattttcctgtcttctggcggtaagattatagtgcgaatagcctgagagctattggcctgaatctgtgcagacaccttgctacagtagtaagaatatttatttagagaggtttcacagtttgtcttatactctttcactcaagaggtcctcacataacccttctattgggatggaggtatagcttagtttaatggtagagcacttgcctagaaggagttccgttcccagattacagtggccgccacatcgtgtagacagatcccaagctgaggcttaagatgctggagtcccaaaaaacactgtccaggtgaagcagccaagaggccctatctccccacccaggggtcctatattgttagggactgttgctcgcagtgacctagtgtcaagttgggataattactctttttttttttttttaagattttatttatataagtacactgtagctgtcttcagacacaccagaagaaggaatcagaccccattacagatggttatgagccactatgtgtttggtgggaattgaactcaggaactctggaagagcagtcagtgcttttttttgggggggggggggtttcgagacagggtttctctgtatagccctggctgtcctggaactcactttgtagaggctggcctcgaactcagaaatccgcctgcctctgcctcccaagtactgggattaaaggcgtgcgccaccacgcctggcagtcagtgcttttaaatactgagccatccagggatggaagagcataggcagagttaaagttgttgaagttcaaatataacaaaataacagaagcattggcagagccgagggctggtaaaggtggggtgtgttggtagttacctgagcagagttggagggtgggatggaaaagagcacaggcagggtgcgtgcggctggcatcagcctgcttactggttaaatgctgggactctggcatccattttatatgtataaagaataatttaaatggtgggcctagtgacaaaaatgcttgggacactaaggattgtgaattcaaagctggcttggactgcacagcaagtccaaggccagtctactggtttgctttctaaattgtaataaagcattctaaccaaaagcagcttgggaaggaaagggtttatttcacttacaagtttattaacttacaagttaatatccctcgccagaagaagtcaggacaggagctaaaggcaggaacctggatgaaggaacggaagtgaaaacaatggagaaacactgtgttctggcttgatcccttcagctagtattttatgccgttttaaagatttatttagggactggagagatggctcagcagttaaaagcacttgttcttttgggagtcccaggcacagttccccgagcacccacatgataactcagtcattccaacttcagttccagaagatcggacacttttttgatcttcatggacagcaggcacagaagtggtgcacagacatgcgatgcaggcagaacattcaaacacacaaaatagataaatctaaaaaaaaataagagatttattaagtgtatgtataccacacatgttcaggtacccactggaggccagaagactgcatgaggccccctagagcaggagttataagcagttgtgacccacctgatgtgtgtgctagggttccctcccagggatcctctagaacaacagtaagtgctttaactactgagtcatctctgcagccctagttacattctttctttccttctttctctctctctctctctctctctttctttctttcttttatttaacttacctagttaatgtgtctgtttattgtggtgctgggaatagaactcacagccttagctgtgctagataagcattctgttgtttagctgcacccccagcccccaactatcccaaaggccaatctgttggtggcaattcttcagctgaagatccctcattgtgtgaatgacaacaaaggttagctctcacagccagtctgagaccttacctcaaaataaagtctcacactgagttaggtgtcacacacctgtcatctcagcagaaagtgagtccaaggccaatccgagctacatagcaagtcttcctttaggaagaagagagctggagagatgtcttaaatgttaaaaggctaccggctgctcttctggagtatcaggtacaatcctcagcacccacatggtagtccagagctatctgtagctccagtcccaggggttttgacaccttcttctggcctctgagtgcactttgcatgcatatggtgcatagacatacatgcaaagcaaccatacatataaaattagagagagagagagagagagagagagagagagagagagagagagagaatgaggatagtagactgcttacccagcatctgtcagtgcctgtgtttaattcccaatgtttcaaaatgaacaaataagaaccagagaaaaacttacataaataaatgataaaacaaatagtgtaagatgttcagtgtaaagtcaggtgctgatccaatgcactgccctctccatcctggaaaactatgtgccaccatgacctgcttgcactgtgtgatgtctgtgaaagctcccaaaactctgttggtgtggccaagtgacagagagcttgccaagcatgccgggtgttctggggatcctgcccagggagagggaggaaaggaggcggtggcggtggcagcagcatgaggtttattaggcaaaaagagccctgcgtgtgctgcacttggttcataaagcatttctacaaacactgtggcaggagggcctcacacacacaaaccttttttagtagctttatttagttttatgtgtttggatgttttttctgaacacgtgttccatatgtgtgcccagtgcccatggaggtcggaagagggtgttggatcccctggaactggagttgggatggttgtgagttgtcttttactactttgtgggttcttctttcttccacccttctccacctttttcccaccctttcaaccctctcacactagatagagagaaaaggggacagaaaggaaagggagctatgtcattcttaaactacctcctgctgattaagggggcactgagttccttggggcaagtttgaactttgctgtcagaatatc

SEQ ID NO: 1395 - DNA, 9081 bp, Mus musculus
atggagccgtgcgcggcaggccgagctcggacagcctatgagcgcctcacagctgaggaaatggatgagcagaggcgacagaatgtcgcctatcagtacctctgccggctggaggaagccaagcgttggatggaggtgtgcttgaaggaggagcttccttcccctgtggagctggaggagagcctccggaatggagtgctactggccaagctgggccactgttttgcaccctctgtggtccccctgaagaagatctacgacgtggagcagctacgctaccaggcgactggcttgcatttccggcacacggacaacatcaacttttggctctctgcggtagcccacatcggtctgccttcgatcttcctcccagagaccacagacatctatgacaaaaagaacatgcctcgggtgatctactgcattcacgctctcagtctcttcctcttccggctgggattggctccacagatccatgacctgtatgggaaagtgaaattcacaggcctaatgaagagcatccctggcgtcattgcagctgaggaactcggcaacatcgcctctgaactggccaaatatggcctccagttaccggccttcagcaagatcgggggcatcctggccaatgagttttcagccgatgaggctgcagtccatgcagctattctggccatcaatgatgccgtggagcgaggggtggtagaggacactctggtcaccttgcagaatcccaatgctctcctggggaatcttcgagaacctctggcagctgtctaccaagagctgctggccctagccaagatggagaaggcggccaatgccaggaatcatgacgatggtcaggagcaggacatctatgaatcctgcctcacccaggcagagatccagggccacatcaacctcgccaacgtccagggggcactggaagttgttgacgacgctctggagaggcagaaccctggggccttgcttgaggcccttcacgatcctgtcctggccctacaaggggtgagaggaacctttgctgactggtacctggaacagctgacttcagaccgagagcagaaatcacaggctgtgtggaggatcaacaaagccatccggaggggagtggctgctgacaccgtgaaggagctcatgtgccctgaagcccagctgccccgagtctacccctttgcctctgctttttaccagcaagagctggctctcctccagaagcagcaacagggggagctgggccaggaggagctctttgtggctgtggagatgctgtcagccgtggttctgattaaccgtgctctggaagctggagatgtctgtgccttttgggacaatctagtgaatcccgcaactggcctagcccaggtagaagaagaaaatgcccaacgttactttgatgccctggtgaaggttcagcagtttcaaggaacacatagaggcatcctgagctggaatgacctgcaggctgctgtgagccaggtcaatgaacaggtccaggaagaaactgatcttttgtgtttggagctgctgttcatctggatctcttcctcagaggtcctcgccatcagcctcatcaatgaggctctggaccagggctgtcctgaaaagactctgtctgccctgctgcttcctgcagctggcctggaagatgtcagccttcatgttgcacctcggtaccatctcctccttgtggctgctaagaggcagaaagcacgggtgacaggagaccctggagctgtgctgtggctggaggagatccgccaaggagtggccagagccaacgaggacacaagcacggctcagagaatagcccttggtgtggctgctatcaaccaggccatcaaggagggcaaggcagcccagacagagcgtgtgttgaggaaccccaatgtggccctccgagggatagttcctgactgcgctaaaagctaccagcaggccctggaaggcgcagcggcaaagaagcaatgccctggggacacagccttctgggttcaacatgacatgaaggatggcaccgcctactaccttcatctgcagacctttcaggggacttgggagcatccttccggctgccacctcaatacctcccatctaacctgggaggagattcagtcagtcatcaccaaggtcactgctgcccatgaccgccaactgctctggaaggccaatgttggctttgtcatcaagctccaggcccgccttcgtggcttccttgttcgccagaagtttgctgagtcttcccacgtcttcaggaccttgcttccagccgtcatcaagatccaggctcactggcggggttatagacaacggaaggcttaccaggagcggctgcagcattttaaagcgaacctggatgctataatcaagatccaggcctgggcccgaatgtgggcagcacggaggcgatacctcaggcgtctgcgatacttccagaagaacgacctcaacctcatggacatcaagattggtctgctcgtcaagaaccgcatcaccctgcaggaggtagtctcccactgcaagaagctgaccaagaagaataaggagcaactgtcggacatgatgatcctggacaaacagaagggattaaagtcactgagcagagagaaacggcagaagctagaagcctaccagcacctcttctacctgctgcagactcagcccatctatttggccaagctgatctttcagatgccccagaacaaaactaccaagttcatggaaggtgtgattttcagtctgtacaactatgcctccaaccgtcgggaggcctaccttctgctccagctgttcaggacggcgctccaggaggaaataaagtcaaaggtggaacagccccaggatgtggtgacaggcaaccccacagtggtgagactggtggtgaggttctaccgcaatgggcggggacagagcgctctgcaggagatccttggcaaggtcatccaggatgtgctagaagacaggtcagtcagcatccacacagaccctgtccacatctataagagctggatcaaccaggaggaggcccagactggacagcgcagccatctcccctatgacgtcacccctgagcaggctctgagccactctgaagtgcagagacgattagacatctccctgcgcagtctcctcaccttgactgagaagttctttgtcgccatcagttcatctgtggaccacattccgaagaactgggccccatcctgtaccccgagctttgcccaccagtggggaatgtggacccacggctgtccaggtggcttccagacctttctggaatttctcctctgcactcaggtggttgggaacctcctgtactaccgcttcctgaacccagctgtggtcgctcctgatgcctttgacattgtggccatggcggcaggcagcaccctggccgccccacagcgccatgcgctgggagccgtggctcagctcctacagcacgctgctgctggccagatcttctctggggagagccggcaccttcgagtcctgaatgactacctggaggacttgcatctcaagttcaggtctcaactcttatcacccttttcctccctggacttctctccacttcccttggttcacttccagaggcacagggtctatgggaggaagttcatctgcagagcctgccgggtaccagagccagaggagcgcttcgccatcgatgaatactcagacatggtggctgtggccaaacccatggtgtacatcactgtaggggagctcatcggcacacacagggaagaagcccatcgtcggttgatgtgttggcgccaagcctgtgacacccagaaaccagagccacttcgacgacaccactcactaatggcacacagtctcctgtcactgtcggagaagcagcaacgcgttctgcggaacctgcgtcggctacagggcctggggctggtcagggccagtgactgctaccagggacttgtagacgagctggccaaggacatctgcaaccagcgtaggcaccggcaacggcggaaggcagagatgctgaggctccggaccacactgcagggcctagatgcaaaaaccatcttctatgaggaacagggtgactactacaaccaatacatccaggcctgccttgaccacctggcccccaaacccaaggggtcccggccctgtggcgccgcccaggccgcgtggacgcggcgccttcgctgtttcccgtcggagctgcggcttcgcgtaaccgaggattcggcggaccgggccgaggctccgggcgccgtgacaccccgtcccccccacgggctggtgaccttcaccaagcggaagtttggactgatgaagaaggcctacgagctgagtgtgctgtgcgactgcgagatcgcgctcatcatcttcaaccactccaacaagctgttccagtatgccagcaccgacatggacaaggtgctgctcaagtacaccgagtacaacgagccacacgagagccgcaccaatgctgacatcatcgagaccctgaggaagaagggtttcaacggctgtgacagcccagagccggatggggaggactcactggagcagagccccctgctggaggacaagtaccggcgggccagtgaggagctggatgggctcttcaggcgctatggggcgctgcacaagaagcacagggagtgtgagagccccgaggtggacgaggcgtttgccctgaccccccagacggaagagaagtataaaaagatagacgaggagtttgataagatgatgcagagttatagactggccgtgagtagtcgcatggaggagagcctcctgtgctgcatgtcatctgttccggcccccaactttgccatgcctgtcacagtgcccgtgtccaatcagagctccatgcagttcagcaatccaagtagctctctggtcactccttccctggtgacatcatcccttacggacccacggctcctgtccccccagcagccagcactacagagaaacagtgtttctccaggcttgccccagcggcctgctagtgcaggagccatgctgggtggagacctcaacagtgctaatggagcctgccccagccccgttgggaatggctatgtcagtgcccgagcttcccctggcctcctccctgtggccaatggcaacagcctaaacaaagtcatccctgccaagtctccgcccccacccacccacaacacccagcttggagcccccagccgcaagcctgatctgcgggtcatcacttcccagggaggcaaagggttaatgcatcatttgaacaatgcccagcgccttggggtctcccagtctacccactcgctcaccaccccagtggtttccgtggcaacaccaagtttactcagccagggcctccccttctcctccatgcccactgcctacaacacagtcactacccacccccacatcagcatcaagtcagaaccagtgtccccaagtcgtgaacgcagccctgcacctcctccaccagctgtgttcccagctgcccgccctgagcctggcgaaggtctcagcagcccagctggaggatcctatgagaccggggaccgggatgatggacggggggactttgggcccacactaggcctgctgcgcccagccccagagcctgaggctgagggctcagctgtgaagaggatgcggctggatacttggacattaaagtgatggttcccactccctcctttcagcctccctgatgaagagttgacaatctcaccgcccaccccctccttatcctgggctcctcccgctcgaccccacttcctttcttctgctccatgtcctgttgatggttacatttgtgtataattatattattattattgttattattattattatatttttaaattcgaattctcgctttagagagagggatgctcttgcccctttcttgcccccaccattttcactgatggggactctctttattgcgggaaaggggggacactttgcacgttgtacacatatgctgcaggaaggggggaggcggtaggccttggagaaggacaggtgccgagccctgcatgtggagccctcccatcccattcccagatagacgtaaagaaccaaaaactacccaacaacaaaacccagatagtggactgaaacccaaagctggcttgacgatgggcttgtgtctcaggggataggaggaggcagtttctgcttctgggctgttcacggctaatacccatcctggtccctccagcttcctgcatacgtatcacactctctgatcctgtgtgttacaccccaagatctgggtgatagaaaggctgcctaggaatctgaggccagggaaggggcttgaggttggaatctctagagataacatggagagagacagctgtagaaagagggctgatgaggacagaaggactgggtgtggtgaattgggaccctacccccagcttttcctttgagatgtacagtgcaatagctccccgtcctttagcctaccccaatcctaaagaaagctggccatgtactgggagatttgggagaggaccttcattgaagtggctccaggatgggccagagtcgtcctttggttccctggggcactgagagcaggaggcttgtcaggggcagggtgaggagggcacctcttggctttgtgcacctgtgtccagaagagtacttactgggcacatggaggctcctgtagatgaggcccgggcccttccccaggcctctgagctcctgcccctgacccacctcccagctctctgcgtgctccttgtctcgctacctcctgtccctccacctccaggccacatcccaaacctgccctcttgctactgtaattgtaaatagagacctttcaaatgttagtggtgtaaccgtccaggaaactgttgtgtttgttgttgttgtattgatatgaaatgagattctatttttgtcaaagtatattgtaataataatgactcaaatggcccgtactgtacagatgagattcttctgctgtgttcttgccttcctctccagactaatgctttgttgcctcctcagtggggctgcagcaagcaccaggggcagtggaagaagcattgggtccttggacctcttgctggatctgaggtcagactggagggaatagtttgccccctccccagcctgctgtcaccacccctgcccttcctctgcttccccacctggggaaaggggatgggagacagcacacactcccttggagttcctcccagctggagggtagagttagacaaggctcagtgttgtagtacgatggtctttgcccacctgtgacccagccttttgtagtattttgacacttgatgcagggaaggagccagaagcagaggggtgtgagcatgctcgtggaggcgtatctgggttcaccctgtatttatgtgtttgtgtgcagctgtgcggatgtacctttgagtgactcaagctccaagggcctctgtgtgagctgggtgtgtttacaagggatcagcgccttccaactctgtggcttcaccccctccccgggctgctctcagtcccaaaacattttactaaagtcatgggggacgggtgctagttggccttcctgtttctccccacagcctacctccaccagggcttcacatttggagctctgcctccatatggctgtccactagccccacccaggcatggttcatccctggagttctgacttgtttatggagccaactcaagttcttcttgcccggagctttgccttttgtaaggcagggaccctcccttaaccagagtttaccccagtagctgaccaagcatggggtgctacccacatgcctcaccttcccactcctcctcacaagtcctggagggagttttaagacttgcttatggccttgaaagaagccagggttgtagccctgtgctccccttgaagtagctggcacattgtaggccctcagtaaatgctgaatgggtggatgacaggtgctcaataaatgtggattcacggcctcatctcaggcccatccttcaaggctgagcttggccaccattacagttgtgggtgaagcccctatagttcacagtgtgctactcaacagtttgccatctgcttcccgaaagcaaacctggcttgtgattgccatgtacggatgcgtgcatgcactgtgtgtgtgtgtgcgtgcgtgtgcgtgtctgtgtctgcacacacacgtatgagttcttgtgtgtctctgtccctgactgaaggggcagtctgtgaatgagtatgtgacatttctgcagtttagtatccccaggtttctcctggggctatgcaggggcttctggctggccaggtaaatggatccctgggaacctagacctcaaatggggacttattttcttcctctcacaagccaaatttgcctactctccactccctatacagaactgggtatttgccaaagtagcctctggcgtcatccagtgcccttcccacccaggttcccctctgctttcagggatagtgggaccgagggccacccccacatgcctcagtttagcacatttcctccatccccagcagtgcatccacccaccctccccaactccaacaggaaggaagaaagaaatgcaccttctcttgctcgttatttatttgtttggagagacagaaatgatggaaaagtatctaaatctatctctctctctatttttacctaactctctggaacccctgtgggggaatgtaggctctcctaagaggctgggagctccttgttctaccctgtctgcctctacataagcagaaggggtgggatgtaatggggcaggagggctgagattcccaaggagaatctgaattctctacccccattcaagtcccagaaagagggaagaagggagggatgggccagccaagagctgacccgtccccaaacttgacaatcacccacactcctggctcctgggtctgggtgagtccaagtgtgtggctgttggtttgttttcattatttctttccgtgctgtacggtgatgctttctagtattctgcacattaagaaaagtcctcgagattcttacgagtttggtttgaaaactctttcactatatttgttgtaaagaggtttactattaaaagaaaaaa

SEQ ID NO: 1396 - protein, 1869 aa, Mus musculus
MEPCAAGRARTAYERLTAEEMDEQRRQNVAYQYLCRLEEAKRWMEVCLKEELPSPVELEESLRNGVLLAKLGHCFAPSVVPLKKIYDVEQLRYQATGLHFRHTDNINFWLSAVAHIGLPSIFLPETTDIYDKKNMPRVIYCIHALSLFLFRLGLAPQIHDLYGKVKFTGLMKSIPGVIAAEELGNIASELAKYGLQLPAFSKIGGILANEFSADEAAVHAAILAINDAVERGVVEDTLVTLQNPNALLGNLREPLAAVYQELLAKMEKAANARNHDDGQEQDIYESCLTQAEIQGHINLANVQGALEVVDDALERQNPGALLEALHDPVLALQGVRGTFADWYLEQLTSDREQKSQAVWRINKAIRRGVAADTVKELMCPEAQLPRVYPFASAFYQQELALLQKQQQGELGQEELFVAVEMLSAVVLINRALEAGDVCAFWDNLVNPATGLAQVEEENAQRYFDALVKVQQFQGTGILSWNDLQAAVSQVNEQVQEETDLLCLELLFIWISSSEVLAISLINEALDQGCPEKTLSALLLPAAGLEDVSLHVAPRYHLLLVAAKRQKARVTGDPGAVLWLEEIRQGVARANEDTSTAQRIALGVAAINQAIKEGKAAQTERVLRNPNVRGIVPDCAKSYQQALEGAAAKKQCPGDTAFWVQHDMKDGTAYYLHLQTFQGTWEHPSGCHLNTSHLTWEEIQSVITKVTAAHDRQLLWKANVGFVIKLQARLRGFLVRQKFAESSHVFRTLLPAVIKIQAHWRGYRQRKAYQERLQHFKANLDAIIKIQAWARMWAARRRYLRRLRYFQKNDLNLMDIKIGLLVKNRITLQEVVSHCKKLTKKNKEQLSDMMILDKQKGLKSLSREKRQKLEAYQHLFYLLQTQPIYLAKLIFQMPQNKTTKFMEGVIFSLYNYNRREAYLLLQLFRTALQEEIKSKVEQPQDVVTGNPTVVRLVVRFYRNGRGQSALQEILGKVIQDVLEDRSVSIHTDPVHIYKSWINQEEAQTGQRSHLPYDVTPEQALSHSEVQRRLDISLRSLLTLTEKFFVAISSSVDHIPKNWAPSCTPSFAHQWGMWTHGCPGGFQTFLEFLLCTQVVGNLLYYRFLNPAVVAPDAFDIVAMAAGSTLAAPQRHALGAVAQLLQHAAAGQIFSGESRHLRVLNDYLEDLHLKFRSQLLSPFSSLDFSPLPLVHFQRHRVYGRKFICRACRVPEPEERFAIDEYSDMVAVAKPMVYITVGELIGTEEAHRRLMCWRQACDTQKPEPLRRHHSLMAHSLLSLSEKQQRVLRNLRRLQGLGLVRASDCYQGLVDELAKDICNQRRHRQRRKAEMLRLRTTLQGLDAKTIFYEEQGDYYNQYIQACLDHLAPKPKGSRPCGAAQAAWTRRLRCFPSELRLRVTEDSADRAEAPGAVTPRPPHGLVTFTKRKFGLMKKAYELSVLCDCEIALIIFNHSNKLFQYASTDMDKVLLKYTEYNEFSRTNADIIETLRKKGFNGCDSPEPDGEDSLEQSPLLEDKYRRASEELDGLFRRYGALHKKHRECESPEVDEAFALTPQTEEKYKKIDEEFDKMMQSYRLAVSSRMEESLLCCMSSVPAPNFAMPVTVPVSNQSSMQFSNPSSSLVTPSLVTSSLTDPRLLSPQQPALQRNSVSPGLPQRPASAGAMLGGDLNSANGACPSPVGNGYVSARDGLLPVANGNSLNKVIPAKSPPPPTHNTQLGAPSRKPDLRVITSQGGKGLMHHLNNAQRLGVSQSTHSLTTPVVSVATPSLLSQGLPFSSMPTAYNTVTTHPHIKSEPVSPSRERSPAPPPPAVFPAARPEPGEGLSSPAGGSYETGDRDDGRGDFGPTLGLLRPAPEPEAEGSAVKRMRLDTWTLK

SEQ ID NO: 1397 - DNA, 64898 bp, Homo sapiens
aagtggtcccaaagggccatccacccttaagccttgggccccttttggaaccccttcttagtgtcttagtcccagtcccattccccggccccaggcacccaccgtgtaggtcagcagccttctggtgaaactcccgagcttcctgatagttgccgagggcattgtgggccatcccgaggtttcttagcactgtggcctgctctcctggcacccagcacaggggcagggcctgcaggaaggcctccacggccagcgggaacagctggagctgggagtagcccaggcctagatcgttatagaggtgccctagagggaatagccagggtcactggtagccagaccagatataaatgaggctggtacagcccctatcgactcctccagggttccccaaacccagccctctgagtatcatcaggctctgtgtctccccagatcccatgccttccctgcccgaaggtctcacccagcagtcgcctcccagtgctcctctcggcaagcctccggcttttctccagcacctgcacaacttcccccacccgatgccgcccactcttcagcatacatcctgccgcagcccccagtgccagggctgcggcccgcagctgtctctcttgagcataggcctggcttgcttcctgcaggcagtgggctgctagctcaggctgtcccagagcctggtagcaggctcccatttttgcccaggcttctccctggtcaccctgtggctggtagtggcccagggccctgtggtaccaggccaaagcttgaggcagctcgccgagggcatggtaggccaaagccacattgaaacattggtcgccgtgtcgcctgccctgtgccttctcttcagggtgggctcgcaggagtagctcaaggcctctggctgggtccccagtctccacataggcagcccccaggttgaaggcgcaggcctggagcacaggggtatccctggtttgtggggccttggaggccagaaggaaggccctctggaagttgttcaaggcttcatggttctggccagcctgaagggccccatggccagccctggtgagggcttggatgctggcttcttgccgcagccactttcttttcttctttttcttattggagcttgagggctcaggttctggcctccggggcacatcctcagggttgggggaagacatagggctgacaaaggggaacagagggctcagtatgtcagccttggcttcctctagatagcaggacccccttagggcaattcagctctacccctgccctagcatgaccctcagggtttcaaggattgctctctgatctctcactttgtttcttctgtcccattgggcaccatatccactctcactctaacttcctgactaattcttagtcctccttcaagactcaagtcaagtaacagcttacttcagaacgcaccttcttctcaaccaactgggtactcctgtggtcccatagcacttgatgcctatgtcttttatagcatttatcacactgggtcagagctgatgactttattgtcttccccccactactagatttggagcaacttgcagggtctggcacacagtagattctcaataaatgtttatgaaaggagatgaaaaagttctggagatggatagtggtgttaattgcacaataatgtgagtgtacttaatgccactgaactgcacattttaaaatggttaaaatggtaaattgtatgttatgtatatgttaccaccatacgagtgtttttggattgaacaaataggccaggtgcgatggctcacaccagtaatcccagcattttgggaggctgaggtgggcagatcacgaggtcaagagatagagaccagcctggccaacatggtaaaaccccgtctctactaaaaatacaaaaattagccgggcgtggtggcgggcgcctgtaatcccagctactcgggaggctgaggcaggagaattgcttgaacccgggaggtggaggttgcagtgagctgagatcgcgccattgcactccagcctgggtgacagagaaactctgtctcaaaaaaagctgcaaataaatagatgaaggaaccgcgtatgcagggcctctcctccataacttccttcacactgtgcctccacagacacccccctcactcatcatctaggtactcctgctatctaatctcaagacgtagttcaggtcagttcaacaagcactcagtgagcccctgctatgtgctaggaaccacactaggcactggggaccctagggtgaggaggctcctgaattggcaaggagcgaacctccaggagagaaggattttctgaaaaggagtgtggtgtgggacagaacatgcatttactgccccttccctagctcaaggggaagctctctctccatttcttccgctttctgtctgctggctggttctaggcccccagcctcctgctctggtctccagagccctcttaaacctgaatacaagcatctcagcagcttgtatatcctgtttgtatttttccccttgaagggcaaaagctttttatgaactctcctcccaggagatgggaaaaagagtggaaaagacccaggccctgggctcttgacccctcccattttatcctttttttccccttttttaggaggggcaggcagaggaaaagcagtctcttttaaaagaaattccccctgcttctaagaacacccagaaatcctgccttttcaaggccttccactccagggcattcctgaccacccccatccagtgtggggatccccactgcaggacaccttacctccttgggtcttctccgcagctggctctctggaatggcccctctggcttgggttacctcccaagctgttagctcaaagccctagaggttactagacaaccaggtaccaccctccagtcgtagggaattatttgagtgacagctctgaagccgtatcttagtgctaaacctcggtagtgctgcagacacaccccctcaagtccctcacttcaagaaatgaatcaaggcatcagaggggcgcttactagttacaccctcagaaatcatctacttcatcccctcatttcacagaggaagggaccaagcctcagacagcagatgtgacttaactaaggtcacagagcagtcacgtagctggggttagactctatgtttttttttgagatggagtctcactctatcacccaggctggagtgcagtggcgccatctcggctcactgcaaccgctgcctcccgggctcaagtgatcaagtgattctcctgcctcagcctcctgaggagctgggattacaggtgcacgccaccacaaccagctcatttttgtatttttagtagagaaggggtttcaccatgttggccaggctggtctcgaactcctgacctcaagtgatctggctgccttggcatcccaaagtgctaggattacaggtgtgagccactgcacccggtcttttttttttttttttttttttgagacggaatcttgctgtgttgcctaggctggagtgcagtggtgcaatctcagctcactgcaacctctgcctcctgggttcaagccgttctcctgcctcagcctcctgagtagctgggattacaggtgcctgccatcacacctggctaatttttgtatttttgtatagactgggtttccccatgttggccaggctggtcttgaactcctgacctcaggtgatctgcctgcctctgcctcccaaagtgctaggattacaggcatgagccaccacgcccagccaactctaggttttttgattcaaggtgagtagcctagggtcccttccactacactgtgtgattgcaagttgttttttttgtttgtgtgtttgtttttgagacagaatcttgctctgtcatctaggctgaagtgcctagatgatcacagctcactgcagcctctacctcctgggctcaagcgatcttcccacctcagcctcccaagtagctgggaccacaggcatgtgccaccacacctggctaataataataataataataataataattattattattattattattattatagagatggggttttgatatgttgcccaggatggtctcaaactcctgagctcaaatgattctcctgccttggcttcccgaagtgttgggattacagactgcacccggcatgacctgtgatagcaagctttaatggggcttgagctgtcctggaagtgaaccctttctctctctctctctctctctctctctctcacacgcacacgcacgcgcacacacacacacacacacacacacactctctctctctctctctctctctctctctcttacatactgtgcttctgtgtggtggtttcacatttgggaacagggtgaaagattgatagtcaggaaaggcctggagatcagaagagactcccccaagactcctttttccaactccactgatctgtgacctacagtttctgcttaatgagaggacagcaggccccaggacgaagggaatataatgccccaactcaccaagggtggcctgcatcagaaagaaaatgtcctcattgcctagggaaaggcctcttttaagtaaagaggcctttgccagaaacaaaaattatgaagtgacggggctcacctgcgtttggcctgcagcctttgctaaatgcctgctatgtgcaggcatagtgctgggtgctacagatggtgctgtggcagagtgaaaaaatggcttctccctacccttctagattctttggctgggctacaaattaaattgacataagacagattagcaggagaaaaaccattttaattacagtcatgcttcgcttagcaacagggatatgttctgagaaatgcatcattaggtgattttgtcattgtgcaaacatcatagatggtgtttacttacacaaacttagatggtgtagcctactacacacccaggctctctggtatagcctattgcttctaggccacaaagctggacagcatgttactctcctgaatactgtcaccaaatgtcattcaatggtatttgtgtatctaaacatatctaaacaaagtaccctaagtatatggtataagagatttaagtggggtgcggtggctcacacctgtaatcccacaactttgggagactgaggtgggtggatcacttgaggccaggagttggaaaccagcctggccaacatggtgtaaccctgtctctactaaaaattagctgcacgtggtggcgcgcacctgtaatcccagctactcgggaggttgaggcaggagaattgcttgaacccatgaggcggaggttgcagggagctgagatcacaccactgcactccagcctgggtgacaaagggagaccctgtctcaaaaaaaaaaaaaaaaaaaaagggagatttaaaatggtacacctgcatagggcagtcaccatgaatggagcttgcagaactggaagttgctctgggcaagttagtgagtgagtggtgagtgaatgtgaaggcctaggacattactgttttttgtttatgtttttgttttttgagacagagtctctgtctgtcactcaggctggagtgcagtggtgaaatcacaactcactgcagccttgacctcccgggctcaagtaatcctcccaacttagcctcctgactagctgggactataggtgtgtgccaccatgcccagctaacttaaaaattttttttttgtagagacaggatctcgctatgttgcccaggctgaccttgaactcctgggctcaagtaatcctcctgcatcagcctccaaagtgctaggattacaggcatgagccaccacatccagcctaggacattactatacatgtatatatgactggcagcatggtaggtctgtttacaccagcatcaccacaaacatgtgagtgacgcgttgtactaaggtgttagggtggctacaacatcactaggtgataggaatattttaggtctattataatcttatggcatcaccattgtatatgcgatttgttgttgaccaaaacgttgttatgaggctcatgacatatgtgcatatacacaggagtcccgtaacacatgagactcaaagaaaagtcagacgattgacgtttatacagcatccccagctacagaaaggaataggggttggggcatctcgggggtggtgctgatccaagttattggagggtgaggggagcaagtgcatggtgaacagaggttgtccagctaggacaaacagaagttatctcagagcagccctcttcctgatacaggtactttactaatgtagatttcctttacagatataaatttcttttacgaaaggacaacttttcagcgctactcctgtgtctgcagtttctcagaataacctgctcaaaatatgccaaagaagtatattttgaggtggcatattctagtttcctacagtcatattttggggtggtgtgtcctgagtcccatgcccaaggcaggctaacccagctgtctgcagcttctgcagacagctgggcttttaaggtgctaccacagcctggtcagggccaaatatgcagctcagtttgtccttcactcagcaggcttcccttaagaagggaggatgatttagggagagggcagggactgaaactgttctcaccaaggctccaatgacctcccaattatccagtgatcatttctgaatcattttcttgtttgattcctttctgtacccaccacatccttgcactctcttttcacttggcttccataacgttctgtctcctggctctctctgtccttctctgaaaattccatttccatctcttttgctggaccctctgtctacctcttaaatgctaatgtcccccaacatgctgccctttgctattttctcttcttactttatatactcttctaagaacatttcactgactcctgtggttttaacaccactgacagactcataatttctaaatgtgtacctatagatgtaacttgtccaagggaaactcacatttccctaactctacccttccagcgttctcagtgttaatagtagaccaacaacccagtctctaaaccagaaaccgaggagccattcttgactccttctctggctctcaatctcagcctgttgattctacctttgaaatcctcctctagtataccctttgtactgcagtctcatgccttggaggtggtatagtatatagtggttaaaaactcaagcttggggccgggcgtggtggctcacgcctataaccccaacactttgggaggctgaggcgggcagatcacctgaggtcaggagtttgagaccagcctggccaacatggtgaaaccccatctctactagaaatataaaaaaattagccaggcgtggtagtgggcacctgtaatcgcagctacttgggagactgaggcaggagaattacttgaacccaggaggtggaagttgcagtgagccaaaatcgtgccaatgcactccagcctgggtagcagagtgagactttgtctcaaaaaaataaaaaataaaataaaaaataaggccaggcgcggtggctcatgcctgtaatcccagcactttgggaggctgaggtgggcagatcatgaggtcaggaggtcgagaccattctggctaacacggtgaaactccaactctactaaaaaatacaaaaaagaaaaattagctggggtagtggcaggcatctgtagtcccagctactcgagaggctgcggcaggagaatggcgtgaacctgggaggtggagcttgcagtgagccgagatcgcgccactgtactccagcctgggtgacagagcaagactccgtctcaaaaaaaaaaaaaaaagaactcaagcttggagtgcgactatctgcatttagctctagtctctaccagttattagctgtgtgacctttctaagtctcagtttctaatctgtattgtaaagattaaataagatagttattgtaagatcatgctaaatatagtacccatcctatagtaaacactataggtgtgttggtccataactctggtgtggaagaaattaatctctactcaacttctgtttcaagccctgattccactgggatgatggaaacaatgtgaacaagtctggggatttgccccctccttttccccagggtggagtctaagtagggggaggtatatgaggccaagatgaggctcatctggtcctcagccgtctattcacaaaggtgtccactgacaccttctttcttctcatctgcctggccctttcaagcccagggtccaagcagaagaggggagtaattcattcggatacttcctttctgtctaggtcaggaatttctgcaaagctgtctattgtctgcctggctaattatataactgttctttctcagggtcctgtacacctagggtcctttccaggaagcagagaatgggaccccagttgccaggagccaccaacatctagattctgtctcccccagctggtgagaggtaaggggaatccctcagatcttcaggggggcatccactcttcaaattacacttttcccagttttgtctcagcccctgagtctcctctgttcctctgaaggctctaggtatggatttctgttttctgttctttcacattctcctctcctacctgcccaagctataagcctaggctgcttggttgtttggatggagtgtggggaaagggtaaaaggagaaatacaagatggggaaacctatcagataatattttttcagcatagttgttggtgtcataattattttttattagttcaggctcttttttttttttttttttttttttttgagacggcgtctcactctgtcgcccaggctggagtgcagtggcacagtctcagctcactgcaacctctgcctcctgggttcaagcgattctcctgcctcagcctccggagtacctgggattacaggcataccccaccacgcctggctaatatttgtatttttactagagatggggtttcaccatgttggcctgtctggtcttgaactcctgacctcagttaatctgcccgcctccgcctcccaaagtgctgggattacaggtgtgaaccaccgtgcctggcctagttcaggctcttattatctctcttctgtgctactgcagtagccttccaactggtctctgcccctagcctcacccccttccaatcccctgctataagatggctctttttaaaggacaaatctggctctgacctatgtctaaagtgttccttggctggtgactgctcaccagaccccatgccagggccctagcatggtgcccaaggtgctactggacctggccctgtgcctccaggatcccttctggcctctccctggctgagctttgttctcctctaaaactgaaccaagtttaagttcccgaactcacctcctcgttcttgcacatgctgtctccactgactgcactgcctctcttcttcaatctgatgaattctctttcacttctcaacccaaatcagctgtcacttccaccaggacgtcttccctgtcattcgctgctcttattcacagcaatgaccccctccctctgtgcatcaccgacctctaatttatttgactatatgtctatcacttgtgccagaacagcaaactcttttagagcattcactgccctcatacatctctgcattcgcatcacctagcttagtgcatagcgccaagtaggcccacaagttagccggactcgggaacacataggaagcagagtaggggttaatgggaatactaggtggagatgacagaggcaatggcaggggcagcagctagaataagactgttaagcagaaaaggagcctggaaggaacaagacgaggaactgctgtaaggggagcggtactgccccggcctggggcgcctcttctcccagcacctgggcggcccggctccgcggccgggaactacaaatcccaggattctcagcggtgtggacgggaagtgtcctgtctggcggtgccgacggtgaggggcggtggcccaacggcgggagattcaaacctggaagaaggaggaacatggagaggagagcagcgggcccaggctgggcagcctgtgagtgcggagagggtcagagaagggtctcgcagtggtgccgctggtcgggggcttggctgtcccgggagagattggggcgtgtgtcgggcgtgaagcctgaggggcgagggcggtgggactgctcagtgggacgggaatcctcagcccgggcgccgtgggcccgagtggaactgtgagcggcgcattgtcccctgactaatgtgctgcgctttaaagcttacaaagaactttcttcctatttccaagttctggggttccggagtcgggagaatgtaggtgatcctaatggctccttgaaattcagcagttactgctggctaccaaacttgcccagcgatgccaccggacaagacgcctcaagggatctgggggactcttaggctttgagatgccgctttcagacaatgcctgtcaaacagggggtgaaattacccgggaagcttgtttgagatgcagattcctgggacctgtcccagagcttcagttccagaaggtctggtttggggcccataatctgcatttataacaagcactgctgtgcttcttccctcaccccaggtgattgtgaggaaggtagtccctgggccacattttcaaagacactgttttagagagagagactggagctggaaggatgggtggggcagaaaggttctatctgattttctgaatgaaaggaaaacctgctccttccaccactcccttcctttctattaggattcaaagagcaaagtccatgtccagtcttctgttaaaggaaaactagttccagacctgagaaggacaggaaaactgtttttcggttttttatttttttgagacagcatgtgtatgtacaaaatccctcccatcgcccacagtcctcagttcataactctgagatgatgtcattcacttactggtttattttccatgcttaacaaccaacacttgttccttgtacacccccttggaggaactgatggctttcctgtggttggccagtgttttcaaatctgtatttggaggggtgtgtgtgtgtgtgcacgcatgtgttttaatttacttaactgctcattcatataagctctgcccttccctgaatcattgcagaatatgcaatataaggaaataggataacaaccgggaatgacattaagtgctgagtcaaagacagattggctaagctctgccttttttcaagctctctgagtttattttcttactgtgtgtgtagctttctcttactctttctgtttgattttgtattgtgtttctaaggagaatagagagaggggagagaagggagaaggattaagggagactgtaactaaggcaaattatgattgctgtctcacttgagggattctctattcttgagttttggaatcagtactctgtattttatttagcttgaagattcttttcctcctcgggtgacctataccaaaaaggatagtgaagatacctttgtgatcttttaaaattttctttgtccttccacttaatcccaagtgagtggcatgtttccctctgttggactgcctttccctgtgttccgcctatttattccttaagatctagttcatagctagaatcctttgcttcctctgctgctcccatagattttatgcatgggctataatcatacttatcatgttagattaatttattcagatgtttttctcttctgataataatctttgggcgctgtggttcacgcctgtaatcccagcactttgggaggccaaggcgggaggatcacttgagcccaggagtccaagaccagcctgggcaacatggtgagaaccagtctcaacaaaaaacgcaagaattagccagacatggtggtgcgcacctgtggtcccagctatttggtggtgggggggctgaggtgggaagatcacctgagcccaggaggtcaaggctgcactactgcactccagcctgggtgacagagtgacaccctgtttcaaaaacaaaacaaacccaccaatatctctgttgtccaggatggagtgcagtggcacgatcatggctaaccgcagcctagacctcctgggctcaggtctaggcccagtagctgggagtacaggtttgcaccatcacaccaggctaatttgtgtattttttgtcaagacagggtctcaccatgttgcccaggctggtctcaaacttctgggctcaagcgatccacctacctcagcatccagaagtactgggattataggcatgagccaccatgcaggcctttatctctgcatttcttaagagtaggggtctgctagtccagtgcctggcataaaggaggtattgatgaatgaatgaatgagtgaatgatgaattctggttggttctattacctcacctctgagagagtaaccaacgaggatgacacaggtccagttcttggagaactcagtctaattagggataagaaaaggagttaagtttcaagccaaggaaggctctggatgtcccagctgggaggtactgagggaagttccatgagtagacttgaggaggaagaggacaggaagatggctacagaggaaagagaagtaatgcctccagcacaggaggaggctgcctattaaagggtatcctgggaagagaaggagggacacatgggagatgcttcaggtctctgagcagggttgcctaaacaagtctgttgagaagatgtttcggctgggcatggtggcagctcaagcctgtaatgccagcactttgggaggccaaggcgggcggatcacgaggtcaggagatcaagaccatcctggctaacatggtgaaaccctgtctctactaaaaaatataaaaaattagccaggcgtggtggcgggcgcctgtagtcccagctactcgggaggctgacgcaggagaatggcatgaacccgggaggcggagcttgcagtgagccaagattgggccactgcactccagcctgggcgtctcaaaaaaaaaaaaaaaaaaaaaaaaagacccttcagtgctaaggcacctctaatgctctcttcattgaccttatcccgtttaactcctcagatgaacgcctcacagctgaggagatggatgagcagaggcggcagaatgttgcctatcagtacctgtgccggctggaggaggccaagcggtgagcggagtccgggaagatggactctttctgctctccctttctaccaccccaccctaggcatctgccgctaaagcaaatgcaacagatcgagagtccatcctgtgggaaagggcgagttgaaatagctttttaatttttttttttgaagcaaatcccagtcacatccttttacccactatataccgcaatacgtatctccaaaatatgtggacgttcgcttatatagccacaatgccattataatatccaactaaattattttaaatccttggaagatcaatacccaagccattttcaaattttcctgcttgtcttaaaaaaaaaatctgtttttacagttatcttattcaaataaggatccaaaaagctcactaattacatctgcttgtatgtcttctttaatccagagcagcccatctccttttttcagttcgttatcttattgacttgctgaagaaaactgggtcatttttcctgaagtacatcctacattttgtctctatttcttttctttctttccttctgttttttagagatgggtgtctatttgctttcttgtgtcattcagcttattcctgtataccctgtatttcctataaatgaatgttggcttaattagatttgggttcaacatttttgacaagcaacatggcgaaaccccatctctacaaaaaatacaaatattagccaggcatggtggcgtgtgcccatagtcccagctacttggggggctgaggaaggaggattgcttgaacctgggaggtcgaggaggccgcagtgagccaagatggcaccactgcactccatcctggatgacaaagtgagactgtgtctccaaaaacaaacagaaaaacctggatgggcgctgtggctcacgcctgtaatcccagcactttgggaggccaaggcgggcagatcacctggggccaggagtttgagaccagcctggctgacatggtgaaatcctgtctctacaaaaaaatacaaaaattagctggtcgcagtggtgcatgcctgtaatcccagctactcaggaggctgaggcaggagaatcgcttgaacccaggaggcagatgttgcagtgagccaagatcatgccattgcactccagcctgggtgaaagagtgagactctgtctcaaaaaaaaacaaaaacaaaaagccatttttgacaagaagacttcattagtgttggtggttttttttcccccactcagatccttttaccccttatatactgcaatacatatatctaaaatatgtgatatttaacatatgtaagatacatgttccatatcacatcttatagaaagaatacaatgtctgcttgttccacttttagtgatgctaagttcaatctgggagtttaggtgaaaccaacctgatttacacatcataaaatttcccattaactttcatctaatgccttcattcattgttggtctacatcagaatttattattttatcaagggtgtaaaatgactattttctagttctgtcatttcttccatatttactagctgaaatcctaaagaacattccctcatcatcttaggactattcggttactctaaaagtcaatctgtacaggaaaagcaggatacgtacttaattctttgcttttaatcaacaggattcttttaatgttcttaaaggaagtcaggaggatggggcaatcaggaaaaatcaggtgtctaaggcagggaagacatggaacaatgtgtaactggctctctttttggaaacagatactttccaattagaccccaatatgtagggaagtttggagattccatctgagtagactttaatctctccctcatacaaccatcagtaataataatactttatattcaaagtgttttcacattcattagctcatttgatcctggcagctgcccactgaaggaaatacaggtggcattatcctcattttgcaaattgtgcaactgaggctcacagaggtgaagtagggaagatggttggaaagggggccttcggactccaagagctgtggtcgttctgtccctttgtgctgctccccttccaccagccccactactcttatcatcatcaaagctgggttatgagccatgtagatcattcaggcagacatgacctttctgcacccaggttctcagagaacaacccagaatgaaagaagtgagcacgttctattttgtttagcagtcaaagatgtaactagggccgggcgcggtggctcatgcctgtaatcccagcactttgggaggccaaggcgggcggatcacctgaggtcgggagtttgagaccagcctgaccaacatggagaaaccctatctctactaaaaatacaaaattagctgggcgtggtggggtgtgcctgtaatcccaactactcgggaggctgaaggcaggagaatcacttgaacctgggaggcggaggttgcagtgagccaagatcgcaccattgcactctagcctgggcaccaagagcaagacgccatttcaaaaaaaaaaaaagaaaaaaaaacatgtaactagactgagtgagaagctatgtaacagttaagcctcactgaagatgggcaggttcaggatctgtcaaggaagatttgttggggtgggtggggctgagggttggccagtccagatatttggggcaacctaggagaaggtgggaacagccaggcaatgggcagagaggggagttggaggtagagcaggaacaggaagcagaggagggtcaggggccacttaaaaggagggacagagggaagttcctgttgttagaataaatcactgtggtctgccagagtgcgtgagaaggtgctctcatgttcatagctggatggaggcctgcctgaaggaggagcttccttccccggtggagctggaggagagccttcggaatggagtgctgctggccaagctgggccactgttttgcaccctccgtggttccgttgaagaagatctacgatgtggagcagctgcggtaccaggtgggaggattggaccccaccttctaccttcgtcccctcaaactatgccttctcctcagagctgtgagggtagagtgaccatataacttattgtccaaatctggataaaagggagtgttattaatctatgtttctctgtcctggtagggatggaaaatccacaggatgtggtcctctggttcccctctgcccatctctcctgaatctttaagctgtagtctgggctttacccatagggagtgctgagaactgtggaaatagattttctttttccttccctttcaggcaactggcttacatttccgtcacacagacaacatcaacttttggctatctgcaatagcccacatcggtctgccttcggtaatactgggcctgaagattggtattcatctttactccttaccagccacctcccacaatcccatgctttatctccctggaccctttagccctatttccatgtgtcttctaaactaacttaatctaagagaacagttccttgcagctgtgtgtctttgaaccaggttatttttttctctgcctcctcttccctgtggatgaaaggaggtgaagtttccctggcctgagtggcacggttcccattatgcagggggtgggaggctgctatgtcatgctcgtattggccagccttgtctccaccaaatttcacagtgtgaagcaagggtatacacatccctaggtggcagactttgagttagaagcctaggtccaaaaccccaactggacacatgatttcactctttgaacctcaatttgttactcatctgtaaaatggggatagtgagccctgccctgtctaccttacagtgttgtcaggaagatcacatggtctgtgtgaactccctttgtgaattgtgaagagctatacaaatgaaggcatgataggattctacaatgtatggtttctttctgctttgtttttcttccctgtagaaaggcactataagacaggaaacagcagtaaagacacttcgatgggaggcagaagcaatagaggtcatgtgtcttcagtgggactggaacactctaggtctctaaatttggtcttttattgtgaatctaaatataaccaagatatattgaggttaggcctcattacagttgtcaggtggcattgagaagccatacctggtgccactcggttcttagaagggctctcattgatcagaagccgctggcttggagacagggataacagcctgacacttttgtggtccttggcaatatatgcttcattgggccctgcatgggagtaggccagctctccagcataccacatctctggcaagggtctaaggtgaggcatgcaggctcactatagacatctggaagacaactgggggcctggttttttgttgttgttgctgttattgtttttggaggatatggcttatatcctgtagccttgatggccttatctggtgtttggttaatccagggcaccctaggactatgtgtctgtggctgagccttggcttagtatgcatcctcagtgaatttcttttatactaggctgactagaaatggttgggggagactgacctagacaccccaggtaacaagggaacacacacctcaggttggagaggaagacccattcctcggcaccccctctccgcatttggtggtgcttaaaggttcccaatggcagtaactggctggtttctcctctagaccttcttcccagagaccacggacatctatgacaaaaagaacatgccccgggtagtctactgcatccatgctctcaggtgagagacctcaaattttatcatccaggttcctctaggtggatgcgaccaacaatcaacaacaacaaactcagcaagaaagaaggatgaagggtagaccacagggagcactgctcaggagagtgaggtttcagatttacagagttgtgtttagatttttgtgcatgtctgtgggcacatttatgtatggcctgtgtgggtgaaggggaagggcaggcagggtaccagagataggaaagtagcagggtagggccttcagtttgtaactgggtataaaggaatcagaacaggacctattgagagcaacacaggcaagacacttagtatggatggtgtaggctctttggtcctacttacagccagccatcagcaaccagttggctaaatcacagcaagtgaccgaccggttccttgtgtttaccatgccatctctttctgaccacttcccatgtccctttgtgcccctgtgccttagctcagcaggtatctgcttgctgcgcccttcctgtcctctctctccattgagtgacctgctactgcaatgtggccttctctgtgaagccttcctaatcccctcagacccccaacaccatcttatttaccttctgcagcactttccttgggctgatttatggtcatatttctttatgtgggttggggatgacttgagggcaggtgctgagtggtcttcatctctaggtccccatagtatccccttcaaacccatcgtgggcagagtgtcaaaatgaataggccccagtgccttccaatgccttccgttttttcctagtctcttcctcttccggctgggattggcccctcagatacatgatctatacgggaaagtgaaattcacaggtaagcccagctccttccctgaccaccacagcctgggcagggtcttgggggttctgggcctgatgaagggcacctgtggcatcattgcagctgaggaactcagcaacatggcgtccgaactggccaaatatggcctccagctgcctgccttcagcaagatcgggggcatcttggccaatgagctctcggtggatgaggctgcaggtaaggactaggctctgccctgccaggagtaggctcaatgcgtatgggagggctccaagcctcacagccattggatgggttctggccagctctcatccacagatagggccatcaggctacctggtttgtctggcccttgagggtgggaaaaaggatgacattagagtgggctgctactggttgcgctccaatctgggattcactctggcctcctgaccttgtttccatgccctctcccagtccatgcagctgttcttgccatcaatgaagcagtggagcgaggggtggtggaggacaccctggctgccttgcagaatcccagtgctcttctggagaatctccgagagcctctggcagccgtctaccaggagatgctggcccaggccaagatggagaaggcagccaatgccaggaaccatgtaaggagtagtcttgggttgcagggaccgaaaagttgagtggctggaaagtctcaagtgaaaccgggactcctatctgtcatgtctctagtatccaaaattgcttcttagagaaaccataatttatcagtgattttagagaaataggaaaggaacttggaagaatgatgagaattccgaagagaagactggagaagaggttcttgggggatgatcttcagggaagcctgagaggggtgctggaatgtagaacagaatgagattggactggaggttccaaaggttggtttggcttaattatgtcagtgccaagtgttttagaccccacaattcctgaattctgagcagactgaactttggccttgggaaggtccccagaagaagaaataagtgtagccaggcagggaagagcaggacaaggagattaaattgggtttcccaggttccctttcaatggagtttttgcaggatgacagagaaagccaggacatctatgaccactacctaactcaggctgaaatccagggcaatatcaaccatgtcaacggtaagagacctcgagcaggagtggtttgggggtgacctcagggtaagcccctgcactgggaggtttggggatagcttttctcaagccagaaagccctatggtctcatttgggccaactcttgcctcagggaaagatcagagtccaaggagtatgtgcactgctttctggccgtcggtgtctagagaagtagtccatgtccgggaagcttctgtctgactggagaaccatagagaggagcagctcttgatgccgggggggcagttggactggggtccttcgagaggggcaatgtggagaatacatgaggatggggggatctgggtaggagccgtgtgaaggctcaggatgggtgggcatttgcctatttgggtgaggatatccttggggtctggggcggcgaagtgagaaggctgtgaagaccaagctgaagaatttgggctgaaccaaatgggcccaggaaccaagggggaaagggtgggggtaattccgggcaggcaagaagagggcagattcctagggctggactaggggattatgagaggtggctttctcacactgtccattatggagtcattttttttcagtccatggggctctagaagttgttgatgatgccctggaaagacagagccctgaagccttgctcaaggcccttcaagaccctgccctggccctgcgaggggtgaggagagactttgctgactggtacctggagcagctgaactcagacagagagcagaaggcacaggttagcctctgtctattacctgccaccccctgtatgtgactataggataggagagggcctcttactcaaagatcaccactgttggtcctttgtattctgtaagtgctgactacgtgtttaaatggttaaatcaccccaaggcctagtagaccagactgatcagcttctgtccctgagagtcccccaggctgaccaagaggaacccaaggacagtcccataggcagtaatgtgctcccccattgttgaactggtgcctccacttagcaatcttgtttttaaagtagttgacttttcccctgacacattcgtgttgtctatgttgttattttagatgcttgctgagcaagaaagattaaagatgagttaatagggtgggcactgtggctcacgcctgtaatcccagcactttgggaggctgatgtgggtggatcacttgaggtcaggagtttgagaccagcctggccaatatagtgaaaccctgtctctactaaaaatacaaaaattagctggtgtggtggcacacgcttgtaatcccagctacttggaaggcttcggcagagaatcgcttgaacccgggaggcagaggttgccgtgagccgagattgtgccactgcactccagcctgggagacagagcaagactccatcttaaaaaaaaaaaaacggttaatagggatgagtgagccagcctaacggagagaggtaggattgagggtaggtggctgggtagacctgggagctcatgctggcaactcgtaaagcatggtcatggccccggaaggactccattctactgtatctcttccctctcttaggagctgggcctggtggagcttctggaaaaggaggaagtccaggctggtgtggctgcagccaacacaaagggtgatcaggaacaagccagtaagtcatctgcaggtctgaggcctgctctgtgcgtatctctgactcttagaagagtatcccacctctttgctggcttctgtattgggcagtacacactgctgctgtttccagcctggctaggaacttctcccctcacataatctgctttattcctgctgcctggggggacactacagataagttcattaaggccttagagataatgacatgccaatactgcactgggctgttctcctggggcaggcagttttcttccaggcagtttgcctgtaattttgacagtttcaacctgcttgaattcctttggcttcagaaatgtagtaattttccagaatatgagcaaaaaactcatcttctcagtttcccttaaaaacattatatacaaatgtaattcttttttgtttgtttttgtttttgtttgagacagaggctcactctgttgcccaggctggagtgcagtggcacaatctcggctcactgcaacctccacctcctgggttcaaatgattctcttgcctcagccccccgagtagctgggttgacaggcacctgccaccatggcagactaattttggtatttttagtagaggtagggttcttcgtgttggccaggtgggtctcaaactcctggcctcaagtgatctgcctaccttggcctcccaaagtgctggggattacaggtatgagtcactgtgaccggccacaaatataattatttattacaagaatgtgagttagtaattgtcttcctccaagagatctatctgcactgcaagtatgaagagaaacagtgctgaggcaaaatgcagtagcctgtggacactaggcctgttacagttgcttgccttagtctggacttgctgtcaggtttagaggttgctcagtaaccatttacctttgtctaacagagctttccgacattcactagctttcagtagcccccgggccactcctgactggctgctttcctaatccactcagttcattcccgattgctgctgccagagtaatctctgaagcacagatctgatcttatctcccttgttgaacatcttcagaccttcatgggttcttccattatttagcccacactttagtcctatctccttgtcctggcagataagacctttccagagttcatccccagctcttctgttcacattccatccaattcagccgagcaaacaatctattctccctagattgccctccagcctttcccatcaccgggcttctggtcctgtgggttacatttctcccacattctcacctgttgatgagcgggtgaaaacattctccagagctgtctccaaggcttcctcctctgtgaagtcttctgctctctcccaggcagaatccctcctcccctgctctgccatagcattgtgtgggggtggcgggaggtggacttctaacatgacattgacagcagtgcactgtaggtactttggtatccttagttcttcccagtagattgtgctctccttgatgtcagtgcccgtatctgctaagcattttgtaagccacagagtttgtaaactcagactacattgaggcaccacagccccttttaagcttactactgccctttgcagcaaacggctccaccttggagctggttccttattcctctgtgctgtcatcaagccttggtccctagagccccctgactaacctcatcttagttacgttccatagccacctgtcaatcttgtgctcaccaccttaggaactcaccctctgccatgacagccactctgtgttacatgctgagctactcaatttctaggcctgacaaattgcttcttacagagcctcttgttaaagcaacccagccccttttcttcctgaacacttagaaatgcattttaaacctagcagatttttgagagcagttggaaagccatttccccaccaagatcccccggcggagcctagttggtgaggagagtggagatgccactgaatgcccggccagtacaacctgttgctctcctgccttgcagtgctccacgctgtgcagcggatcaacaaagccatccggaggggagtggcggctgacactgtgaaggagctgatgtgccctgaggcccagctgcctccactgtaccctgttgcatcgtctatgtaccagctggagctggcagtgctccagcagcagcagggggtaagccccagaaatgtgggtctagctctgcagtctccatgcagctggagggatcaggacaggcagcccaggccaccctcttgtgagtgcaatatgagatgctggcacgagattaggatggggaaagagctaccatccctgccttactgagcgtattttaatagccaataccttgagcaaacactgctttacatactcatttaatccttaaaaggaccctatgagggaggcattctattttagagatggggaaactgagatgcagagttaagtcacttgcccaacacagctgtgagtgccagtgctgggagtggatgcagaagcccatgctttgaagcacttcactgtcccacctcatcccaatccatacttcttctctgacagtgaaacgacagggccctcacttagggactttcagtctgttggaggagttagaatacacctgaaggtccaaatagagacacacagggagagaagagcagatgacataagtggaagaagtcttcagaccaaggaaatggaggaagcagagccgggaagtcttcctggaagagaatcaatagagaactacacccacagcaggtgtttatagagcatctactcccagcatgacttggatacaggcacagccctcaggaaaggcacagtctcaacataggaatgactatgtacaaggaagcataaaataagtactaagaagtaaagcattgtgactaaagttgtggacttttgagccaggctgcgtgagttcaaatctggctctgctacttcttagctatgtgacattgggcaagttaattactttctctgctgctcaatttctttgaatataaaatgggaacaataatatatttacctcaggctataggattaaataagggaacatatttgcttagagaagaacctaagagaagaaagtaagaaccttagagaagaaagtaaactttagctattaatattattgttgttgatattcacaacattatgttaggagaaaataggaagggggctgggtgtgggggttcatgcctataatcccagcactttgggaggtccaggcaggcagatcacttgaggccaggagtttgagaccagcctggccaacatggcgaaaccccatctctactgaaaatacaaaaattagccaggtgtggtggtggcacatgcctgaaatcccagctactccagaggctgaggctcagagatcacttgaacccgggagagccaagattgtgccactgcactccagcctgggccacagagcgagactctatctcaaaaaaacagagaagaaaataggaagggtgctctagacaaagggcacggcataagcagatgtttgaaaagcagaagaaggacagggcagggaaatggggccggagcttcttgggtgtgcggtgcagtgcagtgtggaggcgaccactccatcttcatctctgtatacccagggcctagtgcagttcaatttttttttttattttaagacggtctggctctgtcacccaggctagagtgcagtggcatgatctcagctcattgcaacctccacctgggtttaagcgatcctcctgcctcagtctcctgagtagctgggatgacaggtacgcaccaccatgctcagctaatttttgtatttttagtagagacaggattttgccatgttggccaagctggtctcaaactcctgagctcaagcgatctgtccaccttggcctccaaagtgctaggattacaggtgtgagccactgcacccggctaatacagttcttgatatgcagtagggaccaatgggagctggtagagcttacttgttaagtgtgggctttgaaatcagacagctagttttgacttacattattggtcgtgggctcatccatgaaatggggatgttaatggtactatggttctattgtcggcttattatgaaaattaaatgataatgtgtgtgaagtacttataattgagcacatagtaagtattctcaggtgttttgtatgatgattattagtgagtgaatcaggccactggggttttgggatagagactctgggatattcaagaaccttgggggcaggatggtgaataggcctttagacccttcacatgcccacttgggaattggccctcccacccattgtaggagcttggccaggaggagctcttcgtggctgtggagatgctctcagctgtggtcctgattaaccgggccctggaggcccgggatgccagtggcttctggagcagcctggtgaaccctgccacaggcctggctgaggtggaaggagaaaatgcccagcggtgagaaaggcttagccacacattgggagtgagggatgggggaatgcagccaagactcagcactcttctgttggagacttgccttgtgtacgatgtcccattcttgggcccaggcccaccctctgggtctgttcacagttccttggcctgtgtttcttcctgggagtggatgggatcacagtcattccttttttcttcattgattcattctttcctagcagatgtttgagtactgacccatgtgccagatattactctaggtgctgggaaacagcagtgaacaaaacactttctgctcttgtcaaacttacatgctagtaaagggagacagatgatgagaaaagaagatgaggtggctgggtgcagtggctcacgcctgtaatcccagcactttgggaggccaaggcgggaggatcacttgacgtcgggagtttgggaccagcctaaccaatgtagagaaaccccatctctactaaaaatacaaaattagccgggcgtggtggcacatgcctgtaatcctagctactctgggagctaaggcaggagaatgacttgaacctgggaggtggaggttgtgttgagccgagatcgcaccattgcactccagcctgggcaacaagagcgaaactccatctcaaaaaaaaaaaaaaaaagaaagaaagaaaagaaaagaagaaaagacatagagaaaaataaaatagggcaaagtgggtaatgggtagagacatagtagggacagtttttctgttttacataatgtagatctctttgctgaggaggtcattttgaaagagacctaaagggcataaatgattgccatgaggctatctggggcagaggccttaagaaagcaatgtgcatggtgtgttcaaagaacatcaggaagccagtgtggtggagtgaagtaaggaagaaagaggagtgggagatgaagaccaagtagccgaggccagaccacgtaggactctggtttttactctgagtgaggaaggaagccacgggagggttttgagccgggagggagttgatctgacctacttcttttttttttatttttagagacagggtcttgctctgccacccaggctggagtgcagtggtgcaatcacagctcagggtctggttctgtcacccaggctggagtgcagtgatgcaatcacagctcagggccttgctctgtcacccaggctggagtgcagtggtgcaatcatggctcactgcatccctgaactcctgggctcaagtgatcctcccaactcagcctcccaagtagctaggactacaggcacatgccaccatgcctggctaattttttaattttttgtagagataggatctctgtacgttgcccaggctggtcttgaactcctgggctcaaactatcctcccatcttggcctcccaaagtgttggaattacaggcatgagccaccgtgcccagcgatctgatctacttaatgggatctttctggctgctgtgctgagaattgactgcaggagtacaaggggaaagcagggagacctgttagacagctattggagtaatccaggcaagagatgatgggggcttggccttgggcggtagtggagatgggaaaaaggagtcagattttggatacattttgaaagcaaactgacaggatttggtcatataatagatatggggtagaagagagaacagaattaggtatgactccaagatttggggcaagacgggagagacggtgggacatgcaggttaagcaggggaaccagttcagatgtgagctgttgggtttgaggtgcttgttagacattcacttggaaatcacaaggagctggctgggataaatgaatgggctggaggtgtgctttcgggagcatatggtgttaaagtcatgagattgggtgagatcatctacaatgtaagtatggagagagaagaggtctgaagactgaagattgggatgctcccatgtttagatgtcagggaggaaccagcagaggtgtctcagaaagaatagcctgtgaggcaagaagagaactaaaagagtgtggtgtcctggaggtcaagtgaagaaaatcgttcaactgtttcccctgacttctggctgatgattcacatgctactcacctctctgcccttcaccccactgccagttacttcgatgccctgctgaaattgcgacaggagcgtgggatgggtgaggacttcctgagctggaatgacctgcaggccaccgtgagccaggtcaatgcacagacccaggaagagactgaccgtaagtatagtctggagctgggtggagatggcccaacttaggcagtcctgtcccttagccattaagtctaggggccccctgcccacctagatctctctttcttaggggtccttgcagtcagcctcatcaatgaggctctggacaaaggcagccctgagaagactctgtctgccctactgcttcctgcagctggcctagatgatgtcagcctccctgtcgcccctcggtaccatctcctccttgtggcagccaaaaggcagaaggcccaggtgaagttagggctggttgggttggtcatcagagcaggaagaacattctctgtgggttgcactgtacccagtctggcagagctctattctgatggacacaatggcttctgggtgggggtgaggggggtgttccaatctggtaaagaaggatggccctgttgccagggcagtgggcagtccatgggaaaagcacaggcctgggagccagagaaacaggctggatttcccactctgacccttagtgaccatgtgaccttgagcaaatcccttgatatctctgagctctatttactcatctgtaaagtactgcctacgctggtcctacccagctcccagaatgagggtgaaaatcaaatgaattgacaaatggggcagggttctgaacctgaaacaccctgagtatgttgcagtagagagtggttgagagctcagactcctgggccagactactggagcctacatcctggcggcctgaccctgcacgtgttacttaacctctctgtgcctctgtttcatcacctagaagcttgtggcagtaaagagtgtatctcatagttatggggtgtaagtgagataatatgacagtagtactggctaacatttattgagtccttactctgtgccaagcatcattttatgtgctttacaagtattaatgcataagaaagtgctttagaatactgcctggcacatagtcagtactcaataaaatgttagtttacaaagtctattattattgaggagagttgggaaggagtagaatctggggttgtgtgaggcaaggaagggttcaagcctttatcagtctgacagtgtggcaggcataggcttacttgacctgtgggctcatgtaatcttcccactaccttgtcgggtagaggagtgtggagcaagaaaaggaaagagaaggtaagggtcagggtcaggattggcctgagaaggtgtgcaatgaggcataggggagtggggcgtgggggcaggtagttggagcctccagcgtaggctatccctggacatggctgaggcataagagcagggaattgagctgttgagaaggtggtggatgctgagggtttgaggagctatgcagagcctctgtggttctggaggtgctgtggccaagccgagtagacctgaaagcccaataggataagagagccttctgagcctggccgcgtcccagggaaccacatgccacacatgcccacacacagggcagagagctgagtggagatcactgtccctgtggctcccaatgcctgcctgcagtttggttcccttgggcatcttggcctgggaacctagagagactagcttggggtctcatcttttttttctccctcaatctgccaggtgacaggggatcctggagctgtgctgtggcttgaggagatccgccagggagtggtcagagccaaccaggacactaatacagctcagagaagtaaatggactggttgggggaccctgggaggggagggatggtgatgtgggctcagcagcagcccagataatcaggcagcctccctggtcaccaccctctcccttcaacctctgtggggaggcaggccagagtcagagcaggagggctgctgttcagactgcaggatggatttcctggcagtcagcagggcaggacattctcaggaggtgagaatccatagttcacctgctgcctccctctatgccttcctgtgaacactttccctgtaatgtgggcatgtgagatcatgcggtagtcagaaatcccatttctgctggtagcttgagtttgggttccaacagtcaatcagctctggctagaaaatgtttagacttggaatgagagaagaggaattggcaggagtttgaggaaaacaggcagactcagtgcaaatagacaggggtgtgctgatgtttggtgctggtggtgttagttctcagtggctggggtctccctgtccatctgtctgtctgctagtgagtggaaggcagatgctacagcagccattcccacctcttaggctctcttctaagaaactgtcccagggtcctctgcccatatcctgcataaagtgcttcttttttaagacagggtcttactctgtcacccaggctagagggcagtgtactgtgatctccattcactgcaacctctgaagcaatcctcccacctcggattcctgagtagctgggaggacaggcatgcgctaccatacctggctaattttttttttcttttttttttttttttgagacagagtgttgctctgtcaccaaggctggagtgcagtggtataatcttggctcactgcaacctctacctcccaggttcaagcgattcttgggcctcagcctcccgagtagttgggattataggcgcccaccaccacagctggctaatttttgtattattagtaggcacatataatacatataattcaccatattggccaggctggtctcaaactcctgacctcaggtgatctgcccgcctaagcctcccaaagagctgggattacaggcgtgagccacagtgcctggccaatttttgtatttttttatagagatggggtttcgccatgttggccaggctagtctcaaactcctgggctcaagtgatctgcctgcctcagcctcccaaagtgttgggattacaggcaggagccactgctctgggcctttatgcttctgttcaagctgattttccttttatcaagccccaactcagcctagccccacgctgcctccctcaggagtgcttcattgactgctgctgcctttccctccaagcacagttgcatgctgctgcttttcatgcatgtgtctctgtccatcctgggatgttcccgtctactccttcagaagggtgattttgtgtcctctttcatggaatctgtccctagtggactggccaaggcccatgggagggactcgggggaaggattgactgctctctcctgatgcccctgtcagtggctcttggtgtggctgccatcaatcaagccatcaaggagggcaaggcagcccagactgagcgggtgttgaggaaccccgcagtggcccttcgaggggtagttcccgactgtgccaacggctaccagcgagccctggaaagtgccatggcaaagaaacagcgtccaggtaatggccccaacctgaccctcctcttcgctgcctgccccagccaccccttgcctgctctgaaccttttctgcttgcttggtttctgcttagcagacacagctttctgggttcaacatgacatgaaggatggcactgcctactacttccatctgcagaccttccaggggatctgggagcaacctcctggctgccccctcaacacctctcacctgacccgggaggagatccaggttggcagagcccctgcaagggtaggggatcttggataggaatgtcctgaagaagaggctcccactccccaaaagaccacagcgtctctctcctgcctccacagtcagctgtcaccaaggtcactgctgcctatgaccgccaacagctctggaaagccaacgtcggctttgttatccagctccaggcccgcctccgtggcttcctagttcggcagaagtttgctgagcattcccactttctgaggacctggctcccagcagtcatcaagatccaggtggcaggctctggctttctcagtcttcagggcctgggcttatctgggctccagggtatccacgctgcttcctttttactgacatgggaatgacctttcggcctctgaatagtagtggttaaaagcataggttctggagccagaccatgtatgtttgaatcccagctctaccacctcttagctgtgtgaccctggcaagttacttaccctctctccctcagtttcctcactggtccctcagtcttttcatctgaaaatggggataacgatagcacctaccttatagagttgttatgaggattaagttaggtaatatctcaagtgtttataaattgtgcctgggaggtaggtaagaacatgttagaagttaccatgctatttatatcattatcgtcactatccagagagtgagagctgcttcttagcttccccaagggaagagtgaaataagatttagctgggcgcagtggctcatgcctgtgattccagccactcagaaggctgaggtgggaggattgcatgacagggtctcactctgtcacccaggctagagggcagtgtactggctgaaatgagctataatgacaccactgcactccagcatgggcaacagagcgagaccctgtctctaaaaatgtgtgtgtgtctgtgtgtgtgtgtgtgtgtgtgtgtgtgtgtgtctgtgtgtctgtgtctgtgtgtctgtgtgtttagtaagacatcaaggctaggacactaggagggctcgaagaagtggtggtggttaaacagaaaaggggtggaatatcctttaggaagagaatagccttctacctttcctctcctaccagcccttcccatttttattcttccaacccgtggatggtccagtgtggcctctgagactgacccataagtaattgagacatgaggctggtagggaagatagccagagacactgtgcaagcaagccaggaatgatggcaattgagcagataccttcccaggcagatgtgatctggagggcctcgtggaggtgctggcaatgtaagatgctttcacaaacttctttgaatgccaagagcatgccacttggcactaagcaagggtgggagatgggtgcaaggcccacgggtgagtaatcacttctctcccctcacagaaattggagtacacttgatgtcagacattgtgataggagggacatgaagacaacaccagaggacaccaagggagacagatgtgcagatcaggactggcaaatggcccttgattatgactgagggtgttggggggtaattgagagctcaggctttggggtcagaaggtagagtttgcctcctggtcctaccacttctgggtcatatgacattgggcaccttacttatgccctctctagcactcggtttcctcattcataatgatggtactcacctcatatgttgattaggaggattcagtaggaaaattacatgtagcacttagcatggtaagtgctccgttgatgggagccattatgagattttgttttcagggcattggtcccagaactcaatacagaactttagtgatctgtatttagtggtctgaatcatagggatttctccctcctgagcccagtctggaatttcacactaaggcgatgaaaaaccacaccaacagtgggagagaagatggagtcagagggaacatttgtcactagtaccaaagctgtgtgggctctggcctgggtcctgggagacagagaaagagaggggtagcccagagccttgagcctcttgcccggggaaaggaaaatccaaaatgaggcttcctgggtgtgctgagactttatctcctgaaagctctgaccctggccagaaccccatccaggatcctgaattctgaccaattcagaggccttaaggagcctggtggaggttgggtagtgagtaagagcagagagcagaccactctgccttttcccacagcaactttccagtcagtacctggaggaggaaaggaaagagtcctgagggcaggcttggaaatgggccttcctgacctctaggctccaacatggacagctggcatcatggaccaagctatcctcttttacatcctatcccaacagaggggccgtgtaagccttgagggaaagctggcagaactggctttaggaagggctaagggcaactgaatgaaaggagttgctcccaagtcttaccaaactgagacaatgtcagtggtagagtatctcccagggcctgtgcactgggagatgctggacatggggcctaaaagacaggaagggccaagcatggtggctcacgcctgtaacctcagaactttgggaggccgaggtgggaggattgcttgagccgaggagttcaagactggcctgagcaatatagtaagaccccatctctacaaaacataaaaaagtaatcaggcatggtgacacacacctgtgattccagctacttaggaggctgaggcaggaggatcacttgagcccaggaggttgacgctgcagtgagccatgacagcaccactgcactccaacctgggtgacagagaaagaccctgtctcaaaaaaaaaaaaaaaagacaggaagtatttcagtgggaacaaaggtgagtataaaaggttcagggacagaaaaccataaggcatgtttacaagaaagtgaaaagtctgatgcatctaggatccttaagaaggtggggaccagtggcaagtcaaatagggagtgttgggtcagatggttgagaacttctggaaacaggctgggatagtctatagtctaagaggtactttaggaaaattaatcccacacaagcttggagggaaagggaaaagtctcctaggaaggagactggattggaagagggccttgagattttagagaccaaaggaggcatgatttgtgcagacgtcggttgggccctttgcagcagatcagctaggggagaggccatcagcctgacagctgagttactggggaccttggtgggaagatttgctgagaactagggtcaggagctggattgtgttttaaagagaatgtgagttatgagagcattagtgacctgctgcccaggtggccgcgggcagagatggtgagcacacggctctgtgcctgtacacacttctcatccacacaactgcatgcatttccagactgctctctgcccactttctgtgcacatgagggagggtggagtgtgtgatagtgtgtgggtggtctgcatatgggtgtatgagtatattttaggctgatatggtacatactttggtgaagttgatgagtaggtgtatgctttattatcttttaggactgtatcttatagttgagtttctgtgaagaggtgttggttagaggtgtgtgggtgtgggtatgtgggtgtttgttctgggaccagggagtatggcagagggcattgttggctatgtgaagccatttggtcttccccatgaagttggaagttctttgagaacagggccactttccccttccccctctatttaactgcccccttccattccctggagggcccaggacaaagattttcttaaaagcctttctggccaaaggagacctgcttgagttacttccctttctctcctgatgtgcaggctcattggcggggttataggcagcggaagatttacctggagtggttgcagtattttaaagcaaacctggatgccataatcaaggtagctacggtggttttggcaggctcctttctctcaaaggaccgtctgagaacaatcttgtagtcttgtcaccttcttgtgacctctagatttagctgaattggcctgagactgagtgagggtgggccccaagctggagctgaggcagtgtgtttcttctcccagatccaggcctgggcccggatgtgggcagctcggaggcaatacctgaggcgtctgcactacttccagaagaatgtgagtgtcaccttgttccccctgcccacatacccaacctttgcccatgagactagagcaaggacagccagcaacccttttccaatctgtgtttgtggcaggttaactccattgtgaagatccaggcatttttccgagccaggaaagcccaagatgactacaggatattaggtgagctgcctgatccaccctccccagctgttgggagggagaggaccccacagagccaggcaggtctagacatccttctgcgactgcacagcaggtaaggggaaggtagtcacaagttgtctgtgcaggagcatggaacaggagttgtaacaaaagcccccctgctcatcccaatcacagatagccttgtcacgtgaaagttcttctaaccaggctctttttggaacaggcttagattatctgcctattgctaccaccaaagcagaaagaaaaggatcttgcttcttttcttagggttcaaccttctcctctccagtcctctgtggcccagcacaaacaaggcctggtgaggcacacagagtacatctattccgtggtgtggagaatgtgagaagcacccaagggagtgccatcttcctgctccatattccccattagttgggtgctcatttaaagctttaaagagatcctttctggctcttgttcttcaagttcagaagcccagcaaatggcatccccttcctttttgtgaaattgacaagtagtccatttctacattcacctctagcccctgggttcctgaagcagtaggcccctttccttcctggccttgaggctgcactcttgggcttctggtgagatgtcctgttcaggaatcctctccttcacctcctcagtccttcttcgcccctgtcctgcccacaggggctttgcctgtcccttctctggccatgcacactcaggccatctgcttcctgtcaacaagcttctttctctccttccctatccccagcctagcccattctattttgtctctgtggttacactaacaccattgtcctggccattctttatcttctttttcttctcttcagtttatggtttttctggaagaacttgtttttccctagtgctgtctcctgacttcactggcccccagactttactcagagctctaccatttactagctgtgtggcccttggcaagttacttaacttcctttttttttttaattgattatttatttatttgtttatttaggacagagtctcgctctgtcaccctggctggagtgcagtggcatgatcacggctcactgcagcctcaaccttccaggctcaagcgatcctcccatctcagcctcctgagtagctgggactggaggcgtacaccaccacaactggctaactttttgattttttgtagagatgggggtctccccattttgcccagactggtctcaaactcctgggctcaagtgatccactcaccttggctgcccaaagttctgggattacagtcatgaaccaccacacccagccaattaacttccttcttgcccacttttctcctttataaactggacataatgctaatacctatcttgtagggttgttttgaggagttaatatgctgtatttcatcgaatccaagatgccatgaattgtcttggcctctacccttcttcactcctcaaagatttgtccccaggccgggcctggtggctcacacctgtaatcccagcactttgggaggctgaggcaggagaatcacctgaggtcaggagtttaagaccagcgtggccaacatggtgaaaccctgtctctactaaagatacaaaaattagccagacatggtgacaggtacctgtaatcccagctacttgggaggctgaggcaggacaatctcttgagcccaggaagcagaggttgcaagtcgctgagatcatgccactgaattccaacctggacaacagagcgagactctgtctaaaaataaaaataaaaaaagatttgttcccctactgtagccagattaatccattaaacctgtacatgtgatcatgtcactcacctccttaagacttatcatgatgccctgttgccttgaggataaagtccaacctcctaatcacagctttggggctttttgtgatccagcctttccctacacctctaacttcactgacctgcccctcaccacctacaccttctgcactgtgttccagatacagtggacttccagcactccccacattcaccctctctgcctccttttcaccgacatctggggtgtctcacctcctccttgcagtgtctcttcactccccaggtggggttgggcaacccacttttgttttcccaaagatccccatgcttgctcctctcaaagtgctaactacactgcagtgaattgtggtttatttgtctagttcccctactagactgcctttagggacagggactagttttattcatcttccaaatctgactccttcatttattactaactgtgtaacatagggcaagttgcttaccttctctgagtctcagagttattatcggtaagagaggatagttatagtgtactgacctcacaggtggtcttaagtacgtaaagtacttagaacaggttctgtctcatagtaaacattctatgtattagttgttttgttgttatttccaataaattagctcagaggcttctttcttttttgctcaaatgccaattccaaaggtgattcaaggagaatcaccagctagctctgacctcccctaaattataaagcccactgtccatcccgtctacctgtccttcccggtgtgtacagacattcctgacagaggagcactgtgggagcaagcagggctgagtggtggctggcaggtaggaggaggaggaggagcaggttggcccagcagaagtgagtggtagattggggtagactagggaggtctgggaggataatcagagggagctgtggctctggctttggtgtcagaggtccctgggatagacccaggctggggtgaatcagaggcatgggaagagcagctattatgtcatctccagttataagacaggaagctcagggacaggcctggctagaaggctacccactgccctccaagtgcaagcagaaccagttagaagaggactggggttggggacctgctgatcccaagcagaacggggactggggtgggctgactcgggcaggggctggtgaggaggcctctgatgaggcatggctaatcctgatgcctcctcccttcctcccagtgcatgcaccccaccctcctctcagtgtggtacgcagatttgcccatctcttgaatcaaagccagcaagacttcttggctgaggcagagctgctgaagctccaggaagaggtagttaggaagatccgatccaatcagcagctggagcaggacctcaacatcatggacatcaagattggcctgctggtgaagaaccggatcactctgcaggtatggggcccaccagtcctcccctccccgagatctgcctgcctctggagatgtgatgctgaccattctctgcttgctaatcaatttttttcaaaatgttgtggattttgtcacctgactcaggtccttgttccagtggccctctgccattctaataaatcattttgggggacccatgacagagtagaaagagcatgaaacctagaatcagaatgcctggctctgctgattcccagggatggggctgtgggtgctcatttcacttctaagtctgttttctcattagcaaactgagaataatgagaatgtccacctctccaggccaaatatagagacagatatgaaagctgtttaaatcataaattaccatataaatatgcagtgacagggtaatagtgatatagtgatagctccacctcaaatgtgtgtagcagtctaataagaagagatagcaaaagccaaatagacacaattcctcagcctggcaaaccagttctctttggggactcactcccatgacaggagaggaaacagatggagtctcagggcacttggaggggcccttcctcaccctagaactgcttctgtcccccagcttatgcctgttccttgaacagcagaaagccctggctcttcaaggcactgattctagaccgtatgttctgtgccctgggatggcctaggctagttgtatcacccgctcctccacccctgcaggaagtggtctcccactgcaagaagctgaccaagaggaataaggaacagctgtcagatatgatggttctggacaagcagaagggtttaaagtcgctgagcaaagagaaacggcagaaactagaagcataccaacacctcttctacctgctccaggttagcagaggactttccaaggagaagtctctcccgtctcctgagggtctgagacttcaaggccttcttgtctgtgcctttggcaccatgcaaggtgtcctttcccataatcttaattccttatccccaggaaaggagactacctcttcccctgtttgtctggaatgttactagcacctggagaaagtgtggtagtgctttctccattccagatttccatcaggggaaagcctttccttatcctatcactggtccttgaagtgcatggtcagccattcctgtctcccctcttgcttgcagactcagcccatctacctggccaagctgatctttcagatgccacagaacaaaaccaccaagttcatggaggcagtgattttcagcctgtacaactatgcctccagccgccgagaggcctatctcctgctccagctgttcaagacagcactccaggaggaaatcaagtaggctctccagacacaaaggaatggggagagaatgggttaagagatccccctgttggctccttcacaaggtgacaacttgttgaggcctaagggtagaaatggaatcagaagacctcttttctctacctcctgtggagaaaccgtaaaacatctgggacagcacagtgggaggatatgggctgacatgctaacacaaaggatgagagagatatcaagacattccttaagagcggggacaccagggcaggctttgagagccaaaatctcaaaaaggaaaagcaacggtatgtcctacacagaggcagaagactggtttcaatgacctcttaaaccacaggtcaaaggtggagcagccccaggacgtggtgacaggcaacccaacagtggtgaggctggtggtgagattctaccgtaatgggcggggacagagtgccctgcaggagattctgggcaaggttatccaggatgtgctagaagacaaagtgctcagcgtccacacagaccctgtccacctctataagaactggatcaaccagactgaggcccagacagggcagcgcaggtgagcacatgggcagagggaggagctctctttgatcagctgtgtcttgatcagctgtgtcttggaccctactggggaagcttgggtgtactttgaaggtggcatataaatgggcatgctgatctatgcaaatatgacaccagctttgtaggcatgaataaggtagtcttttagaccccctctgataattaacatgaaactgatgtaaatgacttcagacctggtgggcttaacataaaatgagtacagatgaatatgcaaatgtgcttaattgctatgtcagtgcttgcaaatgatgtgtcaaatttggtggtagtagggccggacatagtggctcacgcctgtaatcccagcactttggggggctcaaggtgggcagatcacctgaggtcaggagtttgagaccagcctggccaacatggtgaaactctatctctactaaaaatgtaggtcaggcgtggtggctcacgcctgtaatcccagcactttgggagaccgaggcaggcggatcacgaggtcaggagatcgagactatcctggctaacatggtgaaaccccatctctactaaaaatacaaaaaattagccgggcgtggtggcaggcacctgtagtcctagctactcgggaggctgaagcaggagaatgtcatgaatctgggaggcagagcttgcagtgagccgagatcgtgccactgcactccaggctgggcgacagagcgagactctgtctcaaaaataaaaaatacaaaaattcgccgggtgttgtggcgcactcctgcagtcccagctactcgggaggctgaggcaagagaatcacttgaacctgggaggttgcggtgagccgagattgcaccactgcactccagctctaggcaacagagtgagactctgtccccccgcaaaaaaaaaaaaaaaaatttgctgggagttaggatatggactcctattgataggggtatagaagaatatttctatttacagatgaataggcaaatgagatagtgggagagataggttgcccttatagcctggggtcattactcaggtccctaggtgctagggaaacctagccacagaggcgagcaggcaatcctggtggctgctctggatggcacaggaggctttaggtgagggaactataaggctctggcccagcctctccattattccaaactcccaaagactatttgcagcgcagccgcctgcttgtcatctgttccccttagaagggtccctagattccacgttctctgttccttcctacattcttccagcttccctgtagatactccaactcttctttacctcccgactgcatttctccagtcctttctctcattctggccctttctcctttagcatgctgagctgtccttagcacatctgtatgagatcttgttgttagacaagcgtttaaggaatagggccttggggaaggaggccattggagggggctcctgcttacaccttgtctctctctgctcatagccatctcccatatgatgtcaccccggagcaggccttgagccaccccgaggtccagagacgactggacatcgccctacgcaacctcctcgccatgactgataagttccttttagccatcacctcatctgtggaccaaattccgtatgtgcaacagccccaccccagcctacgcatgggatttcaagagggccaggccaccatggggagcagagcagggtgatagtcctgcagggaggaaggcagggagggagatggagccaggggtactcagaggggttcctgaagagatgtggggaatgctcgaagctcctgctagagagctgagctgagagacggcgtgcaagtctgtgtgtggcctggtaggatgtcagtggaaccagaggagggaccctaaaatgatctcagggacactttattagctaagagcaaatgaggagaaaatgggactcttcagttcccaatatcaaaaataaatattttaagcccataaagtactttatagttctctcttttcttaaaatttagtcaatacgtttggttttctacatttatttttgacacatgataattgtacatattcatagggtatagtgtgatgttttgatacgtgtatacattgtgcaatgaatgatcaaatcagggtaattagcatatctattacctcaaacatttatttctttttggtgagaacattcaaaatccttctagctattttgagatatacaacacattattatcaactatagtcaccttctgtgcaatagagcaccagaacttattctttctacctggatgtaactttgtacccattgaccaacctctccccatcctctctccccttctcctaccctccccagactccggtaaccaccattctactctctactcctgtgaaatcacctttttaagattccacatatgagtgagattatgcagtatttgtccttctgtgtttggcttatgtcacttaacacgaacctctacgttcatctatgttgtcgaaaatgacaggctttcattctttttttgtttgtttttctttattttttattattattatttttaagacagggtctcactccattgcccaggctggagtgcccagggcaagatgaggatgttgaaagggggaacccacagagtttataaccctgctccccaaacctggagaaccggattaagagtttacaattaggagtaagaaaagattgttctaggcttaagaaagtaaagtacacaatgagctgtaaacttctgtctctggtaccctaggagtggaaattgcttttaaatgaatttaattacatttgtaggtggcacatccataataggaataataatgataatacagtctagcacatttgaatagtactctaccattatacgttactctcgcagacataatttcacttgatcctcaaaaagccctgtgagaagagaaggcaagaatgatcattcccattttctagaccaggggacagacttacaaaggagaaggaaatagtctaagataatatctctggttggtggtggagtccaaactggagcttctcctcccggctcactgatctccttggggccctacctctagcccagactaggccactcacagatgctctgtgacagctgacaaggttgactacctcggagccacctaggctgtcctaggacagggttttggctgtgagtgtcagatacccaagctttaggttaatggtgcctctgggggatgggggatggctatggtgagctggggtgctctgcaggggacccagagagtctcaaagaagaggttctcgagccaggttggaggctgtgtgagagatttagtagatgatagggccctggtcctgactactgacataaggcaggaggaagggacaaggcccagagacgtttggaggaaggcagcagggagctggctatggctagtggagggacagtgcttgagctctactctggagtggctgagcctgggggagaagagacagccaggcactcaagctcttatctctggcagagagagatgggcagaggcacagccacgcgcacctgtttctttgtccccaggtatgggatgcgatatgtggccaaagtcctgaaggcaactctggcagagaaattccctgacgccacagacagcgaggtctataaggcaagtgttgtctccccacccccacctcccaatccctcctttgctttgctggtacctgcaatccccagactgagacaaaaacacaaaaaatcctatgccataaaaatccaaggagggaaatatgctgccccctataaatggagcctggctcacccgcagggcttcaggtggcagatggctcatgctggggtgtgagcgaacagagtgggcaacactggcttcttgtcaggagatctgggttcaagtcccagctcttgctcaggtttgctgtgtggccttaagcaagttgtctgcctgctctgggcctgttttctttgaagtgagggggttggcccaggtgtcccttccagccaagcaagctgagaatgtggggccgcaccagtcaaggcggcccctggacacttctgggagagtctcctttgccctcaggtggtcgggaacctcctgtactaccgcttcctgaacccagctgtggtggctcctgacgccttcgacattgtggccatggcagctggtggagccctggctgccccccagcgccatgccctgggggctgtggctcagctcctacagcacgctgcggctggcaaggccttctctgggcagagccagcacctacgggtcctgaatgactatctggaggaaacacacctcaagttcaggtcttgggtccctttcctctctgtcccctttcttccctcttctcacctttgacatcccacttgtcccctccagaatccatgaggacaagaggcataaatagaagggatgagcataatgagcggggtggaggataggttgttggaaggactccccagtggagagaaaaggagactattaagagagattgtcttgaggggtcactgggacagaggtagggcaggacagagggcagaagctgagactggagagtccaaattggcctgagcaatcactggagaaggctggggaaatgatggggacagaagatgtgtggggtgctggccctccccgctctctcacatgcccgccctctggacaggaagttcatccatagagcctgccaggtgccagagccagaggagcgttttgcagtggacgagtactcagacatggtggctgtggccaaacccatggtgtacatcaccgtgggggagctggtcaacacgcacagggtgaggggctgagatctggagggtgttggctgggtgggcaagggtttggtagcctgtgatggggtagtgggctggccccagagggaagacctggctcagaccctgcatctccttttctttctccgtcctgcagctgttgctggagcaccaggactgcattgcccctgatcaccaagaccccctgcatgagctcctggaggatcttggggagctgcccaccatccctgaccttattggtacgtgccctccttagcagctggggccagctaggggacctgcatggagggagggacaggcaggcaggcagggcatgtgagcgtgcccatgcagcctaggtcttgtgccaggcggctagttccatactctccctctggtcctgacatgggcacagggacacagattgatgtggagaaggtagacagacagtagagggacccacgatcatcatggaaaacggtcaatgaaatgatctgaaagaggcacagggatcagggcctcattaggtttctctgagaaggaggggtttccgggccatggaataggaggaagccaacttactgggaggaaggacagaatgaagatggtgattggagagaaccaggagctgcaggctcagggaggcacagctcctctaccctcagggcacccagggctgagggtgtgggggtggcacagccccagtaacacaagggtatgctctgtgggtaacagcccttccatcggtgctaagggttggggacacagggtagttctgcaggccagtgtgggaaaacttcctggaagaggggcatgtggagcagctgatttaacgtgaccccatcggtgcatgtgtgtgtgtgtatgtgtgtgtgcgcatgtgtgtgtgtatgcctgtctccctctcattcctcaccacacctcaggtgagagcatcgctgcagatgggcacacggacctgagcaagctagaagtgtccctgacgctgaccaacaagtttgaaggactagaggcagatgctgatgactccaacacccgtagcctgcttctgaggtgggtgatgccagcctctgcccctgcatacctgagctccccagccctgaggccagtaaaatggccttattctgaggcgcccattccaccttcttcctgggctcccttatccttcaggaagttctccctgaagcctacctttattcccctcgctgcagccttggctcttttccatctggtatcctcagctttttgctctgtgttgtactgaaagtaaaggaatggtgaagatattggcaacagcaggtgtttgcatatcgtgctgtttaccaaatgcttttttcttttttttcaagtagagacagagtctcgccatgttgcccaagctggcctcaaactcctggcctcaaagccatccacctggctcagcctcccaaagtgctaggattacaggattgacccactgcgcctggcccaaatgcttttttaataagttatcgtttattcttagaaacaagctatgaggtagatggtggcttcccctcttcatagttgaggaaagactcagtagttatgtgatttatccaaagttccacagccagtgggttgtagagctcatgttctaattccactttttttttttttttttttttgagatggagtctcattctgtcatccaggctggagtgcagtgacacgaactcagttcactgcaacctccgccttctgggttcaagcgattctcctgcctcagcctcctgagtagctgggactacaggtgctcgccatcatgtccggccaatttttgtatttttagtagagatggggtttcaccatgttggccagcctgattttgaactcctgacctcaagtgatctgcctgccttggcctcccaaagtgctgggattacaggcgtgagccactgcgcccagcctaattccgcattcttgttgagtgtgatggtcaggagatgggcatggagctcttcttccccagttctacaaaagtgagggaggactcccagtaggggtgagctggtcatctgggcagaagaggagccaaagtgccagctcaagctcctgccaacaaggcaaccccttgcacccactcattcactcaataaacaagtgagctggccaggtgcggtggctcatgtctgtaatctcagcactttgggaggccgaggcaggtggatcacctgaggtcaggagttcgagaccagcctggccaacatggtgaaaccccatctctactgaaaatacacaaattagctgggtgtggtggcaggcacctgtaatcccagctacttgagaggctgaggcaggagaatcacttgaacctgggaggcagaggttgcagtgagccgagatcatgccattgcactccagcctgggtgacaggagtgaaactctatctcaaaaaaaaaaaaaaaaaacaagtgagctgagtatcatctttgtcctgccatcaaagggctgagagcaggatcgggctagggctgaacacagagcaccaccaagagggtggtgggtgtcagatgcattgagagctaaggagaagggatggctgggtgggaaggacatgtgtgctcagctgaaggactcaaaggcagatagtttgttgggaaggtattccaggcaacgacatcccctatccctcgctctctctccttatatcctagcagccatgctatagagcacggtccacttactctcagacctctggccagtcccatgtccaggcccttcccctgccccttacctctcctctgtcactgtcctccttgtgcagcaccaagcagctgttggccgatatcatacagttccatcctggggacaccctcaaggagatcctgtccctctcggcttccagagagcaagtgagtagccgggctggcccacaggttctgtctcattcatcccccacctcatcccacctgcaccgctgctgtttccctcctctgaacctcacccacatcagccagaagcagacacctgtgctcaccagtaatgagaactctggaggcctacaggatgagggatacagctttagccttgggaagcctcgggctacagagtcatggggccccacccctctccccacttcacacactgaaacaagcaccaacactagggctatggggggcactgagagaccgtctgggaatgctcccctggaaggcctgcactcagaagagtggtctgctagaatgcctggaggcaggagaaggtagtaggcaggtggggggccaggggcaggttgggcccgctggagtgaagactgaaccagggtcttcccaaagaaaaggtggggatggccagtagaggtatgtcccaaaacagaacagacaggtaaatgcccccaaacatcctgtgccgtcagaaagatccattgttgggaagtcacagctagtgtctgtccggaatcctttatgccatggcctgggtttggttctcctttgggccactcttcccctgtggtgatctatgaggccctcccatgtgtgacaccatgcattatggtgttataccttgatattcttcataagcgatgccctgccccagccatatcctgcagaggctgggctctggggcactttcttaatgatatgcagaaaaatgctcaggcctccctttgttgctggtgcccatgggaccttcactggtgtgggagcagaatggtaggacctggtagacccctccagcgtctgtgtgtccccaggaagcagcccacaagcagctgatgagccgacgccaggcctgtacagcccagacaccggagccactgcgacgacaccgctcactgacagctcactccctcctgccactggcagagaagcagcggcgcgtcctgcggaacctacgccgacttgaagccctggggttggtcagcgccagaaatggctaccaggggctagtggacgagctggccaaggtaacaacctgggcctgggctccgtgtgcctgtgtgtacgtgtgtgtgtgtgcgtgcatatacatgttaatccatagtgttggtgggcccctcctgatgagtcctcacccaaaattgtcaccagccagaggaaggctgagggtcctttttgaaggaaagatttttttttcttttttttttttttttttgagacagtctcactctcatccaggctggagagcagtggtgtgatcctggctcactgcaaccttcacctcctgggttcaagtgattctcctgcctcagcctcccaagtagctgggattacaggtgcgcgctgccatgcccggctaatttttgtatttttagtagagacacggtttcaggccatgttggcctggctggtttcgaactcctgacctcagggtccgcccatcttggcctcccaaaatgctgggattacaggtgtgagccactgcacccagccaaatttttgtatttttagtagagacagggtttcaccatgttggccaggctggtctcaaactcctgacctcaagtaatctgcccaccttaggctctcacaaagtgctgggattacaggtgtgaatcaccactcctagcctgaaggaaagatcttgaaattagttagagaggaaggtgttcttgcaactctctttttttttttcttccccacattagctgggtaatgtgcccaggtcagaaggtttgagagaagcatatctcacacaagagcatgaaaacccaatcctcagcttatgacctacaaaagtatccttgcaactttcttttactaaaaaacaaagagccttgaaaccagttagtcctcaacgggcagaggccctgaggacatgccttgaggatttggaataccatccttgagattttccttctaggaaaacagccttgaagcctgttcttccgaagagcctcacagtgtgtagctcttgggcctgtgtcaggccctaaggctctcctgccaggaaggaccactcatccctccatctgttccccaaccccaggacatccgcaaccagcacagacacaggcacaggcggaaggcagagctggtgaagctgcaggccacattacagggcctgagcactaagaccaccttctatgaggagcagggtgactactacagccagtacatccgggcctgcctggaccacctggcccccgactccaagtaggtgctgctttcccgtacttggaaggttacgtgtgacttctcacccctgcccatgtcacctttgccctgctatctcccagctttgaaaggggaatctcacccagcacagcacagtcccttcctaagtctggtctttgagcctcatttacaaagtcttgggctcaagtgcagcccccctcctctgtcttccatcagtgagaagtcttcctcggggtctcatttcctttccagccacagaaaacaagtttctttggtggtaaagtgtttattggatgaattctctggggccttcttttaatcaggagttctgggaaggggaagaagcagccttctcttcattacactgctgctcagctcctggaaaagggtgtcttggtggaaattgaagatcttcccgcctctcagtatgtgtctttggagggcaggatgtcagccccttcctgtcctctaacctgggggtggagctctgggctgggcaccgggtggaagagaagaagcatggtcccgatcttgaaggagctgctagaatgatggtggagacagagcatgcccagacagaaagtgaagggctgtggacatggtctagcacagttctagatgccctgaggcagagggtactgggaaagctttccagaggtgagaacagctgcgtagggcggggcagataaagagatggtgtggggagcagaagtaaaatggagaagacagcgagctgggccctctgggagtgacagagggaaaactggttctggatgacaccgctgcccaggatgaggagcagtgggtgcaagaatgtggctgtagccctggaaagaggcagtgggttcctgttttgaatcctgttcctgacagcttcagaaacgtcatctttgacatcacgccgggagatgaggcaggaaagtttgaagtaaatgccaagttcctgggtgtggacatggagcgatttcagcttcactatcaggtgaggggacagtcccatgagcctgcaggacatctgctgggctttaggtgctggcctgaagagagcagctggcctcactttcctagtcctcagatgacaccagctcagtttttcacccaatcagtatcgtctgttcctgaagagaagggtgggggtctgtgcagcccaagcccccctttccccatgccctgacacagaccccactggcaagcatcagggagagtggagtgggctactggtgtcagaagcaggattaatatttgaagccctatcacatgtcagggactttacatgttacctcctttaatcctctccacagctctgaagtattatccctattttacaggctctaggctaaaaggttaagaagctggctaagtcataggccagtgttcaggaaaggagtgaagcaacggtgtttttggttgtggttgttgttgttgcttttttgggtttttgtttgtttgttttcttgagacggagccttactccgtcacccaggctggagtgcaatggcgcaatctcagctcactgcaacctctgcctcctgggttcaagcgattctcctgcctcagcttcctgagtagctgggattacaggcgtgcaccaccacaccggctttttgtgtatttttagtagagatggggtttcaccatgttggtcaggctggtcttgaactgctgaccttgtgatccgcccgcctcagcctcccaaaatgctgggatttacaggcatgagtcaccatgcccagccgagcagtagtttttaatccaaatctttttgctctgatgttttaccttttgagtaagaaaaatgattttggccgggtgcagtggctcacgcctgtaatcccagcactttgggaggccgaggcgggcggatcacgaggtcagcagttcaagaccagcctggccaatatagtgaaaccctgtctctactaaaaatacaaaaattagcctggcgtggtggcacctgcctgtaatcccagctactcaggaggctgaagcaggaaaatcgcttgaacctgggaggcggagattgcagcgatccgagatcgcgccactgcactgtagcctgggagaccgagtgagactccgtctcaaaaaaataaataaataaaataagaaaaacaatttcaagccctggttctgcttgagttgacatttgatcaagtcactgtacctctcttgcctcagtttcctcatttgtgaagtgggatttcaatgccctacttcagtggccagtgccactggtgactgcagaaggccccatgatgtgagtgttttgtacaccatctgactggaccacattcagaagcccttaaactcccctccctgcctcttccctcctaggatctcctgcagctccagtatgagggtgtggctgtcatgaaactcttcaacaaggccaaagtcaatgtcaaccttctcatcttcctcctcaacaagaagtttttgcggaagtgacagaggcaaagggtgctacccaagcccctcttacctctctggatgctttctttaacactaactcaccactgtgcttccctgcagacacccagagctcaggactgggcaaggcccagggattctcaccccttccccagctgggaggagcttgcctgcctggccacagacagtgtatcttctaattggctaaagtgggccttgcccagagtccagctgtgtggcttttatcatgcatgacaaacccctggctttcctgccagatggtaggacatggaccttgacctgggaaagccattactcttgtgtctgctactgccctcccacagtcaccccaatattacaagcactgccccagcggcttgatttcccctctgccttccttctctctgcactcccacaaagccagggccaggctccccatccctacctcccactgcatcagcagtgggtgttcctgcccttcctgagtctaggcagctctgctgctgtgatctgcacaccctccaacctgggcagggactggggggatgcagtgtgtgttagtgcccatgtggcattgtggcactgttgccccccatggcggcatgggcaagatgaccttccattagcttcaagtcttgttctcttgtctgtggtctgtttaatatgtgggtcactagggtatttattctttctcccatccttacactctggatcattgtgcagacttaatcagggttttaacgctttcatttttttttttttttttttttttttgagctcaaagagagttctcattttccctattcaaactaatacccatgccgtgttttttaccttggatttaaagtcaccttaggttggggcaacagattctcactcatgtttaagatcttgttatttcagcttcataagatcaaagaggagtctttcccttttctcttttaccctcaggattctcatcccttacagctgactcttccaggcaatttccatagatctgcagtcctgcctctgccacagtctctctgttgtccccacatctacccaacttcctgtactgttgcccttctgatgttaataaaagcagctgttactcccacatctgttgttaacccttatttcattttctgtagagccggcctttaagttctggaacacagctccctgagagaactggggaatccttcctgcagcctcccccagccctctgcctgcctccggtgtggtcctactctgcctgcctgagatcgtaaaagcttaatgagatgtggcatttattctctcttccttcccccgggggacagagaggaggaaggaatgcttaggtttctattctgtttttatcggccactctgaagactaaagctgagaagagaagctactctaatttctaccccacccgttttacacacagttcctgcaggttcttttcctgagccttgggtggtgatatcaaaggtgcttaagccataactccttaggtattgtagattctacactctgatcaaaatctcctttctgaagggaaagctccctcctttcctccttgctttcagaaagtagggagggaagtctgttggggaggggacagtagagacagacacctgccctgacatctgaactcccaggcagctcctgttggggacacacctttgcctggtgcagtctgcctccctccactccgttccattctgtcactcaggatctgtcttgctgtcacatccaatctcagtcacagcctctccccccccttaacatgtcacagcaaagacttcaagtactgccttgctctgggtgacagtgacatttaccagtagatccaagtttctacatgtgatcagccatcattaaaaatctcatactcaccaaatggctgcaatgctcccccacaatcacatgatctcagccacatataccacatatagaaatgtcacaatagctaccgttactgagagtctgtcgtgggctgggatatttacatacatttactcctcacaacaaccctacaaaggttgttgtggtcttcatcttggtttaacatgatgaaactgaggttccgagttggatctgataactacccaaggctattcagctggaaaggagcagaacagggctttaaactcaggcccaccagatatacattccccagcattttttctcttctctgagaaacatttttacttccttcaacctccccttttgtgacactctcaagctcccccaacactccactctgctgtgggtccctgataagcttgagctcattagtgtccttgctaaccttcaatgcccaatctgagatacagtttcttagctcctatgaatgggactatatgccagtgtaacctctttggaggacaatttggaaatataaaaaatataagtgcttcttagacaaggtggcatgaaaaaaattaagtgcagggtaccaggataattcaacagaaagtagtcttttcaacaaatggtgtcaggacaactggaaatccacatgtaaaaggaggaagtcgtacccctaccccacaccagatacaaaaataaactcaaaatgaaccacagacctaactgtaggagataaaactataaaactctttaaaaaaggccagacatggtggctcacacctgtaatcccagcactttgtgtggccaagatgggaggattgcttgagtccagggagttcaagaccatcctgggcaacatagtgagactcccatctctaaaaaatatatgtattttaagccaggcgtggtgcctcatgcctgtaatcccagcactttcggaggcctaggtgggtggatcacctgaggtcgggagttcaagaccagcctgaccaacatggagaaaccccgtctctactaaaaatacaaaaattagctaggcgtggtggtgtgtgcctgtaatcccagctacttgggaggctaaggcaggagaatcacttgaacccggaggtggaggttgcagtgagccaagatcacaccactgcaatccagcctgggtgacagagcaagactccatctcaaaaaataaaataaaaataaaacaaaaaaaaattaaaaaacccgcagagtgggagaaaatatttgctaatcatatatgtaataagggatttatatccagactatataaagaactcatcacaatagaaagacaacctaattaagaaataggcaaaggatttgaattcacatttctcccaaaagaacatatacaaatggcctttcttcttttgaaacgaagtctcaccctgtcacccacactggagtgcagtggcgtgatcatggctcactgaagccttgatctccccaggcttaggtgatctcccacctcagcctcccaaatagctaggactacaggcattcgccaccattcccagctaatttttgtgttttttgtagagacaaagtattcgccatgctgcccaggctggtcttgaactcctgggctcaagtgatctgctctcattggcctcccaaagtgctgggattacaggccagggtcactgggcctggccatcactagccattagagaaatgcaaatcaaaatcactatgagatcccattttactcccattaggatggctaaaataaagcagacacaatgatcagtgttggtgaggatgtggagaaataactctcatacattgctggaagggttaaaatagtggagccactttgataaacaatttggccactcctcaaaatgttaaacatagagttatcatgtgacctaacaattcctctcctaggtatatatccaacaaaattgaaagcatatgtccacccagatatctgcacatggatatctatagcagcactcttcataatagccaaaaaatggaagcaatccaaatgtccatcaactgatgagtagataaacaaaagtagtatctccatacaatggaatattattcacctatcagaaggaatgaaatagtgacacatgctacaacatggatgaacttgaaaatgtgctgctaagtgaaagaagccagacacaaaatgccacatactgtatacttttatttatgtgaaatgtccagaatagtcagatccataggaacagaaagtagatcagtgattgcaaaggcccgggaaaaggggagaacagagagtgactgctaatgggtatgggctttctttcaggggtgacaaaaatgttctgtaattagtggtgatagctgcacaatgctgagtataataaaatatcacacaattatatactttaaaaaggtgaattgtatggtctgtgaattatatttcaataaagcttgtttttcttagtataagtgcacatacccagcaaggactttttcctgtggatatacctggatatgtgggcaaagagctctggaggatttgttgcagtattgttcgtattggcaataaactcagtagggtagtcacacaatggaacattaagcagccaataaaaattatcagctggaagctgggtatggtggatcacgcttgtattcccagcagttgggaggccaaggacagaggatcacttgaacccaggaattcaagaccagcctgggaaggccaggtgtggtggcttacgcctgtaatctcagcactttgggaggctgaggcggccagatcacctgaggtcaggagttcaagactaggctggccaacatggtgaaaccctgtctctactaaaaatacaaaaaattagccaggtgtgatggcacgtgcctgtgatcccagctactcgggaggttgaggcaggagaatcgcttgaacctgtgaggcggaggttgctgtgagctgaggttgcgccactgcactccagcctggacaacaggcaaaaaaaaaaaaaaaaaaaaggccaggcgtggtggctcacgcctgtaatcccagcgctttgggaggctgaggcgggtggatcacctgaggtcgggagttcaagaccagtctgaccaacatggagaaaccccatctctgctaaaaatacaaaattagccgggcatggtggcacatgcctgtaatcccagctactcaggaggctgaggcaggagaatcgcttgaacccaggaggcagaggttgcggtgagctgagatcacgccattgcactccagcctgggtgaaaagagcgaaactctgtctcaaaaataattaattaattaattaattaaatttaaaaaaaaaagaccagcctgggcagcacagtgagaccctgtctcttaaaaaaaaaaatgaggtggatctgtgtgtgccaatgtagaaagctgtcattttggactgatacacaagaagcttggcagtggtcacctttggagagtagagatgagaagaaggctcttcttgtactattattacgataagcttatattgctcttttttttttttaatttagagatgggatctccctctgttgcccagatgtgagcaacatgacagagtggcatgctgcttctgctagagcagtgcttctaaaagtgggctccacaagctgttactggtccacaactagataaatgcaataattgagagcaaacatttagaagcttacaggaactgccagtaatttttcatctgaatgtaataattttaaaaattgaggcttgtatttaataggtcttttttatttcagttttctagtaactagtatttcttgcacttcacaaaagtatcagtccataaaagattggaaatttttaaaaatgcatccttcactacagacagtttgagaactgttctagagggcatactttaataatgtgatataagaatgcattatctctgttgaatcaaactagagagacttatatagcattataatttgtcaatttacaataaaaaataaagagacgagttgagagtagctgagatcatattgtatatgcaattttagattctgctttattcacttagccatgaaaaatattttcctttgtctttaaaatttcttcaaaaatattattaatgcctataatatagcccatatgtatttaacattcctacaatgttgaattgttttccattttcactagtataagtaattatgtaatggatatctttgtagacaaaatatttgttacatctttttctttctttttgttagacagggtctcactctgttgcctgggctggagggagtaacaccatcacggctcactgccacctccaattcctggcctcaagggatcttcccacctcagcctaccaagtagctgggactacaggcgtgtaccactatgcccagcttatgttttattttttgtaaagacagggtattcaccatgtttcctaggctggtctcaaactcctggacttaagtgatcctcccgcctcagcctcccaaaatgctgggattacaggtgtgagccactgcactgggtcctttgttacatttctaattaactccttagaatagaatactagaacagaaggtagttcaaagagtatacacttttttaaaagttataggttttttcctgactataatacatattttttgtgggaaatttagaaaatataaaaaaacaaaaaaggtgaaaataattcatgataccataacaagtggtgaccacttgtaacattttgatatattttcttccaataatatttgtaattagagccacactatgtatcttctcttgtaacctgctttttccacgtatcattataaacattctcccatattaaatgggatataacataatctacttaatccatccactataaaataactagattgtttaagttttagtatataaattaatgctgtattgcctgggcgtggtggctcatgcctgtaattccagaactttgggaggccgaggcaggcagatcacttgaggccaggagtttgagaccagcctggccaacatggtgaaaccccgtttctactaaaactacaaaaattacctgtgcccagtgacgtgcacctgtaatcccagctactaggaaggctgaggcaggagaattgcttgaacctgggaggtggaggttgcagtgagccaatatcacgccactgcactccagtctggggaccgagcgagactccatctcaaaattaaaaaaataaaaaataaaacaaaataatgctgtattggactacatgtctagatgagaagatgcttggggcactttataaaggatctttttacatgtggcctaatgtctacagaaaatctgtaccaattcacagaaagaaagaagggacagaaagtgagagaaaatggtctacactgctggggccagtagtccagggtcaagaaagaagcccagactgactttgctgcaaatcaacacaaatctgtctctgctggggcttatgaaacctctcagttgcctttctactagtgtaggtaagagggcccctttctctgcaagaaacatggacatttaaaaaatatgtgctgtcaaatacaatttggtaacctgaactggatcctggcacagaagaaaaagggacattaatagaaaactggtgaaattaaataaattctagagtttatttaacagtaatatgttcatagtggtttcttagtttgagaaatgtaccacagtaatgtaagatgttaaccttagggtaaactcagtatggggtacacaggaactcactgtactatctttgcaacttttccataaatctaaaattagtacaaaatttaaagttttgtttaaaaaatgtattgcgccaatgtagagtcccactaaaagtgtgtggaagtgttagtgtaaccacacccttggtagcagcaaatatttttttaaaaatttaatccttcaacaaatatttattaagtgccctctgtgtgccagacactgccctaggtacttgggcatcattgaacaaagcagacatagatcaatgacctagtggagctgacgttgcagcagagaaagacagatactttagtatgttagatgaaataagtgccttgtggctgggcacagtgtctcacaccagtaatcccagcactttgggaagccaaggtagacagatcacttaaggtcaggagtttgagaccagccaggtcaacacggtgaaaccccgtctctactaaaaatacaaaaattatctgggcgtggtagtgcgctcctgtaattccagccactccagaggctgaggcaggaggatcacttgaacctgggaggcggaggttgctgtgagccaagatcacgccactacacccccacctgggtgacagagcaagactctgtctcaaaaaaaaaaaagtaataagtgcctaggaaaaaggaaaaacagggtaagggacttcaagggtggaggagaggagtgagggatgggttgcaattttaaatagggtgatcaggagaggcttccttgagaagacaactcagcaatgacttgaagaagctaaaaggtgagctatgtgtgaatgcctggagacaaggtctaaaaagtaagctggaaggacagatctgacataaccttgtaggctgtaacaaggtgtggcagataccatcaaacactcaccaataactccatttactctgctacatttcccaatctccttgcagttagggagaactatatgactagtttaggccaatgaaaggtgactgaagcacagtgtaccatttccatgcttaggcaataaaaatcccatataagtccaggcacagtgactcacacatgtaatcccaacactttggaaggccgaggtgggaggatcgcttgagcccaggagtttgaggccagcctgagcaacatagcaaaccccatcacatgtttgttggttttttttttttttaagaggctttcggtctgttgcccaggctagagtgcagtggcatgatcaggactcactacagcctcaacctcctaggtccaagcaaacaatcctcccacctcagcctcccaagtagctaggaccataggcatgtgtcgccacattcagctgaattttttttttgtggggcgggtaaggacaggatctccctatgttgcccaggactgaatggatcccccacctcggcctcctaaagtgctgggattacaggcatgagcaaccacacctggactttttttttttttttaagaaaaataaaaattttaaaagtataaaaaggctgggtgtggtgcctcacatctgtaatctcagcactttggaaggctgaggcaggtggatcacctgaggtctggagtttgagaccagcctggccaacatggtgaaaccccatctctactaaaaacacaaaaattagctgggcatggtggcaggcgcctataatcccagctacttgggaggctgaggaaggagaatcacttgaacccagaaggcggaggttgcagtagccaagatcgtgccattgcactccagcctgggcaacaagagtgaaactccgtctcaaaaaaaagaaaaagaaataaaaagtataaaaatcccatatgcgattctcatatctttctttcccagatatggtatctgtgttccagatggtggagctagaagatggtagagcctctatcagcctgggtccttgagtgactatgtggagcagagcctcccctactaacctgagtgtgacatgtgtcatgagctatcaccagctggtagcaacccggaaagaaagacagccactatctgccactgagacttattacgttaagctactgagacttgggggatggttaccactacagcataacttagcccatctggcctaatacagaagagcttgaattttttactctgtgttaactgagtcaactgtttctttgaagaaggggaagcatcattgattagtttttatttatttgataattagtgaatgcagcaggttttcttttcttttcttttccttttttttgagatgaagtatcgctctgtgccccaggctggagtgcagtggcacaatctcggctcactgcaacctctgcctctcgggttcaagcgattctcctgcctcagcctcctgagtagctggggctacaggcacaggccaccatgcctggctaatttttgtatttttagtagagccaggtttcaccacgttggccaggctggtcttgaactcctgacctcaaaggatccatgatccacccacctcggcctcccaaactgctgggattacaggcatgagccactgcgcccggcccagcaggttttattttctaagatgtccataacaaaatctccgctccttcatgctcttcttataggggcattatccgtcatcccattgagagggggcatccacagtccctccctttgaatctgggaaggcctctaactacagtgaaagtgaggttatgtgacttatggcttccacctggtcctatgggccatttgctctgggaaccctactgccatgctgtgaggaagttgaggccacatggagaagtcaacatctatatgacgttcctgttgaccttcccaactgaggtcctagctgacaaccagacacatgaggaagcctttgagatgactccagctgctgtctgcaaccacataagagacctgacaagcaacaactgcctagtttagcccagtagagcccaggaccataataataatgaaagaatgttgttttaagcctctaagttttaaggtggtctgttacacagcaatagataaatggaagagtggagctgaacatttgacactgttttaatctaatatattcaagtgtttttgcgccaataagccaccttcttgccaaatctgacttttctctttccagacaaaagtgctaaccaggacagggcaatggatggagctagcagtgatatctctccaagctgacgcagatttattaacaagattttctgggtatagctgttccattaacacacagtaggcattcactgactatttgttaaacgaatgagtaatgctgtccatgttcctgcatctttttaaaaagataatataatcaacctaatgaaatgctttcataaaattcagatgcattatgcaacactcctcagaaataccatctattaaacccttttattataaaaagcctacagcaatttttttctgagttcccttctcattaaacaaatgaaataatgtatatatcatctcaatgtaaaagattcaagtcatatgtacaaagtaaggtaaaatatatctgcatcttccccaaaaataagccttattgataatttggta

SEQ ID NO: 1398 - DNA, 5352 bp, Homo sapiens
aagaaggaggaacatggagaggagagcagcgggcccaggctgggcagcctatgaacgcctcacagctgaggagatggatgagcagaggcggcagaatgttgcctatcagtacctgtgccggctggaggaggccaagcgctggatggaggcctgcctgaaggaggagcttccttccccggtggagctggaggagagccttcggaatggagtgctgctggccaagctgggccactgttttgcaccctccgtggttccgttgaagaagatctacgatgtggagcagctgcggtaccaggcaactggcttacatttccgtcacacagacaacatcaacttttggctatctgcaatagcccacatcggtctgccttcgaccttcttcccagagaccacggacatctatgacaaaaagaacatgccccgggtagtctactgcatccatgctctcagtctcttcctcttccggctgggattggcccctcagatacatgatctatacgggaaagtgaaattcacagctgaggaactcagcaacatggcgtccgaactggccaaatatggcctccagctgcctgccttcagcaagatcgggggcatcttggccaatgagctctcggtggatgaggctgcagtccatgcagctgttcttgccatcaatgaagcagtggagcgaggggtggtggaggacaccctggctgccttgcagaatcccagtgctcttctggagaatctccgagagcctctggcagccgtctaccaggagatgctggcccaggccaagatggagaaggcagccaatgccaggaaccatgtaaggagtagtcttggagaaagccaggacatctatgaccactacctaactcaggctgaaatccagggcaatatcaaccatgtcaacgtccatggggctctagaagttgttgatgatgccctggaaagacagagccctgaagccttgctcaaggcccttcaagaccctgccctggccctgcgaggggtgaggagagactttgctgactggtacctggagcagctgaactcagacagagagcagaaggcacaggagctgggcctggtggagcttctggaaaaggaggaagtccaggctggtgtggctgcagccaacacaaagggtgatcaggaacaagccagtaagtcatctgcaggtctgctccacgctgtgcagcggatcaacaaagccatccggaggggagtggcggctgacactgtgaaggagctgatgtgccctgaggcccagctgcctccactgtaccctgttgcatcgtctatgtaccagctggagctggcagtgctccagcagcagcagggggagcttggccaggaggagctcttcgtggctgtggagatgctctcagctgtggtcctgattaaccgggccctggaggcccgggatgccagtggcttctggagcagcctggtgaaccctgccacaggcctggctgaggtggaaggagaaaatgcccagcgttacttcgatgccctgctgaaattgcgacaggagcgtgggatgggtgaggacttcctgagctggaatgacctgcaggccaccgtgagccaggtcaatgcacagacccaggaagagactgaccgggtccttgcagtcagcctcatcaatgaggctctggacaaaggcagccctgagaagactctgtctgccctactgcttcctgcagctggcctagatgatgtcagcctccctgtcgcccctcggtaccatctcctccttgtggcagccaaaaggcagaaggcccaggtgacaggggatcctggagctgtgctgtggcttgaggagatccgccagggagtggtcagagccaaccaggacactaatacagctcagagaatggctcttggtgtggctgccatcaatcaagccatcaaggagggcaaggcagcccagactgagcgggtgttgaggaaccccgcagtggcccttcgaggggtagttcccgactgtgccaacggctaccagcgagccctggaaagtgccatggcaaagaaacagcgtccagcagacacagctttctgggttcaacatgacatgaaggatggcactgcctactacttccatctgcagaccttccaggggatctgggagcaacctcctggctgccccctcaacacctctcacctgacccgggaggagatccagtcagctgtcaccaaggtcactgctgcctatgaccgccaacagctctggaaagccaacgtcggctttgttatccagctccaggcccgcctccgtggcttcctagttcggcagaagtttgctgagcattcccactttctgaggacctggctcccagcagtcatcaagatccaggctcattggcggggttataggcagcggaagatttacctggagtggttgcagtattttaaagcaaacctggatgccataatcaagatccaggcctgggcccggatgtgggcagctcggaggcaatacctgaggcgtctgcactacttccagaagaatgttaactccattgtgaagatccaggcatttttccgagccaggaaagcccaagatgactacaggatattagtgcatgcaccccaccctcctctcagtgtggtacgcagatttgcccatctcttgaatcaaagccagcaagacttcttggctgaggcagagctgctgaagctccaggaagaggtagttaggaagatccgatccaatcagcagctggagcaggacctcaacatcatggacatcaagattggcctgctggtgaagaaccggatcactctgcaggaagtggtctcccactgcaagaagctgaccaagaggaataaggaacagctgtcagatatgatggttctggacaagcagaagggtttaaagtcgctgagcaaagagaaacggcagaaactagaagcataccaacacctcttctacctgctccagactcagcccatctacctggccaagctgatctttcagatgccacagaacaaaaccaccaagttcatggaggcagtgattttcagcctgtacaactatgcctccagccgccgagaggcctatctcctgctccagctgttcaagacagcactccaggaggaaatcaagtcaaaggtggagcagccccaggacgtggtgacaggcaacccaacagtggtgaggctggtggtgagattctaccgtaatgggcggggacagagtgccctgcaggagattctgggcaaggttatccaggatgtgctagaagacaaagtgctcagcgtccacacagaccctgtccacctctataagaactggatcaaccagactgaggcccagacagggcagcgcagccatctcccatatgatgtcaccccggagcaggccttgagccaccccgaggtccagagacgactggacatcgccctacgcaacctcctcgccatgactgataagttccttttagccatcacctcatctgtggaccaaattccgtatgggatgcgatatgtggccaaagtcctgaaggcaactctggcagagaaattccctgacgccacagacagcgaggtctataaggcaagtgtggtcgggaacctcctgtactaccgcttcctgaacccagctgtggtggctcctgacgccttcgacattgtggccatggcagctggtggagccctggctgccccccagcgccatgccctgggggctgtggctcagctcctacagcacgctgcggctggcaaggccttctctgggcagagccagcacctacgggtcctgaatgactatctggaggaaacacacctcaagttcaggaagttcatccatagagcctgccaggtgccagagccagaggagcgttttgcagtggacgagtactcagacatggtggctgtggccaaacccatggtgtacatcaccgtgggggagctggtcaacacgcacaggctgttgctggagcaccaggactgcattgcccctgatcaccaagaccccctgcatgagctcctggaggatcttggggagctgcccaccatccctgaccttattggtgagagcatcgctgcagatgggcacacggacctgagcaagctagaagtgtccctgacgctgaccaacaagtttgaaggactagaggcagatgctgatgactccaacacccgtagcctgcttctgagcaccaagcagctgttggccgatatcatacagttccatcctggggacaccctcaaggagatcctgtccctctcggcttccagagagcaagaagcagcccacaagcagctgatgagccgacgccaggcctgtacagcccagacaccggagccactgcgacgacaccgctcactgacagctcactccctcctgccactggcagagaagcagcggcgcgtcctgcggaacctacgccgacttgaagccctggggttggtcagcgccagaaatggctaccaggggctagtggacgagctggccaaggacatccgcaaccagcacagacacaggcacaggcggaaggcagagctggtgaagctgcaggccacattacagggcctgagcactaagaccaccttctatgaggagcagggtgactactacagccagtacatccgggcctgcctggaccacctggcccccgactccaagagttctgggaaggggaagaagcagccttctcttcattacactgctgctcagctcctggaaaagggtgtcttggtggaaattgaagatcttcccgcctctcacttcagaaacgtcatctttgacatcacgccgggagatgaggcaggaaagtttgaagtaaatgccaagttcctgggtgtggacatggagcgatttcagcttcactatcaggatctcctgcagctccagtatgagggtgtggctgtcatgaaactcttcaacaaggccaaagtcaatgtcaaccttctcatcttcctcctcaacaagaagtttttgcggaagtgacagaggcaaagggtgctacccaagcccctcttacctctctggatgctttctttaacactaactcaccactgtgcttccctgcagacacccagagctcaggactgggcaaggcccagggattctcaccccttccccagctgggaggagcttgcctgcctggccacagacagtgtatcttctaattggctaaagtgggccttgcccagagtccagctgtgtggcttttatcatgcatgacaaacccctggctttcctgccagatggattctcatcccttacagctgactcttccaggcaatttccatagatctgcagtcctgcctctgccacagtctctctgttgtccccacatctacccaacttcctgtactgttgcccttctgatgttaataaaagcagctgttactccc

SEQ ID NO: 1399 - protein, 1634 aa, Homo sapiens
MERRAAGPGWAAYERLTAEEMDEQRRQNVAYQYLCRLEEAKRWMEACLKEELPSPVELEESLRNGVLLAKLGHCFAPSVVPLKKIYDVEQLRYQATGLHFRHTDNINFWLSAIAHIGLPSTFFPETTDIYDKKNMPRVVYCIHALSLFLFRLGLAPQIHDLYGKVKFTAEELSNMASELAKYGLQLPAFSKIGGILANELSVDEAAVHAAVLAINEAVERGVVEDTLAALQNPSALLENLREPLAAVYQEMLAQAKMEKAANARNHVRSSLGESQDIYDHYLTQAEIQGNINHVNVHGALEVVDDALERQSPEALLKALQDPALRGVRRDFADWYLEQLNSDREQKAQELGLVELLEKEEVQAGVAAANTKGDQEQASKSSAGLLHAVQRINKAIRRGVAADTVKELMCPEAQLPPLYPVASSMYQLELAVLQQQQGELGQEELFVAVEMLSAVVLINRALEARDASGFWSSLVNPATGLAEVEGENAQRYFDALLKLRQERGMGEDFLSWNDLQATVSQVNAQTQEETDRVLAVSLINEALDKGSPEKTLSALLLPAAGLDDVSLPVAPRYHLLLVAAKRQKAQVTGDPGAVLWLEEIRQGVVRANQDTNTAQRMALGVAAINQAIKEGKAAQTERVLRNPAVRGVVPDCANGYQRALESAMAKKQRPADTAFWVQHDMKDGTAYYFHLQTFQGIWEQPPGCPLNTSHLTREEIQSAVTKVTAAYDRQQLWKANVGFVIQLQARLRGFLVRQKFAEHSHFLRTWLPAVIKIQAHWRGYRQRKIYLEWLQYFKANLDAIIKIQAWARMWAARRQYLRRLHYFQKNVNSIVKIQAFFRARKAQDDYRILVHAPHPPLSVVRRFAHLLNQSQQDFLAEAELLKLQEEVVRKIRSNQQLEQDLNIMDIKIGLLVKNRITLQEVVSHCKKLTKRNKEQLSDMMVLDKQKGLKSLSKEKRQKLEAYQHLFYLLQTQPIYLAKLIFQMPQNKTTKFMEAVIFSLYNYASSRREAYLLLQLFKTALQEEIKSKVEQPQDVVTGNPTVVRLVVRFYRNGRGQSALQEILGKVIQDVLEDKVLSVHTDPVHLYKNWINQTEAQTGQRSHLPYDVTPEQALSHPEVQRRLDIALRNLLAMTDKFLLAITSSVDQIPYGMRYVAKVLKATLAEKFPDATDSEVYKASVVGNLLYYRFLNPAVVAPDAFDIVAMAAGGAAPQRHALGAVAQLLQHAAAGKAFSGQSQHLRVLNDYLEETHLKFRKFIHRACQVPEPEERFAVDEYSDMVAVAKPMVYITVGELVNTLLLEHQDCIAPDHQDPLHELLEDLGELPTIPDLIGESIAADGHTDLSKLEVSLTLTNKFEGLEADADDSNTRSLLLSTKQLLADIIQFHPGDTLKEILSLSASREQEAAHKQLMSRRQACTAQTPEPLRRHRSLTAHSLLPLAEKQRRVLRNLRRLEALGLVSARNGYQGLVDELAKDIRNQHRHRHRRKAELVKLQATLQGLSTKTTFYEEQGDYYSQYIRACLDHLAPDSKSSGKGKKQPSLHYTAAQLLEKGVLVEIEDLPASHFRNVIFDITPGDEAGKFEVNAKFLGVDMERFQLHYQDLLQLQYEGVAVMKLFNKAKVNVNLLIFLLNKKFLRK

SEQ ID NO: 1400 - DNA, 57121 bp, Homo sapiens
agcaaggagacaggcactgtggaggaggggctgggtgtcggccaccacggaacccaaccctcatcatttccccagcgccctggctggcacgtcacgagtgcttgatccatgcttgttgaatgaaggtgcgctcttctggacaggggttgaggcaatggaggaagtgacagaaaaagggaggcaatggccctctgtcaaccctgagctgctcctcacgtttacagggctacaggcctgttagagatgcagtgaggcgggtgacagggtcaatcgacgagtctttccctcttgatcgttacctcgttcaaactccagtccaccaaaaaacaataataaaagagaagaaaaataacggcatacagtgcagcacttcagctttgaggacactgagaattccagcagatggctgatgggtgtggggcccctgctgccctgccacctcccttctgtgtaggctccttggtagcctctgtgactgggaggctgccccagggtccaaccggcttcccttcccattctgtcgcctccctactaagtttccgccctcagacctttacacttccatggaagttcctaccttttagcagacaggcaagtcctcgaccttcctccaagattgatgtgaaagatgctcacccttgtctttcatgccctagcccctgccctctccaactctcagtctatggaatgtcacacaggtttgcatgcacaatcgcagccttctggaggattgtgagccaattcaacaggcttcttgagcgatgggtacatccctcctctgtaactgtcttggggaggatgggagagggagccttgagcttgatcaaccctttactgtctccctgcctcccccataccgatggtgccagggtctcctcctaggacctccaggtgcacagcctcttgttgcttagcgacagcgtacctcttccccatacctcagcaacctcccccagcagcgcaaggagcagctgtgaaagggagagctgggctggacctcgcaggagctgccactgctgctgacggagatgtgtgggaacaagccccaaaataggcctgagtgtgaaacccaaggcttttttaaatactcaggtcccacactgactcttggaaagccctgccatgctcccctgtccccagcttctgccaggctgctgcgtctccctcccacactgggcctcttactccacttctgtgctctcggctgtctgcccctctgtctgccgtgggtctctgggtctgctcctggggtctctccctctcttggggctcaagtgtcacttttgctgccccttgtccttctgcccatcctataactcctgtccatgtgtgggtctctgggtctctgtggctgccacagtctctcttgcccttcttcctgctcaagctgtgtaactgccagtctctccctcactagcaagaatcccctcattcccaccctcaagggctgcttattgtgacaaccccacattgctagagccaccatgactataatcctttgttactacctttttaggaaaggcctgtggtaggagggtcacagaagtggccctcagggagacctgcctttctcacttagcctgccctgtgcttctgtttcaatggaaactgacattggacttcagcctagtccaattagaagaggaccaggcccagaaaagaaaagaaggactgccttacctccatcccttcggctaccatgtcagagttccaaagagaagctcctgaagaggctcagcacccgtgacagccaagaactgccccacccagaacagtgttctccacccccagctgatggtgatgccacccaagggcctggtgccatctctgtgtccactaaactagtcctctgccatcccacctccctccactgctgatgtttgggtctaatgatattatctgtgggttaagaatcctgaactagggagcaggttggcaaagggacagctgagaataagtatggccagagtcaagtggggtggggtggaggacagctcccaggcaggataggggctggaggggtgctgaagtgagggcacaagggaactttgggagggaggcctgggttctgccttctagcagaggaagcagcgaaacagcagaaggaacttttaggccggaggccggaccaagtgacctcacccaaacactgtggtctgctgctattgcaacctggcgagcctcccagctctcctgggtccccaagtaggagagctttttatagttcactccccaacttaggtttgaataattaaacaagatggacagaaatagcagccggacagtgaaagcaggttattttggggttttctggaacacagtgctcctgggtgtcaccccacccctgcaggggggcggagctaacatcaaggctgatgggagattcctgtggggggaaacccacccacacccccagggttccttgtgttgaggaggttgctctcagccagaggagggtctcaccatttcttcctcctcctcaaggaaagagagggctctcactgccttctgatcatagctattcccctggcaggaagtccctcctgttgcctgtcaggccttctacttctgagatggtgacagatattgaaaatcagatcgataagcagctgcaagacaggctgaacaaggacaaggtggctactgctcctctggccaaggagccggaaccaggtgataggaggtctcgtcccccctccactataaccactggggagctgtggagggaatgaaggttggggtggggagtgggagccagagctagggacaggagaggaactggctcggggtcgaggagtaagatgaggctccagagaagaaaagctcaaaggtgggttagtgtttggatgaaaagctccccttttccagctctcttttagtgtccgctgtccttggcagaagcccagcctgggtttcttgggacagggtttcagtagctaagccggggatgaggagaggtcagaagccccctttcccacccaggtcttcatcgcagaccaatcctctgtgacttgtttgcataatacagtacttttagttcaactgcagagattaacctcaactctaccttgaggttctaccacagagccttaaaacctggggcacagaggggcacaacaggtggtaagggggtatttataatgttttcttcctttggataacaacttcagatttgagtttggaggtcaaatttcagggaatactgaaattgttcacatattcatttaatgttttaaatttttatttaagagatgatgtctcgctatgttacccaggctggtctcaaactcctgggctcaagggatcttcctgcctctgcccctgagaacctgggatgacaaatgaaagccaccctgcccggcttcactctgtcatttttattcattttagaaactttttttttctccttgagacggtgtctcgctgtgtcgccaggctggagtgcagtggcgtgatctcggctcactgcaacctccgcctccccagttcaagaaattcccctgcctcagcctcctgagtagctgggactacaggcgcgggccaccacacctggttaatttttttgtattttagtagatacggggtttcaccatgttggtcaggatggtcttgatctcctgatctcgtgatccgcccgcctcagcctcccaaagtgctggaattacaggtgtgagccaccgcacccggcctttttttttttttttttaaatagagacaatttctcactatgttgaccaagctggtcttgaactcctggcctcaagtgatcctcccatcttggctttccaaagtgttgggattacaagtgtgagccactgcacctggccaaaaacatttttaaagcaccaattataagcctttatcccccagcttgatgctggggagtaattcaggatggcaaggtccttgttctcaagaagctcacactttagtaggggagagggccatgttaaaacctaccccccacaattattgaatgcttactatgcaacaggtaccatactagaacttcacagaaatggttgcatttaattcaaacagcaagtctaggtctaagtagcattaaccccaaaggacagttattacaactaagatgaagagacttgtctaaggtcactcaactagtaaacagtattaatggaattggaacccaagtttatattattcctagttctgtgctcttaacaactgctctcatggtctctaatgcatggaaggaagcaacaggtttattatttgctgtgagcgttcaaaagacagttcaattgtctttagctgagcgtgtttgtgctatgcatgctgggtggagcaatcagggaaagcctcctaaaggaggtggctttgcattggactcaatggatcagttcattcattctacaaatactgtgcatccgtggattcaaccaaccttggatggtcaatattcagaaaaaaaattgcatctgaacagaccttttttcttgtcattgttccttaagcaatatggtataacaactattttcatagcatttacattgtattagatactataagttatctagagatgatttaaagtgtatcggaggtggcgcataggtcacatgcaaatgttacactatctcacagattcagcagattttcctatgggagatgtcccggaaccaataccccatcaggtaaggaggaaggactggacttaaattgagtccctactacatgctgcgttctaggtgctggcaacacagaagtgaacgaagtccttgtgcttatgcacatgcggggcagggataagggaaaggctgaaattatgactgggcgagtcttaaatgccaagcctccactttcacagtggttctgctcctcctgctcctgggtttctctcccatgagcaaatatactctcctactctgggaagtccttctaaacgtctaccctgcatttcctttttcttgtttttgagatggagtctcgccctgtcgcccaggctggggtgcagtggcacaatctcggctcactgcaacctctgcctcccgggctcaagcgatccttctgcctcagcctcccgagtagctaggactacaggcgcgcgccaccacgccaggctaatttttgtatttttagtagagacggggattcaccatattggccagactggtctcgaactcctgacctcgtgatccgcccgcctcggcctcccaaagtgatgggattgcaggcgtgagccaccgcgcccggctctaccctgcattcctttctgctccaagacatttccccacatcccatttcgttcctcccaagccaagtctcatagccaaaacctggcaggccgcgagcgtctggccctttaagtctgccttcttccccccatgtgccgtctggttgggctggcgacgctgacgcacgcgtgacgtcaatggcagctggtggagtctgggcacgaggagcgaagttgggatgggggtgggggggcgagagagaaggcggttaatttgcatttaaaggggccactccctcgttagcgatcagggctttaaagaaatgcgtattcggcaaactttctgtcctgggttatggggcaagaaaaaggcgtggtacagctgaagtcggcggcgactagagtttgcgatgacaattatgtccttccgcggaaagggggaaatagtccgtcggtgccctggctgggagcacgtgaccgggagggggcggatgtgggggggggcaagagagaaggagggaggagctggggagacgactgtcaggctgtgtttcagctgcccccacccccacatcctgcccactctcctgcagctgccaccacatcctgcccagccgggggcagggagcttctgtgggggtgatgcactgaccgaggacccggctttggcaccccctccctgcccgcttcagctccagggtgggccgtctgccctttgccccaggcctggccccaggcaccctggccctgagcttggggcacaactctgccggttcagcctgacacctctctgcctgactctgccctttcccctcaattctggcctgaagtgggacttgtgcggggtggtgggacaggccagaccacagccccatcctcaggctagcacagttatcaatggacaaatgagatgttcaataaacgtttttataatctgaactcagatgcatagctgcacacacacacgcacacacaaatacagattcgtgttaacacatttgctgagcgcattctatgccaggtcctgcaaggccctgaagactcaaagtagagttagattgctgccctcaaggggcccaggatctggtgaggagtgtgtacagaggaggcagatacacagagtagagtgcactacacaagcaggtgcagaataatacccaagtccacacagagcatgtatacacagaactgctgtatacctgctgatggcctttcctctcacaagacaaggtggcagatgaagggactgccgggatcaattgaaaactgggggaaaaattatcagctaatggaagggatgaggtggatggacatagggggctggagattgtccagatggctgtagggaaggtgagagggggccaaccaagctgccagacagattagaggctggagcagcagtaatggcttcccggggctatgggacaggcaggcagagaaacggcccttggggcatgaggatgaggaagacttttacaaattaagttggattagggatgcttgggaaggggtgaacaaaaggagttgtctatgtccctttgccatataaacttacaaagatgatatggtggagaggagtttacacacacttttaaaagacttcaatgagcatgtaagtgtttgattcctaaaggattttatagcagctttggcctgttaggtaacttttctctaggaaagatggatgggtagccagagtgggaggaggaaaaatgagaccgaggcatctgaactcgctcaggtatttcctacccaggggattctggaatgggaaatacaggggccagaagaaaaagattcagtgagtcactttcaggaagtccttatttcaatctaacttccaacaacattattccctagaccctttattacccttccatgggaattaaggccctgtgtttgttacttttgctctcccatttagttttctctatattctaaattctatcccacttgtagtgtctgtctttcctactctgttctctagggaattatggcagcatcttcggggtccagcacactgcatctcacccactgagctcttccctcctttcccttttccctcctgctcctggccctttaaaaccctccccaggtgactcaccttccttcctcattcctttgttaaggacccaacattccaagactgggaggatcaatcagccaatcatagccctggcaagcctacctcaggcttgagattggttggaactgtggttggcgggaggctcaccacgctggtataaaggatgttggggagggggtttctgggaatcggccctgggcaagaatttgttctcgggttggttagtttttgtagagactccttcaagtagagctggagccagagggttcttcggcttggagagcctcgaaactggaggtggctgagaacccagctctcttggtctcctgggggcttggctgacccctgcccactttcttttgtgtgtgtgtgtgatctgggacccaggggtctgacggctgaattcccaggcctgatcctaagaagtcttttccagcagccttggatctcttcagtctcaacattctgctttcctgacgtcggaaacagccggaaaataaacaccctgatgactaaacggtttctccagctagagcctagggaagcactaaaaatagaggccacaagtgaggggaggttccccacttgaggggggttggcactttcccatcctgctactgccacagcctcaagcctggcacagggctctgttcttctctgtccttgggggaagaggcagatgggctccccctgcctaccctgaagtcttttgggcaaactagccctgcctggcaggggtaactcacatcttctggtgttggggccccagcctcccagatccaatgaggaactgagaagctatatttggggacacggtgggacactgtttcctgaaaggggggggtcaggtagaagggttggaaactgaggccaaggaagtaggagcttgctggcttcctgtcttaggacacacaagataagtctccaacctatttgcagagcaattccactgaactcacctcctttaaggcttgcatgagccaatggaggcctagagggttctttgcagaccagcccttggcccaatggtctggtttgggttattatacagcataagacactgtactaagcaatctgcttagaagaactaatttaatcttcacactaaatttctgagttagctactattatcaccatctctagtcatggtcaccatgaggtaggggaaagttaaataatgtgcctgtgttcacagctaatgaatggtggagtgaggatctgaaccaggacagcttgacggcaaagttgacatttctaaccaccatgacatgttgcctctctctatatattggagtctttgtccggtaaatcagatccagccagaaatcagggtgtgtgtctgggcgcggtggctcacgcctgtaatcctagcactttggaaggccgaggcgggcggattgcttgagctcaggagttcgagaccagcctgggtaacacggtgaaatcccatctccactaaaacacaaaaaattagccgggcgtgggggcgtgcgcctgtcgtcccagctattcgggaggcgggaggggaggcgaggcaggagaatcgcttgaacctgggaggcggaagttgcagtgagccaagatcgcgccactgcactccagcctgggcgacgaagaaagactccgtctcaaaaaaaaaaaaaaaaaaattcggggtgtgtgaagaactgagtgagtgcccttctgttctgcaaggttctttgagatctaagccagatgccatcatttccttacgctcttgggagaaagcagcaggacttggaagtaacagggatgctgaagcctgacgggtcagttgtccagtaggcatggcacccacactcctgttgtagggcacgtaaatattcaccacaccctggagcaaccaggaatataaaaataaaaaattttaaagagctactactgcttctttaataagacatttctgggtgtttactgtgcggcgggaggtggggaggaattagggtcccgcccctttaaattgccccctcggcagtaagtgctgtggggccccgcaagcactggagattaggtcacccaagaactatgagctgtcgctttaaattgctgggcgtctgccgagccgggccctgggaccggagggggcctgtcacaggtagagggagcaactgagctccctaggtaacaccccccaaccccaagaatgtcgcccgtgagtggggctttgtcacacaccaagtgggggagatgggagcttttcaccacttccagtctccccttaatttatctacttagactcccacctcccaactctcctggggcccggggccgcgaggaggtgccgaggtggcgcgtgttgagagtgtgcgtgcagctcgcacggcctccccggaaaggacctcctggagcacgcggtggcagcagcgccaggcgggcgggcgggcggccggcgtgctccgaggggcaccgtgggagcggaccgatccctttaaaggcctctgggtctcgcctccctactttgcctcgcttcgtcccttcctccctccctcccggcaggcggagggatccgccgctcccagcgccgcagcctagcttgggagggcggtggggtgggggccgacccggcctggcccggccagccctggggaagcgaggggcggggccgcgtcctcgggaccgccccagccccggctccgccccgccacccccacaggtgcctcccattggcccccacgcctgtccgtcacccctttccccccacccctcaagctaggctgagctgtgcctacgtcggcctcgactcccgggggctggaggagttacctttggagcccgaaaggaggaaggaagcaaaatatcaacaacagccgaggcggctcaggcgctcggccccggttccccgcttgcctgccgcccgcctgctggcccccgcgcccacgacgggggcccaggcctcacggcgccgcccagggcccgcgcggacgccggcctcatttattattctccccgcccggagctgcggcttcccggtgttgaagatcccccggaccaggggcgagggctacccgctctttgccgtgacaacaccgttcccccagccgggctggtgagtagagaaaaataatgcgcctgccactttaagaggccccctcccccacccggtccaggggttggggtggagggtggtctagaccgtccccctgaggggtgggatggggcagcccccgggccgggaggaactcgcgaagcgggccgtgttttcgtgtggcgttggcggggattacctaggggactgtttgtgtcagggagtctgtcgtgggggacaagtggagtgggctgcaattcccttgggtgttgggagtacggggtggggacgggcggattgggggcgcgcccgcctgttcgtgtagggggtttacgacggcctccgagcggtctgggacggggcgccatcctccgagggggtctccggtgacagtcgggagcgactgacattttaacagccggccctccctccctctccctcctctcgccgcctgttccctcctccttggcccgaaatggtgcagaagggggcctgggagggcggcgggagggtggaggcggggggagccgcagctgtttgggaagcgggggagggaggggggatgttgttcagatgacaccggggtagtgggttggggtgtgtgagtgtgtgtgtctccggggcccgtgtttgccgggtgcctgtggagttgggacgcggagtcgccacgaggtgggcacgcaggacccttccttgagacctcctagccccgcttccgagacccctgatgtggtttgtcagtaaccccaactggagaactccctggccagaagtttgcagctgttcaacatctgggcaagagttctctagtcctttccacctatggcaggcggagctgggctgcgagcgggggtttagggagtttgggggggcttttgggaggatgggccaaggagaccaaaatgcttttagtcccccactccaatgccagcttctctcctaccaggttcgggtcttagggggatggggaaaggggccccctccccctagtgaatcacgctgtcctctcagcagccttccgaggactcctcctgaaaggaaggcactctaggagccaccgaccgggttatcccaggtttgcccttctgaatgggagcctccctctgcctcccattgcttggtgcattgttgatgggttgggggagggtatagcgggttgggggggatcctgtgtccctctttgctgtgcccaacccccatttgagttttcctcagagtcctggtttctttgctttggggtggaggtggcccttatccactcctcctcctatcccttcagtgggtctccgcagcaattcagggtccagcctagactatgggaagtttgccgtctggggcggtgaccttgggctgctctggcctggagataggaggggagcgcaggtcagcctgagattgggtgttttggcgtttgggagctgtccacctcccactcctctcccaaccccaacaggaaggtctcagtagctgaggagagcattgaaaaggcacatgtcagtgttcacagatgtccacccgcttgtggccacggggtcacacccgccccaggacttagtctggctgtcccagctcccacggccctgcctgggaatgaatttccttcctgtggtttcccagtgtgttgggcaggagatgggggtggggtaggactattgtgggagtggctgaggacctctttatacggggtgattgggggacactggagcttatatggagctccttccccacttgccccagcataggcatttggacctttgggtctcagtgattatattctctttgttgtaactcccctgcccccgccaacacaccctgtatgtttgcatatgtgtgtatatgtatgtgtgtgcatgtacatttgtaaagggagaggtctctggtctctctggggggaagggggggaggggggaagggaggaagggaggagcttttactcacccctgtagggacccaaaaggttgagttttttacctgagatcacacagcaaatctgtgtcagagctttcgtctttccactcttttaggcacaacttcatagtagggagggattctgggtagggagacatacagtccgtgttcatggaagccccagtccaagggaagaagcaggacccagagagcctcatgatccttgtgttgggggatgggcatggggaattggctagagcttctgtctgctgtactcaatgcctgaaagattggtggaggacttggaggggtggcaggtgctgtccgtgtccaccccactctgtgcttggtgcccctgggctggagggcctgggcatcctggctctgcccccttggctcctggttcttctcataggctgggagatatgatagtctttctggctgctgttatataatctctctgtagcagggtttttttttttttttttttttttttaatctttcctgggagatgtgatagggaagagaagccagagggagactcttcaggttggggggagctaaaggagcagtagtaaggaagcttggagtgggaggtgccttggcccccgaggaggccttggggataggccctcattgattatggcccagcccctcagacccttctcctctaccgtgccctcagagggtccctctgctgtggtcgtccctggctcttatacccccagagaggcctggacctctccccattttgtcaactttctcttcctgaccagctgggccccctgctctccctggttggcactggatccagaatctcaggacttacgctggcctggtgtgggcccttggttggacactttgccacacacctgagtacctttatggggacaagggaagtccaggagcaagtgggtgggcccaacatttccctagttctatttgagtcaggccccctgcttctttgcccctctagtcgagagagtggtggccttactggaaaagaggagttgagggccttgacttaatacaggccttgacctcttggacacaggtcatcgttggtgttcatcaggttctataagtgggtatgaggatccgatgtgagcctggaacccatcatcaagggtcaggttctgagtctcatggcactgtggtgctgggattctccccatcccacgggaccatggctgggactctcgaggctctctcaggccagctggtttgaggcaactatctcttttttatagagaaggaggaaatggtggcaggccggcacaacctcagcatcactgtaattgctggtggcttttatgagccagtcatggggccggagtccggccaactgtctgtccttctgtcccagtttggtgacttactcatggagggaggggcggttaggtactagaagctgtgttctagaagctggacgtctgactgtattgtggtcgatgtcactctgtctatccatgatcacagcaggtaggatggagcttagacttcaggaagaacttcccagtggggaagctgggggggagagagatggctctaattttgcataggaaaggaggggaactcaaagcactttcttttccagtggctctcccgaaaggaaaggccttgacctttggcttggtggggtcggtgctatttggatctcggaatatttatcttctttttcctctccctgtttatggctgaaagtattctgaggcgtttgtcctggagctgtgggagaaatagccattaggcccctttcccccagtagtgggagctagataagggtctcatgtagacaggcatgcccaatgcagtccacagcatttagtggtacacatgcaggaaagtgtgcaacacatacacactggtatgtagacacccacagagcagctgctgcactgcgggaggtggggggtagtgaatggcaaagatgattaaaggattggagagttgggatggggttgaggggaccggaggcaagaaggcgaagggcatagcaagaactttgaagagagaagggctgactggagcaggagggattaaggttagaccacagatgggcaggcagagccctgtctgcaaaataaagagcatggcttgtgagtcaaggagccttggctgacttccatccctgccccttacccctcccccacgtgcccctctctgtgttcctggcacagcctgcctctgcccctcacactgaccgtgtgtccccgggtccctcctcttgggccccagctttccagatgtacagagtttcgcctttcggtgattaacacctgggtgttttggtggtttgtcgctggtctctgttgccctccccgctcaccctgatgagcaaggccactgtgaggcatcaagactacatctaagccatcaggcatctgggggtagatccttggcctaggtgatccccaaggccctcttcatctgacattttccttttcctgaggctgaggctacaagcctctctttcctgagagccaagttatgcttctggttagtcctggctggtgtggagacaggggaatgcattcattgattctgcacaggaccctgatagccaagggggcgggaggcacttgtgcctgtctgacttcttttctttctgctgtaggctgggaggggagggacatgtccgaagctctggcctgtcgctggccacacccaggtgggaccatatttactcatttaaacttaccctcccaggaggctctgggctctaggcctggtcactgaccttggcttggtgcctctggctggatgctgtggccactctcctaggagctgagcagacgaggaaaccatgcagagggagctttttttttttttttttttttttttttgccccctggtcaaaggagctttaccctcagcattacccctcttgcccaactttccagtatactttgaagaccaaaaaccacaactttttaattttttttgaggtaggatcttgctctgttgtccaggctcgagtgcagtggtgccatcatggctcactgcagcctcccattcaagcgatcctccggcctcagccttccaggtagctgggactccaggtgtgagccatcgtgccccgcccaaaaaccaaaacttttgagatcccaatgaagagaggtgatgggttctcaaaagggaggaaggaaacttccatttcttatgttcctgtgtgccaagctttgtactgagcatgggaatataagaagactgtttctctctaaaactgtttttttgaattgggaaactgagtctcagagatgtaagtgacttttaagctttcctagttatgaagtataaagggcttttgtctgagattaaaggagagatcctgccctgcaggacggggcaatggaaaggaggcccacggagacctgagaggaggaggagaaattgaagggaagagaaaaccaggattcctcagcagagggcagagaatcagcctttggtggcaaggtgaggagggtattgttttgacttgagtgtcatggagaaagcccccaaagcaagggtgtgagggcaggaacaaatgacactccgagacccctcctgctgtccctgtgagctgccgcatgggatgaatgagaagagacactagagtgggaaggcttggaccacaagaggctgggcttgtctcaaggcagacacaaggccaatgtgagcctcccaggcccagacctggggaatgggccctggaaggaatgtgctagaactccccggtggagggagactccctcccactcccatccaggttgtaagcagaagccctgtgcccaacagtcagtctgcctctgccccttatttctggtgaccttgaggaagtccctgcccatctctgtgtgagtttccatacctgtgaaagggaggtggtgctacctgcctcacatgggaagggaaggagtttccgccagaaaaagtgtgatggttgcatcttttctctcagaccttcagccccagcctggcccaggacttgcctgctaaggcagctacccagaagcaggggtgggggcaaggaatgcctttggtgtccagggtagggattgaggaggccttgagggttcctcctggcctagggctccgtttggccctgggatgggttgggaagctgagcccagccctcccctccccatccagccgtctccttgtctcagaacctgcctcctccacacttagccccacgagtcttgccagatccctctggctgcatgcttgcttatccctcgtgattctctcatcctcagcccaccagcaaatacctagggttgagggttgagagaacaaagaatacggggagagcccatccctgagtttcaagtagaaatgcacggcaggcgggtggagtgaggagagtggggcttggtctcttttcctggggtcttcccactccagttggatcaagtaacaagggaatagagcaaggggtttgagggatgacctcaaaccttgagattttccctttaaagcatgtgtgtattgtgcttttggtgagggatgatggttggggtagaccaggaggatgggatgatctgaaagtgggtttctcagactttcctgtcacctctctccttaacctatgggccctttcctccagccaccaccactgcctcctctatgctgagtctccttatgcaggcctctggggcccatgatggctgggtggggacaggtgtcctagcccagctgctccctcttatctcccccacctgtcagcctgggggtggggagctaagaaggaggggagttaggggaactgcttagcccctcacctgttctgaggggtggggccctggttgtaaactgtagcaggggagtcaagagtagacaacaggcaggacttcccctcagaggaaggataactccagatcatagtaatggcaaggaaaacttggtaggcagaggtccttgctggcaaaaatctgaggggtccctgcacggcatcctcatgaaagggtgagaagccaggtattggtaaggagcacggatttggcgacatgtatctgcatagccttgtgcaggtactgctctccccacccccttccttctgggcccccctccatctggctgggcatcttagcctcacctggcacctttcctgaaagcagcaagctaatcctgtaagagctgcctggctggccgcctcagcaggcccacgcagccacaatgcccgccctccctccgctgccaggggcttagaggactgtccttcgagttagaaggagacccagctattgccctgaacggcccctttaaatcctcagtggcttctcgaggtcatgatgtctctaggaggatttgctttccctgattggattggcctctttcgggtcccctgtcatcatcgtaggtgaacccttcatgttttccacctcccctttcctcataattggtgctgtccagtctgagggcccaggccttggactctttcccctctctcttagctctcatgtcccagcaatcagggctcagacccccttcatctgcttcagccagagcagccctgtctcagtgctgtgggtgagaagaaaggatcttgctgctttaaaaaaggggacgaacactgcccaggaagagaatgcccttctgagactgtctgctgcctgcctctctccatttttatctcttcagcctgctcttcctttggccaggggcccacactcctcattaccccatgcacttatttccatgggaagtccctcccctgatctaaccattagcccacccgctgcaatggcaggcagcccagacccagcactggtggcattatgctcattccaacggctctcaagctgacccgcccccaaggccccagctgccactttcacttctgtctcctgagaccccagagggaagttgtgttggggaggtggaaggtgacacactaaccgtcccaaccgcccccacctctcctcagccagggcttctgatagccaagggcccctgtccattgctcttgtttagatgaccaaattgggttaggtaacagtggaagattggctgcggtgggagggatggccgttagatagcaggaaggacttcctaggattggagaccactgctgggcttcattgtttcagaagatatgggagaggtgtagatactctggacaaatgtaggtcagacttaaaggtaggtaggagattggttgtctgcagctcccattggttggcatacaatgctggggcctccatgccctcccacgtgtcaccagcctcgcatgcttggttggagggcttctgacaaagcaagtttgagccccagagactactttgagtccaaggactcagccctgagaagttctttctgtagtcttatatctgtcctacctgctgtcctgggccatttactcccaccctgcactgtggatgcgttttggaaatggagctagaaatggaagtaaaggacagctcacctccctcctgctgctgccgccccaaccttagcactaaagaggggaatgggattcttctcctgtgacgccccaaggcagtgacagagccacacttcaccctgtgaatcttaccaaactcctgtagctgccatgcttgcttattcctcgtgatttcacaccccttccccatctctgcctagacaagagtaggggacccagttggactgagagctctatactgtatcactgggagttactataaatccaagaatgctttctggaggggaaagatgggaacaaaggccagaggtgccaagaactccacttggtgtccgcaagtgcctacggatcctgggtgggggtgacccaggtcctggaatgggaagttgagcctgaaggaataaggtcagagacgctatgcaaatcctcatgcaaatgagtggtggtgagtcattgcagctcggcctgctgggatggagtatgaagacagccttaggcttgggttctagagctggtcccaccagggaccaaacagtgaccttgggctagttgctgctcagtaaccacaagcaggtgggtctgataggcattcccagtgtgtgaggggattgggatgactgagcctctgccacaagggccttgtgtgccccacttggtacttgttctggctgaccagagcctttgtgaacccttggccatctgttggggggttactgtttagaaggcacctgccccttcaccagccccatcctgactgtcttctagcgccctcattgcctttcctccccagcaggaggatgacagacccagccaggccatctcttcagttcctctccgtgacttacacaattctgatctcccttccctttgggcctccccagagagcacaggagccatgtgtttgggccagaagggcatttgggtacctagtccacccagctacccataatactggccagtggggtgaagcctgtagaaggcagtgacttactcaggatcacatcttagaccagagcagggactagaacccaggtatccagaatcccagcttagagaccccatatttccctaagctgttcattgccctacctcacccatcccttctctactgggactcaatctcctgttgcccccaaatacttctgagaacagtctggctagctctaggagcttgttttgtgggggtgcggggtggttacctaggagccagcccagaggccataaggggaaggtcagagctgcagtgggaagtgctggaccctggcggacaggctgctgccttgtagagagccaaatggcctcacagctgctacaggaaggatgagagctagactacaggaagaacaagctggggtgaggaagacatggaggaggctcaggagacagaccctcactggagaggcatctcctgggcagagaacaggatgaccccatcccaggagacttgccagggagaagagggcgggaaggctagggtggggctcgggagagttgtccagcggaagctagggggagggctcagccctgctctccataccgtgtgctccccttggcaagtcggttcctgtcccttaagctgagactgcagggcctgccccccatttgagttcttagggtgcctggggcctgagaccacccctgccctaggcccagctttcctggactgcctgcccccacaaaccaacagcccgcccccaggtcccctgtcggtgagttaaaattagctcagtgcccaggctaaaaatagcccctgcccagccctgaggctgctggactgggggaggggagtccccgagggagggaaagacggtgggaaccagggatttgggtagtgagcctgccagacagaactttgaagggttggggctgggtctctgcctttgagatcagaccctagaagcacttctggggtgaagaaaagaggctgctgtgggagggggcggggacagagagggggcagagggaacggagcatgagaaggagacccgagaggggcccaggagtaggggcgtggggagcaggcctcgcaggaggggttgtgagaattgggctgtgtgtgggatggggagagggacaatgtgaggctcctgccttggctcagacttcggaggggtaatgccccccacttcttttgtgaaggaagagctcactgtgtgaaccacagaatgatcctggaccatcttgcctgggtgtttgggggcatcaccggcttcaccttcctgccctgtctcccagagctccttagcctgtgtctctgtactagggaggaggtcccagggctgaagttggaagagagaatgactaggaaggttgtgaacctgagggtagactgggtaataaggcagggcctggggattcagctgggcagctgtcgtccttggtcctcggtcctcacctctgctgcctctcagggccggcctgcctgctctgggatgctccttctggggctgtgtctgggtccagtccaggcccccaagagcccccttgcctctccctgcccttgccctgggtgggacctgcccctcccttgtctgtctcttggctgcactgcaagttctcagagggcagggatggtgtcctgttgagttattcccccagcgctgggccaggagtcagtcctggaagccgttgttgaacctgtctcttgttctctacctgcttctctctgaatctttgtctctgtggtctcctgcctctccctctcctctagccctctccttatctgtctctgcctctgccccataatgccttctggcctcgctgcctctttttctctgtcatctttcctgtgtctgtgtgtctgtcccccctctgccaccctcttctgtgtctgcctcacccacgcctcctccctcgttagtgagcaggctgcttgaggctgcctgactgtgggggtgacaggtggattggattgtcaccccctcccccagcgcctgctgcttatttcatgccctgcagcccagccacagggaaggggcgggaggagggatgacagctgtctccagcgcctcctgccttcccctccagtcctcagcctgcagcccggagcagcctgggaggaagagatgaagggcctgcctaatgagagctccctttctcaccatgaggaagagcaggttgaggcccactgctctgtgatgcgaggctgctcactcagcttctctgggcatctgctcccttttgacctgtgctggtatgggagctctggaagcagatgccctgtagtttctttgagccttgggaccactaggatgggaacagatatgggtggaagggtgtaggggagaaggacaggtaggtactcccctgccaagagcaagaaagagaggatagaggctggctatcggaaaggaattcccctgcagctccatgggaaggacagccctgctcagccctgctgcagctgcaaggaggctaccctgacctctccccttcaccgctctccccactggccccaggccaccttcacacaggaactgagatagcatcattctgaaacccgagaatggtttgaatattgctcaggtacccagaggtgttgcattgggggaggcagggacctgtttcttctcccatgccccctccaaaccagtcctcctttacggtacattttgcacatcatgtgtagctcatttgcatgtaaacacaacccacaagttctaattgggtcggtacctgggattggaaaaatggctatcagtggggtccttcttgattccccctggtcccctcagctctctttgtcaagggtgttgtcagaggggcctcctgccctgcatcctccctgctgtccatttgtgaaggcttctcctcagccacccttctccacagttggtgagtttgtgcctgtttccctctctgggcatctgctcccttttgacctgtgctggtatgggagctttgaaagcagatgccctgtagtttctttgagccttgggaccactaggatgggaacagatatgggtgggcattgccaaatgtcctgcccatctttgcttctcccatgtccaccaggaaggccctgcctctgcctgtcccaaccccctgccacccacaaggttcactccgccccacccttgtcctgtccacggagtcaggtgaatcagagtcaatcagccagagccttgagagcctttgaaggggaacttttggtgacatagatactgtcagcccgaggagtcatagttgtggcctgaggtcaggattgggcaggccctggggccatcagaacaggaaggccatcctggccaaccccctgtctctttggtagcccaagtcctcccaagccctgggctccagatactaggcagggtgaaggagagatggttagaagagaagcagccaagggccggatcatctgcgagggcttcctagaggaggagtagaccagacaggagaagaatggggccaggtgaggctggagaggagagactcacatctggagaacagatgcccaggcctctggctcctgccagttggttaggtaattaggcagagggctaattaaggaggtccaggtgttcattaaaacctccctaattgggtaggagggaagtttagctaggataggcctccaaaccttggatagggtcaggttagggtattttgtgcctgcctaggccccagctaccccttcttccaaaatcagggttgagttcatgttcttgcctcagggctttcaaagaccctgcagcaatgtggaatggatagcagaaggaaaaaaggtcagtatagactgcatctgctttgtagaggggtttgtggttagatgggaggaaggactgcctaagacaggggcatctcctcctctggcagtgttggcacagaagtgggagcagcagtggggaaaggggcctgggaagcatggaattataaaaagtgctttgggctaccttggtagggagtggggatagatggggcctagtctttttaaccctgacttctctctgtcagacgatgctcagtgaatctctgttgcttccctgccttctcagccctgatccctctctcgtcccagctcccccagcatgaggcgggggtggggggggcggtgtaggagatcagccagggagctggttgccaggcgacagttgcctaagcaaccccatcctctccatctccatgtgctcagggctgctccttagaagactttagagtctcaccctctgcaccaaccaacctgagggtggggagggttgaggactgggataccaggggtggttggagggtaggtggtgtccaaatcttcaggggcagttgggagagcaagggttctagctccatagaggatagagtgagaggaactggtactgcagcaagactgttggaggttagactgcaagaaggacttctcacagcaccacaacaatgaaatagtattttcttcttttcaacagacattttctcagctcccttcttataggagatagagtagtgaaaaagacagatgtgattcctgccctcatgaaactttagtctcatagaggagccaggcgttaaatagaagcacagaatcatagttattcacaattgtgataaatgctagaaagactgcaagaatgacttttctgagggtcatgagaacaaagagaggcttctcttccagtttggaggaagaggcagtattggtcatcagctgacagaggttacatctctgcaagaattcggttatgaactaaaggtggtgagagggagatagtaaaggggagagaaggaaggtagatgctgtaagccagaggagctcagcagttcctgcatttaacagtctagattgggttttcaagactaggccagagaatcccatttaaaaagccaactatttgtagccccctccccttgccctctgtgtgccctcccctaccttccctgccaaagcccacaccactgtagctctagaaagcacagtctttggattgcactgggaagcaggggagctgaaatccctgggctggagcctttgcaatgggaacttggcagacactggggtcacaggtgaggaatggggtgtctggagctggtttggggctcaggtgtctgctgggccactcagggctggctgggctggtgttgctcttgtcccagggtaccagtaggaggcccagggcccatggagcacgaggtcgaggtgggtggatcacaaggtcaggagttcgagaccaacctgtccaacatggtgaaatcctgtctgtactgaaaatacaaaagttagccaggtgtggtggcagacacctgtaatcccagctacttgggaggccgaggcaggagaatcgcttgaacccgggaggcagaggttgcggtgagccaagatcacgccactgcactccagcctgggtgacagagtgagactctgtctcacaaaaaaaaagaaaaaaaaagtcaaaaaaattagcttggcatggtggtacacactcatggtcccagctacttggaaggccgaggtaggaggatcacttaagcccaggagtttgaaccagcctaagcaacaaagcaacaccctgtatctaccaaaaaaaaaaaaaagaaattattaataaattacctgggtgtggtggcatacacctgtattctcatctacttgggaggctgaggctggaaggttgaagctgcagtgagctgtgatttgtacactccagcctggacaacagagcaagaccctatcttaaaaaacaacaaccaccaccaaaaaaaaaaaaaaaaaagaagaaggagaagggtagggagtcgtttgaagcgcaatgcatttatctgcattgttttctgtagatatccaggcaaagcagaagctctccagctaggctggggagcagtcttggtaatgggatggggccagtatcccagctcctcccaaattgatagattccttgccttccctctcctccttccctcatgagcaagagaccaaggctgaactttagcatctactgtggtaccgtaggggccatgtagagttgggctggaaaggctccagggaaactcagcagccattggcagtgggagctggggggtaggggtaagagttgttctctgtcatcaaacacctctccccaggtagtgtgcagtgggtgcagaggatcagacagtggctgggggtctacatccctagactctacagtagggtctctgggcatggggctctatggaaggggagctctggaggggagggcgggccttctctggtccaggctcctcccaggacccaaatagagtggctttagaaagcatgggccccagttcactatcctcttccaacatcttccagaaagctccacttttgatgcaaggactcctggaatcagagctagagggggccctgaagtcattccgtgcctccgtcccatcttgggcccttccagtccccaaggactcacccagcctatgtaggcactgcccataccggagagaatgcgccttttctggcccaggctgtgctgccatccttgagccccctcctatcctatggtgcctcctggagttgttcagtgcaggggctgtttctcatcctggctttagcatggagctgttcaactagtgggctgtgagggggttacaggtgtcctgagacagcaggttctctgcctggtgcctgcatccgcctggctgccagtggcctccccagtgtatgtcatttggccctgtattttctctgtctgcttcaagatgtacaaggttgggaagcactactcttagactgagcttgggttctagatgtggtccatacctctagggcaggaatcagcaaactatggcccgtggaccaaatctggcccatgcccatttttgtaaatatagttgtattggatcacagccatgcttacactcattcgtttatgtgttgctgtctgttgctttcatggtacagtgacagagttgagtagttacaacagagactgtatggtctgcaaagcctgaaatattactatctggcccaaaaatttccatctcctggtctagaggaatggtttcattgttttaagcagcacaactctttcctcaaacaaaaatcttaggctgggcatgtccaaaggtagtgagttagctcaattgattgttcacagtcagttacagatcgaactccttgttctactctttcttctcttctcactactgcacttgactaggcttataaaaataaaaagaaaccttaggcttaagctcactgagtaaaacagattagtgtggaggaactctagttgaagggagatgtgggtgctacaaccccaagccccactacaggactccaggccccagagttccatgagtcggtatgaggcccactgctctagacctgctctggtatgttcttgagccaggggcaccagagacatcccatcctggcaccaggtataccatgcttgttgttcactgactgggcagatgtcctctcagcgttgtctcttctccaagcttcagaatgggaaccatagttctaggccagaggagcagctggagcacccaggtgtctatagtacaagcaggttctagagagaagaatgggccatgggatattctctgagacccagaccttggaagccaggaggtccatttactctgtcctggagcctgaggacagcaatgaccgaggggaaagagtctgggccttggtgtgagctccagcttgtgcctggctgtggcataccattgcctcaggcagacagcattgcctcatgttgagggtggagctcagatgctgccagcctctcacaggggcgctgtgagtctggcctgtgtgcccagggagcagggctgggggttttgggggctcagagtcctctcatgaccctccctttccaggaggctgtgcagaaggtatcctgcagaccatgaactgagcactgttcccagaccgttcatgagcacagtgtaaggtgtgccgagacccaccacccagcgagcccctcccctccgtagcactgaggacccccggagaagatggggaggaaaaagattcagatccagcgaatcaccgacgagcggaaccgacaggtagggaagtcctagagccgtacgaagtgggtgagggcagggagcaggcctctgcctctactcccttcaggcattccaagagggctttgtggaagaggggaaactataagctattacagaaggggaagggagattgggagaagaggaaccccaacctcttcgcagctcttggagctctgcgtccctggactccaggactcttctgctgccacagctagatgagcccatgttcccatcccagagccatatgcaagccttaggtcatacccccaggcactcctcctttcccaacaggaatcctctccctcttcttctccactgacctcttcatagcctccagcacagaggtgtggagttctgtccacctgaatcctgccccttcagtgagtgggctctgggctgtatctaagctgtgtgttggcctacaggcactagcctggtccttccccaaaccagggactcctgagaccaggggctgtgtcacactgagaatgggggctcctgagggcaggggctatgtccagccatctgtaggctgggactcccaatcaggccttaactgagccagatctggccgcccacccatccttctctgcaggtgactttcaccaagcggaagtttggcctgatgaagaaggcgtatgagctgagcgtgctatgtgactgcgagatcgcactcatcatcttcaaccactccaacaagctgttccagtacgccagcaccgacatggacaaggtgctgctcaagtacacggagtacaatgagccacacgagagccgcaccaacgccgacatcatcgaggtgggcccatacacacaggcaccaggatatacccccgcctgcatccacatggacacgtgcccacgttgcatgtacacgcagacctgcctatgcacacacactggtatacatgccccttgtagcccctcacctgtgcgcacacacatgcaaaccctccttctgtcatacaaacccagggtctgaggaggaaggaagggcagttcaagtgaacaggccagtgccaggctgccagcccacacccaccctgccctctccaagagtctgctgtcgtccagtgtgatgtaacatctctatcctgccttcttgcatcctgtctttctctttgtctctctttccccgcttctccatcttctggtgtgctcctgcacctgcctcttccttttttaaatctccctctttgtttccatctctcctgctgtctctgtctgtttgtgggcccggtagttctattttctgtttcaaagagagccaacattgtgaactgttgaaggacatgagctttggaattcagttctgacctttaccggccacatggccttgggcaggtgcttaggctttcccgagccttggtgcccacctccacaaaatggggtcagtgcctgctttgaagggtgctgtgtgaattgaatgtccctgcttctcacactgaggtgcgtgcaccttggggatacagaacttgtgctgacgaagagggtgcccgggaagccacaggcctactcagagatttggaggaaagtcccttatttttatgttagagaagacagatttactctagactagaaggtaaaatttgcattcattttaaagacaaagcaagtatctgtaaagctattttgagcatgaagagggcagctttggggtctactgcagatcccccagatgtgcctccactagaatgtagggtggtcacagtagggactcagtcagtgttcatccccctttccttttccacatcccattccccgctctctctgtctccatctctatttctctcttcctcctattctcctaagcagagcccagggactgggagcagagcccccctgcctacctccccctggagaactcagtgccttctggtcagggcttaccacagggtggtcgggcagggactgatccatggcaccagctccttagcccatcccctggaggccccatcccctggaagccccttccctgcctgtcactttggaagtacatgtctccctgccaagtgcacccccaggttaggctcaccttccagccttgttctctgtgttccgacagctcccaccaagcccatcttcagatcttcacacgatgccccaggaggcactgtcagtggggaggggccagggagatgctgggaaccctgaagaaggaggtcggggaagagtagggggcccttagggaggggctggaaggaactccagcgaggcgggcgggaaggactctcacccagctgatggcagtggtgcggttacagaccctgaggaagaagggcttcaatggctgcgacagccccgagcccgacggggaggactcgctggaacagagccccctgctggaggacaagtaccgacgcgccagcgaggagctcgacgggctcttccggcgctatggggtgagccccactcactctgtctctgttggcccccccttccggccccttccccccaggcgctgcacaagaagcacagggaatgtgagagccctgaggtggacgaggtgtttgccctgaccccccagacggaagagaaatataaaaagatagacgaggagtttgataaaatgatgcagagttatagactggccgtgagtagtcgcatggagcagagcctccctgtggtgcatggtgtggcttcgcgccctggctctcggctgccctgatgggtgctccgctctgagccatgctcgggttcttagtgaccactgaggaacctctgaccttggtcatgataaacccgcatccctgctgagactctactgggatggagcataagttggagaggcctggagtgtccccctctccagcaagaagtgtgtagatgacatgagatccttagaggacagcaaagtggagtgtgctctttgtccagatgtttttttggggggagaggcctgcttgggcttgctctgatagcccaaccagagacactcagccttgtgtagggaaagcagaactgctgaaggggaaggcagcgaggtgggggtgagctctctctgcagcaggccagatgggtggagactgcaagtgaaatgatgtccctacccgtggtgcaagcctttaacagccgtgtgtgaatttgagtctgttatcagggcctctaacctgctccccgtgtgtcctgcctggctgaggactaacccacctccactagggggtgtccctggtcctgtctgcagtgagcagagccttgttctcattctgtgggccagaaatggacccagagtatggacccagagtttctccccaaagttcttccttggtgggactggcaggcaggactccacaagggcacagggcagggagcttgaactgctggccctaggatgcgtagcccagaaatgagaagaacccttgcctgccctcccaggaaaagtggactccatggaaggggtcaacctggcctgatcctgcccctccatctttctgtctagtcaactgtcccggcccccaactttgccatgcctgtcacggtgcccgtgtccaatcagagctcactgcagttcagcaatcccagcggctccctggtcaccccttccctggtgacatcatccctcacggacccgcggctcctgtccccccagcagccagcactacagaggaacagtgtgtctcctggcctgccccagcggccagctagtgcgggtgagtgggctggcaggtgggtaggtgaggtggaaatgagatgtgatggggactttgggattccattttcaacagcaagtatttctcttcacccaccacagcattccgccatttgtatggctcctgagggaagggagtatgactcttcctcctggggtcccctcttcatgttcagtccccaagactcactcttgaagcgggagtgttgtcagctcatcctggttctgtttttcctccaggggccatgctggggggtgacctgaacagtgctaacggagcctgccccagccctgttggtgagtgcagtcatccttctacctggaggtggggaggggtgcccgctcagtggcctcagggggtccaaggatcaggaacgacctagatgagaggagaggaagatcccagggccaggactggatgaagagtcagtcagagatttttaagcccctggattttgttttctgtagcaatgattggtgtagatgatcagcagagatggaggctcagggaattctgggcaaactgtgagaatgggccagcatttctagttggaagggaagacccaagtttttgcagttgagtgtggttgggatctggaggatgagaatgccgggcgttccctagacaaacaacagggacagactcacatagacactcacgcaggcactcaacacacataagtgcattctccctcttacagaagtatccagatgttagatgtgcatttgtgagcacacatacataagccacagaagaggccgggcatggtggctcacgcctgtaaacccagcactttgggaggctgaggtgggcggatcacctgaggtcgggagtttgagaccagcctgacaaacatggagaaaccccatctctactaaaaatacaaaattagccgggtgtggtggctcatgcctgtagtcccagctactcaggaggctgaggcaggagaatggcttaaactcaggaggcagaggttgtggtgaactgagatcatgccattgcactccagcccgggcaacaggagcgaaactccgtctcaaaaaataaaaaaataagccacagaagaaaggctgccccccaacccctggcagcggacagcccctcctaccctgtgccgttgtctggctgggtgactgtgacttcgaatgtcacgattgacgtcaccctgccattcctgccattcccagagtggtccgggaattgggatggaggcaggcacacacttccagggcaacagcatgctcttaggggacagagcaaggaagcatttctgactgtggtcactctcacatccttggacctcagcatcccccagctcagttttggggcactgtataatacctccctggtgataattatgtcacagggtcaggaaattaaaggggtgggtgaatatgtcaccctcttcaaggagaaggccagagaaatgcttgtagacctcaagtgagcagtgatccatagaggcccttgagtccagcatgtggaaagtgggagagagccctcacttggcctccagccagctgtgtggccctgggcaggtcattacacttctcccaagcaggctctagtttcctcttctgtgaacagggctaatgtcctgtctgtcttgcagagttaatgtgaggattaaataagataatacatgtgtgaaaggcctgtgtggattgtagaatatggagcagatataaaagatagttattacatttgttattaccaggctaattatggtggtggctgtgttatgtgtctcccagtgccaataacaccatcaccaacagtgaatggcttgtttctcccaagctgtgggcaacttgtcacatgttgatccaaatcacatcatccacccccagctcacggcaaatggagcagtctgagtggttgttggtttgtcatggtgaccaggcttctcagtgaggcccggattccaggctgccaccccttccacatcctggtcatggtgggtcctgtccggggtagactgtgggacctaaaaatgctggacttcctgtctgtggagactaaagtagagagaagacagggagaggcttgggtacagaagaacctcttggccgtcgcagagcctagaggcaatggctgctttccagttcttcccactgacttcagagtcccatcaccaagccctatcacatgtagcttggagttaggggaacgaacctaaagattcaggagtaaggggtacttgcctcccattattctcaagacatgaagtgttcagggaatatcagatagctcagcccccactcaaagcctaagcatggctttgagaggttccgggtaacaggagtattggtgtggggaagttaatagggctgaaggataggcccatgtttttccttttaccctcttgttgtcacttctccagggaatggctacgtcagtgctcgggcttcccctggcctcctccctgtggccaatggcaacagcctaaacaaggtcatccctgccaagtctccgcccccacctacccacagcacccagcttggagcccccagccgcaagcccgacctgcgagtcatcacttcccaggcaggaaaggggttaatgcatcacttggtaagtgggtgtctgggccaagggtgggggctggggaatggaagagtagggacaggggaaagagcagacctctagcaggagagatgaaggctagccagcagttaggacttcccaagataaatcttggaaccatggctttttatgagatttttcttcccagagggccttttaagaggttgcagcacaagaagtaccagcctaaggcagtaaaaaggggcaggaggtgagagagaagtggtggggaggatcatagaaaggatttgccactatagcaggagggatggggattagatggtgagcatttcctcactggtggagattgggatggagcatctctggaaatgagtcaggacggtggagagctctgcctttgtaggctgggtagagccaccctactcttatgcagagaggtgactggaacagctgtggggacagaggtgtgggggagggcagcggccagagactgaacatccccttggttttatttctgctctcagactgaggaccatttagatctggtaagtgaggctgtgagctctttgctgtggctttgaattctgggtattgctctgcggtcccccagcatgaagtacgtgtgcgtccttggcctctcgcctgtgcgtgaactgttgctgtttctttgcttagttgccaggagctgtgcttaggtgccaagtgggattcaaaggtgaatggggtgggggtgagaggtcagacgtgtgtgtgtgtgcctgtgtgtacatgaatgtctgcatgtggtattatgttcattcagacacacctttctctgtatgtacgtgtgcgagggggagtgggccagcccagggctcagaggtcccaccctgatgcctggactaggccctggactagggggctggatcccactagtcctctgactccactcaggcccacactgcattcttgggatccaggacaggatccttcttaggagggaggtcagctggaaggagaagctggtgtttcaggggaagccaaggcccaggcccaggctggacttgtccttcttggtggcagcttcccacctcccctgtctccctgtgctccctcctgaacttaagtccatgacacgggcactcagaggcatgcacagctgctcattttcctcctctgtctcacacacttacatactcacccccagccaggagtggggcgggggctcctccctccctaactccctgacgggaggccagagaggctggaaaaggcaggcaggctttggcggccaacacggcggcagtttcggccccagcatggagttggaataaacaagtgactcagcggcagatggagctgacagccccacacacgtgtgtgcatacgcgcaggcacacgccacgccaggccccacattcccctcgcagatgccagcacgcctctgccggggcgtgtgctgcagtgtgatggatggagagtgggctccagagagacaggggatggacgatgtctcccttccctcactctgcactgggaggctgggcgagtgttggtgctggggccacagggccagtacacgtgccttcatctttgcacgtgtgttggtgtcagtgaatctgtgtgtgcatgtttccctccatggatctgagtgtctctgtgaatgcaccaacgtgtgtttgtatatctgtgggggcctccgtgctaaggcaccccgccttggctttgggattcaggaaccccaccttggccttgggatggagggccaacataaagctgcccacctgtcagccacctcctgacggacagttttctcctacagaacaatgcccagcgccttggggtctcccagtctactcattcgctcaccaccccagtggtttctgtggcaacgccgagtttactcagccagggcctccccttctcttccatgcccactgcctacaacacaggtgagtgttcatgtgacatgtgcatgtgtgcacttgggcttggggcaggcaagtgaccagacagaaatgctagttatcccctggacaggccacatctgaggagggctactgatttgggggaacccccacctacttatggttaacaggtttagcaaataaaagcacagaatgcttttaaatttgaatttcagataaaacaagtagttttttagtacagatatgtcccaaagacattcttctgctaatgtatgtcccaaagacatattttatttttgggtttgttttttttttcttttttggaacagggtttcactctgtcacccagactggagtacagtggtgccatcctagctcactacagccttgaactcctgggctcaagtgatcctcctgcctcagcctcctgagtagctgggactacaggcacatgccttcatgcctggctctttttacattttttttgtacagacaaggtctctctgttgcccaggctagtctcaaattcctggtctcaagcagtcctcctgcctcagtctcccaaagtgctgtgttaccgactgtgcccagcaccaaagacatactcatgctaacaaattatgtattgtttcatctgaaattcaaatttaactaggcattggtttttgttgtttttgtttttttgaggtagtctcactcttgtcacctaggttggagtgcagtgttatgaccttggctcactgcaacctcttcttcctgggttcaggtgattctcatgcctcagcctcctgagtagctgggattacaggcatgcgccaccatgcccagctaatttttgtatctttagtagagataggtttttgccatgttgcctgggctggtctcaaactcctgagttcaagtgatccaccaaagtgctgggattacaggcatgagccactgtgcctggccagcattgtttattttttaaaaagtacttaatggaggagggagcccctgtcctcagaaagcctgcagcctgaggacgagacaggacagaggcaggtctgcagatcattcaggctgaccaatctctaggctgcaggtatggggagtggtgagggggacgtggtcagttcagaaaagcttcctggaagagaatgaaggaataagagaaaagagacaaggaggctgaggaggccagagagaaagcacagtcagggtcagtttgctagcttcctgggaaagccaaatgggggctccagggcaaggcggagggggaagaacagcgtctctcctctagttttggcatggtggtggaatgatgattggggaaggaagaagagggaagaaggttagagaggggatctgaaggtaaagagccacttaaggacatgagaaaggtctctggatagaagaattcagataggacacccagtgcgcgggctgtcctgggtccctagggccatcctggcctgtgtcacccacccactcacacctgcgcaggaacagtctgtgatactctcagccatccttgcctgtatgctaagccactgtgtcaagaaggacttgccagtaaggaaacgccttgtccccttgtttcagagcattcatgtggctggggaacctgggctatttccagctagagacctctgccttcctcaggttctctcacatgtgaatggttatgtcaggccagttcctttgatgagtttagtctggaccaaaagactcataaacttctcccccttccccaagcctcccagagttgaaccagccaccagtgcaaataaccacaaaatcccacctcctccccacatgtaaaaatccagaacccaggccaggcgtggtggctcacatctgtaatcccagcactttgggaggctgaggcaggaggatcacgaggtcaagagatcgagaccatcctagccacatggtgaaaccccatctctactaaaaatacaaaaatcaactgggtgtagtggcacgtacctgtagtcccagctgctctggaggcagaggcaggagaatcacttgaatccgggaggcagaggttgccatgagccgagattgcaccactgcacttcagcctggtgacagagcgagactccctctcaaaaaaaaaaaagttcaaacataaaaaggctgggcgcaatggctcacgcctgtaatctcagcactttgggaggccgaggcaggcggatcacgaggtcaggagatcgagaccatcctggctaacacagtgaaaccctgtctctactaaaaatacagaaaattaagcgggatgtagtggcatgtgcctgtaatcccagctactcgggaggctgaggcaggagaatcacttgaacttgggaggcagaggttgcagtgagccaagatcacgccactgcactccagcctgggcaacagtgagactccatctcaaaaaaaaaaaaaattagccgggcgtggtggcacacgcctgtagtcccagctacttgggaggctgaggcaggagaattgcttgaacctgggaggtggaggttgcggtgagccgaggttgcaccactgcactccagcctgggcaacagagcgagacttttgtctcaaaaaaagggaaaaaaaagaaaaatccagaacccagccctctgtgtaggaaagcccctcgtggcaggttaagagagctggagggaccgcctcatgttgagggaccagactctggcttgtgtgtctgtgtgtagttaccacccaggtgtctttgagccccttctcccttgcatgtgcacccatgtgtgtgcccagccccaggctacgatgtcctggcaacttcacagatggctgcttcagaagacacacgctgtgggcccgtctccccatctgtaagaggagtgggtagacaggaggtctatgaggcttttccagccctgccactgggcctctggggcccaaccagaaaaaccagccctgagggtggggtggcctggggacagggacagttggcggagggcagctcagaccactttttagaccacttttctggagctgtttatcaggtactctgtgagggtggttttctgtttttctgccatcttgttgggcccacagtcttttgtgaagcaggaggaaagttagttggtgtcagccaacctgggacaggcactcaggaaggctagacttaaagattctcatctgtcactctggcatgaaagcagtttctgcccctgggccgcccttggagccctgctgggaagtgtgtgagatttctcatctcctctcagagaccacaggctccctttcctcttgttacaggagcagctaagcagatctcagtttaaacagcaggtgttttcaggtgaccctaggtgtgtaaacaaaaccccagtgaacacattgctgtttagttgttcactgtttacagtccttggctgcagttcaagttccggctgggggtaatcgggctatggtaatgcctcatgtgagggcctggccccttgttgacactggccgcagaggcctggctgtggtggctctgggagcagaccagtaggctgccaggtggccttgggccatggtcctccttggggagccaagcctcccagtagtagatagggctggaatctggtggaacagtgcagggctgggagctagtctccatcactcactcactgaggggccttgggcaaggcactgtactgttctgggcttggcttcctagtttgtacaagtgttagaaatagttgattctggccgggcgcggtggctcacacctgtaatcccagcatattgggaggccagggtgggcagatcacgaggtcaggagttcaagaccagcctgaccaacgtggtaaaaccccgtctctactaaaaatacaaaaattagctgggcgtgatggtgtgcgcctataatcccagctactcgggaagctgaggtaggaaaagcgcttgaacctgggaggcagaggttgcggtgagccgagatcacgccagctactcaggaggttgaggcaggagaattgcttgaacctgggaggtggaggctgcaatgagtggagatcgcaccactgcactccagtctgggcaacagagcgagactctgtctcaaaaaagaaaagaaaagaaatagttgatcctagggcccgtttctgcccttgctctgcttttttaataagcatttcaaaactcctgaccaacgttaggagactagagccaagcacagatccccctctagagagatttaaaggtaatagagtcctggggtcctgtcttagctctgccgctggctttctccatgacttggagcctgttcctcaaacttgaggctgcagttgcctcatttgtaaagtaataatagataaatcttttgattattttctatgaaccagatactgttctacatgctttttgtgtattaacttgctcagtcctcacaacagctgtgtgatgtaggtaggattattacctccagtttataggcagagtaagtaacttacccaaggtcacatggcctaagtggaggtagcctggaagtttgacctcatagctcatgcctttaaccttattgctatattgcagagataatactgtcttccctgcataaaaacaaagggctggagcaaatgactccctgagtaatagcatactggtggggtattgggatgattgaggggtgcgttccctatcacagcactcccactaccacagtacagcctcagggaggacattttctttctttctttctttcttttttttttttttgaaacagagtctcgctctgttgcccaggctggagtgcagtggtgcgatctccactcattgcagcctccacctcccaggttcaagcaattctcctgcctcaacctccctagtagctgggattacaggtgcgcgccaccgcctggctaattttttgtatttttaatagagatggggtttcaccatgttggccaggctaatcttgaactagggaggacattttctaaactgtcccaaacaggatacagcatgaaacaatagtgctgtgtaaatcatgaaacattcagtgattctatttattctgtgacagtgcaaccatcagtttcttctttaaggtagacattttatgacgtaatgaacaccccctcatggggagatctgctggaaccttggccagctgtgctcccggcatggtacccttgcagcccctctgccccttgggcatgaggccaagacatagaccttctctacttatctgtttccatctttttatttttttaaattgttatgaaagtgatacctacacatgattttttttttctttttgagacaagatcccacaggctggagtgcagtggcatgatcatagctcactgcagcctcaacctcccaggttcaagcaagtctcctgcctcagccccctgaataactgggactacagtgcaccccaccaccctagctaatttttaagctatttgtagagatggagtctccttatgttgcccagtctggtctcaaactctgggctcaagtggtccttctgccttgacctctcaaagtgctgggattatagacatgagccactcgcccagctgtttgtttttttttttttttaagttcaacactatttttaaaaaccacctcttggtcggatgcggtggctcatgcctgtaatcccagcactttgggaggccgaggtgggcgaatcacttgaggtcaggagtttgagaccagccttgccagcatagcaaaaccccatctctactaaaaatacaaaaattagctgggcgtggtggcatgtgcctgtaatcccagccatttaggaggccgaggcaggagatttgcttgaacgtgggaggcagaggttgtagtgagccaagatcacaccactgcactccagcctgggcaatagagtgagactccatctcaaaaaaacaaaacaaaacaaaaaccacatcttttcatcctgttaaaacacagcacctcatggttattatgacttaggtttctttaactctgagtaccgtcttcactgaatttttgtggtcttcttgaattccttacatctgtcattacacactccctgtcccctcatccccacagtcctcctggaggcagctccctcataggagcctgtgtgctctccccaactccaggttcatcctcacttttcctccatgcagattaccagttgaccagtgcagagctctcctccttaccagcctttagttcacctggggggctgtcgctaggcaatgtcactgcctggcaacagccacagcagccccagcagccgcagcagccacagcctccacagcagcagccaccgcagccacagcagccacagccacagcagcctcagcagccgcaacagccacctcagcaacagtcccacctggtccctgtatctctcagcaacctcatgtgagtcctggggagactgcatgtgagtgtgtgggaagggagaattgaacgggaagaggagggacctcttgggagctgggttccctgcagggttctagtggacatcctatgaggctgtgcactgcacagtctgttaggcaacagtggcacccctgggctctcttgtacagacccaagaggctcaccctgaaccccttctgagagccagccccagggtagggggtgggaggtggggggccctgtgttgcagaagatgacatgggatggaaagagaactaatatttcttatttcccttctcttcccttcattcgaccctcttctgatcactctccatccaattgcctctccccaacaccccatcccccatattctcatcctcttgttctctctcactttctgtctggtgtcctatcacttgttctgtcactcaccccctctgtttttatcccttgtaccccatttccattgcctgcctccagcccgggcagccccctgccccacgtgggtgctgccctcacagtcaccacccacccccacatcagcatcaagtcagaaccggtgtccccaagccgtgagcgcagccctgcgcctccccctccagctgtgttcccagctgcccgccctgagcctggcgatggtctcagcagcccagccgggggatcctatgagacgggagaccgggatgacggacggggggacttcgggcccacactgggcctgctgcgcccagccccagagcctgaggctgagggctcagctgtgaagaggatgcggcttgatacctgggtactgtagcatcacctctcctgtctgccagtgtctgctacacccagggactgccccgcgtgccccctaacctgttttatttcccacccaagaggccttgtggccggctaccccttccgccagcccttctagggcagcaccaacaccccttcacccctgccaaaggcccatcttctccctccctccagcatcagtccttctgctcgatgacttcttcccctcacagctggccctgccactagaatcctggccctatggggagaggggagtggggggtgcatacccaaagcctgggccaccccctcacacccccttctccatctcctctcttcacagacattaaagtgacgattcccactcccctcctctcagcctccctgatgaagagttgacaatctcaccgcccgcccttccctgccccgggctcctcccgctcgacccccacttcctttcttgtgcttcgtgtcctgttgacggttacatttgtgtataattattatattattattattattattatattttttttaatttggattctcgctttggagagggggatgctctcatcccctctttctgtaccccccaccattttcactggctggggggctctctttttcgcgggaaggggggacactttgcacgttgtacacatatgctgcaggaagggggtggggggcccaataaggcctttgggaaaggacaggtgccgagccctgcatgtggagccctcccaccccacccccagatagagggaaataaccaaaaaactaccaaacaacagaaacccacactctagactgaaaccccaaagtgggcttgatgggtgggtttgtgtttcaaggggaaagtgaggcagaggttctgaaaagggtctctgtttttgtgttcatgtagccataggcacatggagcagaatacttaagcctggcccccaaatgcccctgcacacacacgtgccacacctgcgctgattcttgtgtgtgctgcacccccaaggtgtgtgggtgctggctgagctttgggccgggaaggcagcctgggaatctgaggctggagacaggggtttgaggtgggggcctctctggaagcacatttggagggaaagacaagagagccatgaggagagggctgaggagggcagaagggctaggcagggggcaaattgagcccctcccttccccagtttttctctaagatatacagtgcaatagctccccacccctcagttgacgccagccctgtaaagctggccacagtgtgcagggagaatggggagagggtcttcagtgaggtggctggggcgagagtcggcctggacttccctggggtgctccaggccagagctctttcattggggcgagtgtggtgaggggacgtccttggtcttgcacgcacactacctgggggagtcaacactgggatggtctgtggggtgggagggcctacggatgggtccgtagaggtcccacctccctcattcctccttggcccctctccctagcttctcctgttagctccttctgctcctgaccccacctccttgctcttggcgcccctattgtctctggctacctccttgtcccaccacctccaggctgcatcccaccttccctcttggctactgtaattgtaaatagcgacctttggaaaacgttagcggtgtaacagtccaggaaactgtttttttttgttgttgttgtattgatatgaaatgagattctatttttgtcaaagtatattgtaataataatgactcaaacggcccgtactgtacagacgagattcttctgctgttgttcttgctcccctcccctcctctgagtccgcccctccctgctgcctcctcagtggggcagtgggcaaggggcccaggggcagccgaagcacggggtcctgagacctcaggcaggattggagatcaaaccagagggggcaggcccccagcctgctctctaggatcaccccccgccctaaggggcctggcctggggtgacgtggccaggcagactgtctgccccactccttcacacaagcccagctcctctgcccaaggggtgcggcgcccccttggggtttcctcccagttggagagtagagttaagacaaggcccagttttgtgttagccgaccgtctttgcccacctctatgacccagcctcttgcagtattcccatacttgatgcagggaaggaaccagaagcagaggggcctctacgcaggtacacacgtgtacctgagtgtgttcatgagggcatctggtgtttatgtgtctgagtgtagctttgtatttatgtgtgtgtgtgtgtgtatgtctgattgcacgggtgtacttttgtatttatgtgtgtgtgtggttgcacgggtgtgcctctgtgtgtctctgaccctggctgggtgtgtgtgcaaatctgtgtgactggagctctaggggcatctctgtgtctgagtgtgcctggtgtgtgtttacaaagggagagttggctgctccagctccacagccctgggaccccaactcctgtcttccctgctcctttccctgtgttcaccctcagctctgacacattgaactgcagttggggggattggcagttagccctctgtgcttctccctgcagccctacctctgccaaggtctctccctccagggacctctgcttccacccacatatgtccacttagtcacccacacttgacacagttcctggagtaccctcttcccccaaccccagacctgctttcagagcaaaactcaagtccctcttcctccgtgaagcttctccctcagctgagcagtgatcacttactcactcttaaccccaatccgctgactgggtggggacagcacgtccagccttcccacctctcctgcaggcttctagacggagtttcaaaaactgatgagcctcgatccagggcttgaaagaagccagggtgtaatcttgttcatgcatgcgtccccagagcctcgcccagtgcctggcacatagtaggcactcaataaatgctgaatgggtgaatagttgaatgataggtgctcaataaatgaatgaatggccttcccttctcaggctattcccaacattagtctgcccacctttctaggctgggcttggccaccattaaacacggggtgggggtgagggcccctgcaattcacggtgcaatattcaccagttttgccctctgcctcataaaggcaaacctggcttttgattaccatgtgtggatgtttcagtgtcctttcttctctgtccctggggatggggtggtctgtgaatatgtgacatttctgcagttcagtatccgaaggtttctcttgggggtaggggctcctgggcggccagatgaatgggtccctgggaacccagacctcagatgaggacttaatgtcttcttcctctcaagccaaattcgcctccacccactccctctgaagaactgggcatttgccaaagtaaccactggagtcatctaatggccctccccctccccaggtttcccacagctttcagggacagtgggcaagaggacacccccccccaccacctcagtggaacacaccattctccccccctcaacagcacactcagtgcagcaagactgacccctgaccccctcccagccctccctaccttggacaggaaggaagtaatgcaccttctcttgctgattatttatttgtttggagagacagaaatgtaaaagtgtatctagaaatatctatatctctatatatttttaactgactctttggaatcccctggggtggggtgaggggtaagtttaggctttcgcggaggggaggagacatggagcctgggaactccttgttctcccctctgctgcctctccccaccccttaaagcagttggtagaaggaatggtatttgtatggggggagggaggctggaatggagaatctggattctctcctcttccccattctccagagggagggaggtggtgaggaagaggaagggaggggcaggatgggccatggaggtgccccacccccacacctgacaatcacccacactcctggggctcttcctgggtcctggggcagggcgagtccaagtgtgaggctgttgatttgttttcaatatttcttttcgtgctgtatggtgatgctttcttagtattctacacaataagaaaagacaaagtcctcgagattcttatgagttttgtttgaaaactctttcactatatttgttgtaaagaggtttactattaaaagaaaaagaatacacgtttctgatacttcggcgtgggttttggtttctttggtgccgcgaggatgggaaggaaggactggtgtggccccatcagggtgagaggcagtgcttcatctcagcagggaagaatggggggcggccttcagggcggggcacttccacatgtctcaggtggggttttcaggtgagaatttcttctaagtgttctgtcagaaggaggcagccccagcccacactaaggagggattgcccagctagaagcctcaggagggattctgggacacaaaaatagaaatgccacccaaggttgagttcaaaccagaatggtgttgggggtgggagttggcacggtgaggacctttgactgctgaaagccttcctcagcagagacttgcccgggcactatgttaggcacaggtggattccaccctcgtgctcctcacagcatgcttccctccagcagaggaagccgctcttgccctttcaaagtgctttaacagtgccaaggagcctctttctccccacctgacacaccccacaggaccaccccaccccactccgccatgccttccagccagggtcgtcttctcttaaacttgcctccttggccgggcacggtggctcacgcctgtaatcctagcactttgggaggctgaagcaggcagatcacctgaagtcaggagtttgagaccagcttggccaacacggcgaaaccccatctctactaaaaatacacaaattagctgggcgtggtggcatgcatctgtaatcccgctacctgggaggctggggcaggagaatcgcttgaacccaggaggcagaagttgcagtgagccgagattatgccattgcactccagcctgggtaacagagcaagactccatctcaaaaaaaaaaaaaaaaaaaaaaaaaggccgggcgcggtgtctcacgcctgtaatcccagcactttgggaggccaaggcgggcctcgggatcacctgaggtcgggagttcgagaccaacctgaccaacatggagaaaccccgtctctactaaaaatacaaaattagccgggcgtggtggcacatgcctataatcccggctactagggaggctgaggcaggagaattgcttgaacctgggaggcggaggttgcggtgagccgagatggtgctattgcactccagcctaggcaacaggagtgaaactccgtctcaaaaaaaaaaaaaaaaccctgcctcctccctcatacctggcacagccgtgccctggggcagatggagcggctgtggaggaaagcagatccggcttggcttcctccgaacagggtgtggctgcttctctgtacctagcccaggtgctgcagaggcgaacgcggagtgtgaggggccatatacgatggcagagacaggcctatgaacgcctaaaatccatgaagcatggttaaggctgtgggtgctagccttagttgtgggagcacacaggagtcaggcttcatgccttgggtttcctcatctgcaaaatgccgatgaccatctgtactggtcctgcttccctcatacggtcattgcagtcttcccctcacttctccctcagtagaggcagagaggaacgatgagctgagcaggaaggggttaagaggataccaccctctagaggaggctccctgttggttacctgctcccctgtagcagcttccaagatgacctccaattatccctccctggtattcatgcccttgtgtggtcccctccctcagtgaatcatggttggtatgtgtgtccaattaaaaaaggcagagtgatggcatgtgacttccaaggctaagtcatggctctactctctgtctctcgctaagtcatggtctctctctctctctccctctctctgtctctcatttgccctggagaaagccagatcccatactgtgggacacttaagcagctctatggaaaggcccacatggcaaagaactgaggccttttgccaaccaccatctgagtgaggccatcctctcctctgtccttgtagttcccaaaattctgcagacattggtacaggtgagaacccactggtacaatgtacactgtagctcagccacagccatgaagagaggaccactctcttctgcacatctgctgttggttcctcagactggcctggcctgtacctccttccttataggcatcattccatgatgtcttgggtaggcattagttttgcccacacatatttcctgttctcttcccttcctggacacacaaaaggccgtgcatcccagtccctgtatagtcaagtggggttattgggctagttctgggcagtagcctataatgggaagtaatgtgtgtcccttctgaaatgcagctagtgcctgattcttcaaacactctttccctgttgtgggaattgcagaagcacgtgttgaggagtgctagcagatcaaagcagcctagacggctaagctgccctaaggttttgtccagcacgagtggactttgtgtgaatagatagtaactctgttttgttaaactacagtgattttgagtactgtgtctgcaatataacctatcctgactgataaagtatccctctcacacttggacaaccttgaagcctgatctactgtatactccttgttagtgtggcacaaggatctctgaacttggcatagtccagaactaactggttcaactcctagttctgccccttaccagctgtgtggtcttgggtagtcacattcttcttaagcctctgtttctataaaacagagctaatagctgcttgttttctctcaccccccaccttccccgtttccaatccatcctccccatctttggcccagctctgataatctaacatgtcatggttctccactgcccaccatctaaagtcctaactccttggccttgctcccaaggccttcaaagagccagcacaacctcttttccaggcttagtccctatggctccctctgcatcccttgaactctaggcagaccagacagccctatcagttccctgacagatcctttgtggtatggctcacgccataatctgtctgaaatccaacaaacatactgtgtgaaaccttgtgttaggcactggggacacaggaatgagatagctcctacctctaggcaattcacagtctaatggccacaagagataagttaaccaacagtttatacttaagtctgtgttaaatgtcacatagaaagaatgtaagtgggcttttgggatcagagatgtggtacacccaaatccaaactaatgaaaatgagaggaggcttctcagaggaggtgcttgagctggattttgaagacatataggagtcgcctgggcaaatgagagtaaggaagacattccttatggcaggaataacacataaggtatggagagactatggtggcttcaggaaatcaaatactgtggtgcaggtcaaaggaacagcacatagaaccgaagaggtaggcagaggccccgttatgaagggccttgattgccaagacttggactttattctgcagaagatgtttggtcatcaaaagattttaagtagaggagggatttgaccaaacttgcatttcagaaagctcctgccagtaaaagttcccctctgacagtaatgctgaaaatcaactggaaaggaatgccgcattggaggcaagtggcctgtcaggatgctctacaagtagaaatagtgagagcctacacccaaggaagtcgtagacagaaggatggagaaaaaatgagttttgtagatactgaagagaatacttactactgctactagtcaaagacgtgaaaataaatgaatttacttggtttaggtaagaagaggtctagcaaaaaactgctctaccacgcctatttctattttcgcaacccttcctatctttaaggttttactcctacaattttcccatcatgaaacttttcctgatttctctccctcccttgtcctgcccagctggctgtggtatcctccaatgaagtgtctcaggaatctgcccccctctttttttttttttttttaagatggagtctcgctgtatcacccgggctggagtgcagtggcatgatctaggctcactgcaagctccgcctcgcaggttcaagcgattcccctacctcagcctcccgagtagctgggactataggcgcccgcccccacgcccggctgatttttcgtatttttagtagagacagggtttcaccatgttagccaggatggtctcgatctgctgacctcgtgatgtgccctcctcggcctcccaaagtgctgggattacaggaatgagccaccgcacccggccaggaatctaacccttctttatagcacctacctcattttacctggaaatgtaggtaccagtttctgttttctctctacaaccgtagtgaagctccttttaaaaatgcactgccagccaggcacggtggctcacagctgtaatcccagcactttgggaggccgaggcaggtggatcacctgaggtcatagttcaagaccagcctggctaacatggtgaaaccccgtctctactaaatatacaaaaattaggccaggcgcagtggctcaagcctgtaatcccaacactttgggaggccaagctgggctgatcacgaggtcaggagttcaagaccagcctgaccaacgtggtgaaagcccatctctactaaaaatacaaaaaattagccgggtgtggtggcgggcgcctgtagtcccagctactcgggaggctgaggtaggggaatcgctttaacctgggaggcagaggttgcagtgagccgagatcgtgccactgcactccagcctaggcagcagagcaagactcctcaaaaaaaaaacaaaaacaaaaattagccgggtgtggtggtgcgcacctgtaatcccagctactcgggaggctgaggcaggagaacagcttgaactcggcaggcagagggtgcagtaagccaagatcgtgccactgcactccagcatgggtgacagagcaagactctgtcttgggggaaaaaaaaagaaaaaatgcactgccttgtccatgtttgtatctgtccccatgcctggcacacagtatgtgttcagtggggctaaaatgaaataatgcatgtgaaagtgcactctgtaaactgtggagtactacaaaccctatagattttttaaaataatactcaagagcatataactttttgcagcttctcctttacttttcagctgcaagatcagctcctgaagcagcacagatccttagggtcccagttttctggactcagatatcggtgcacagaagaattagcacccactgggctcctgtatccaaagaggtggctcttggtaggcaggaggcaaagggtggtatttgttccagccaagaaggccagaccacttctctgtagctcatgttcttctgactcacacccctcagtcctatgggctgagtaacttttccagccttgtgattgtggaaacttgtttcagaacagcatatgtgaaagggacacttgggcgaccccaccccaggtcccagaatggctcacttctactggagccaatacagccccctcatatcagcccctcgtatctgtttgcagtcttttttttttttttttttttttttgagagtctcgctctgtcacccaggctggagtgcagtggtgcgatcttggctcactgcaacctctgcctcctgggttcaagcgagtctcctgcctcagcctcctgagtagctaggattacaggcgcgtgccaccacacttggctaatttttgtatttttagtagagacggggtttcaccatgttggtcaggctggtctcgaactcctgacctcgtgatctgccctccttggcctcccaaagtgttgggattacaggcgtgagccacggcgcctggcactctgtttgctgtcttaaatcactgtgtcactatccaaagtccattcccctgccctatttcacacttggtaaaccagaggcccaagaggaaaaggaggcagtaggaagctcctacagcctcctgcacttctccctgctaggtctagttcagatcagcctgggagggggcgctcaggagttagtgcttccagtcggactgatttacatttgacaatcccccgccccccgtcaccccctccaccccgccacctttgctttgtacttgctgccaagtatttagagctccaagggcttcgctcgggcagtttgtttggtctcataaagtgcggtccccgccttcgtaggggagagtcacttctatttactgtgcatcagccgccacgtgccccataaaagctggtgacgacgctgtcggcccgagctgggaggggagggaccccgcctacgggaaggtcacgagcccgccaggccccgccctcatgtgacctgcggggcccgtcctcgcctgtgtcactaccctcggcggagagcgaaggctcgcaccggccgtggcatccaatccctgtcctgccagctatagccgggcggggaggagggagcggttccgggttcagaaagagaaaatctccatctaaggcgaaggggtagaagggaggtcgagggaaggcaataaagtcacttgtttaatctcctctatgctgtaaaatccccgaaggcagaaatcacatagtcctaagtgtatggcacacagaagacgctcaataaatggctgattggcaactggccatcggaccctgctcggatgcagcgccagtcccgccgccctacgcagcagtcccctcacccctctcccccggcgtcctccctgctgtgacaaggcaaatgagacaatgggttcggccaaccaacgcttccaagcctgcggcccgcggccgggaagtgtcctcaatccgctcgtctaacactgcagtgggtgcggccaaagaccccagtccactctccgcgcccctgccaatgggcgggaagcggggcctcagcctcactgcgctggctctgccagtggcagacggaatcatcagccaaccgcacccgggcaggacgcatgcgcacccagaagatgtagccctagatggggaaaaaccgagccgagagagccaattttggctgggtcttgccaggtcttgccaggtcttcccggagagggtgcgcatgcgtaaatcgaacacctcctctaaatctaacgccctgctcagttctagaggggacagcgccctctgtcctcctggccgttttcctgaactcctaacctcagtcaatactgcctcgggacctggcgctgcctgggagatccagaagaaaggaagcatcttggcccctgccttgggggcgacacgaccgtccccaaacacagcgagtcactggcctgggtctttgtgcagaggcccctctaggagcggggaaccaacgatggcacgaacattgatttgaggaggatgcttcgcagtttacgaagtgagttatatccattgtctcagaagttcctcacaaaaaaacaaaacaaaacaaaacaaaaaacaggttgtcaagtaaagaagctgacgctcaggaaggtgaaggggacgagtccaaggacactgccggtcaaggtgaaatggcctggaaccctggcgacccaactccccattcagtgctctttgtttttattttgtttgttttttgagacaaggtcttgctctgtcgcccaggttggagtgcagtggcgcgatttcggctcactacaacctccgcctcccgggttcaagcgattctcctgcttcagcctcccgagtagctgggattacaggcgcccgccgccacgcccggctaatttttttgtatttttagtagagacagggtttcaccatgttggccaggctggtctcgaactcctgacctcaggtgatccgcccgcctcggcctcccaaagtgctgggattacaggcgtgagccactgctcctggccccattcagtgctcttctaccatgataagcagtttccttgctctccaagaagcttgtgtttagttggcctaacggcacataagatcaagaaaaaggcagtttcagtctttcttttttttttctttttctttttttttaatagaaaatgagtgctagaggcgttcagaaacgggaaagatcactttgtgctcctgtgatctgaaggctgcgtgaagaagatgaggcttggaaaataggtacaaagtacataatcggagtggatcaatcttaggaacaggccaggctcagtggctcacgcctgtaatcccagcactctgtgaggccagggcgggaagatcacctgagcccaggagttccaaaacaagcaaaattaagcaatattgtgtttacatatatgataaaactttgggaaaagcaaggaatgataagcacaaaatgtattaatagttaccgtagagagattggggatgggaggagaaaaaacacacaggtggatgccattggtaatggtgcagtttttgggataaaaggtaggtttatgggtattaacctaattaagtatataacacatgtatacattataattattcttttgtatgtataaaatgtaatttaaaagatgataatggaatcacagcctcccaccccagtacattacatagttgaagagagggaaagctggccgggcgtggtggctaatgccggtaatcccttgcctttgggaggctgaggcgggtggatcacttgagtccaggagttcgagaccagcctgggcaacatggtgaaaccccatctctactaaagatacaaaaattagccgggcacagtggcgtgcacctgtagtcccagctacttgggaggctgaggtgggaggattgctcgagcccaggaggtctaggctgtagtgagccgagatcacaccactacactccagcctgggggacagagcaagacccagtcttcaatcaaaaaaaaaaaaaaaaaaaaaaaaaagaggagggagctggaggggaaagccttacatgtattgcccttagttaaagagcatttctacacactttataccaggtgattctcacaagaaggcttcaataatctccatgttagagatgaagagactcaagtaactgaaagttacttaaggccaatggggaccctgtgcagctatatatccagtgtcccaagcactgtgtctggcatgttagtaaacatgtttcataggtgagtgacagaactttgtaattaccctggtgtctgctagtgaaatgagctgcctctgaaggtagggagtgccctgcacagcagctggctgaccattgtcaggatcagaagtaatatagaaacaattctgtcttcagctgaagtttggatatagataacctctgaggttcttttcaactataaggctctatgagtctttcagaggctgaaggcaaaaccgtattaagataataagtttgtccacttccactagggtcgtagaagtggttgccaaagaaaggcctagattaaaaagacttttttttttttgagacagagtctcactttgtcacctaggctggagtgcagcgagcatgatcatagctcactgcagccttgaactcctgggctcgagcgatcttcccgtctcagcctcccaagtagttgagactacaggtgcacaccactgtatctggctaatttttaaattttgtagaacagagtcttgtcatgttccccaggctggtcttggactcttggtttcaagtgatcctccctcctcaacctcccaaagtgttgggattacaggcgtgagccactgcatctcacccccaaaaaacatttggaaggacaagttaacaggacttattgccaaaatagatatgaagtatgttgttatggttatgtatattgttgtgtgttgtatgtggccacaggatttttgatccaccctaactggaagaaatgcctaacaggcaattaacaatatgggatagtgctcaagagagataaggggtgatatgtcacactgagatataagggaaagagcactggagttggagttaggagacctgatttctagacctaaccttgtctttaattaacagtgtcatcttggacaaatcccttcatttgcataagtctattccctcatatagtaaa

SEQ ID NO: 1401 - DNA, 429 bp, Homo sapiens
ctgagctgtgcctacgtcggcctcgactcccgggggctggaggagttacctttggagcccgaaaggaggaaggaagcaaaatatcaacaacagccgaggcggctcaggcgctcggccccggttccccgcttgcctgccgcccgcctgctggcccccgcgcccacgacgggggcccaggcctcacggcgccgcccagggcccgcgcggacgccggcctcatttattattctccccgcccggagctgcggcttcccggtgttgaagatcccccggaccaggggcgagggctacccgctctttgccgtgacaacaccgttcccccagccgggctgctgggccccctgctctccctggttggcactggatccagaatctcaggacttacgctggcctggtgtgggcccttggttggacactttgccacacacc

SEQ ID NO: 1402 - protein, 143 aa, Homo sapiens [sequence omitted]

SEQ ID NO: 1403 - DNA, 5978 bp, Homo sapiens
acccctcaagctaggctgagctgtgcctacgtcggcctcgactcccgggggctggaggagttacctttggagcccgaaaggaggaaggaagcaaaatatcaacaacagccgaggcggctcaggcgctcggccccggttccccgcttgcctgccgcccgcctgctggcccccgcgcccacgacgggggcccaggcctcacggcgccgcccagggcccgcgcggacgccggcctcatttattattctccccgcccggagctgcggcttcccggtgttgaagatcccccggaccaggggcgagggctacccgctctttgccgtgacaacaccgttcccccagccgggctggaggctgtgcagaaggtatcctgcagaccatgaactgagcactgttcccagaccgttcatgagcacagtgtaaggtgtgccgagacccaccacccagcgagcccctcccctccgtagcactgaggacccccggagaagatggggaggaaaaagattcagatccagcgaatcaccgacgagcggaaccgacaggtgactttcaccaagcggaagtttggcctgatgaagaaggcgtatgagctgagcgtgctatgtgactgcgagatcgcactcatcatcttcaaccactccaacaagctgttccagtacgccagcaccgacatggacaaggtgctgctcaagtacacggagtacaatgagccacacgagagccgcaccaacgccgacatcatcgagaccctgaggaagaagggcttcaatggctgcgacagccccgagcccgacggggaggactcgctggaacagagccccctgctggaggacaagtaccgacgcgccagcgaggagctcgacgggctcttccggcgctatgggtcaactgtcccggcccccaactttgccatgcctgtcacggtgcccgtgtccaatcagagctcactgcagttcagcaatcccagcggctccctggtcaccccttccctggtgacatcatccctcacggacccgcggctcctgtccccccagcagccagcactacagaggaacagtgtgtctcctggcctgccccagcggccagctagtgcgggggccatgctggggggtgacctgaacagtgctaacggagcctgccccagccctgttgggaatggctacgtcagtgctcgggcttcccctggcctcctccctgtggccaatggcaacagcctaaacaaggtcatccctgccaagtctccgcccccacctacccacagcacccagcttggagcccccagccgcaagcccgacctgcgagtcatcacttcccaggcaggaaaggggttaatgcatcacttgctcctgacggacagttttctcctacagaacaatgcccagcgccttggggtctcccagtctactcattcgctcaccaccccagtggtttctgtggcaacgccgagtttactcagccagggcctccccttctcttccatgcccactgcctacaacacagattaccagttgaccagtgcagagctctcctccttaccagcctttagttcacctggggggctgtcgctaggcaatgtcactgcctggcaacagccacagcagccccagcagccgcagcagccacagcctccacagcagcagccaccgcagccacagcagccacagccacagcagcctcagcagccgcaacagccacctcagcaacagtcccacctggtccctgtatctctcagcaacctcatcccgggcagccccctgccccacgtgggtgctgccctcacagtcaccacccacccccacatcagcatcaagtcagaaccggtgtccccaagccgtgagcgcagccctgcgcctccccctccagctgtgttcccagctgcccgccctgagcctggcgatggtctcagcagcccagccgggggatcctatgagacgggagaccgggatgacggacggggggacttcgggcccacactgggcctgctgcgcccagccccagagcctgaggctgagggctcagctgtgaagaggatgcggcttgatacctggacattaaagtgacgattcccactcccctcctctcagcctccctgatgaagagttgacaatctcaccgcccgcccttccctgccccgggctcctcccgctcgacccccacttcctttcttgtgcttcgtgtcctgttgacggttacatttgtgtataattattatattattattattattattatattttttttaatttggattctcgctttggagagggggatgctctcatcccctctttctgtaccccccaccattttcactggctggggggctctctttttcgcgggaaggggggacactttgcacgttgtacacatatgctgcaggaagggggtggggggcccaataaggcctttgggaaaggacaggtgccgagccctgcatgtggagccctcccaccccacccccagatagagggaaataaccaaaaaactaccaaacaacagaaacccacactctagactgaaaccccaaagtgggcttgatgggtgggtttgtgtttcaaggggaaagtgaggcagaggttctgaaaagggtctctgtttttgtgttcatgtagccataggcacatggagcagaatacttaagcctggcccccaaatgcccctgcacacacacgtgccacacctgcgctgattcttgtgtgtgctgcacccccaaggtgtgtgggtgctggctgagctttgggccgggaaggcagcctgggaatctgaggctggagacaggggtttgaggtgggggcctctctggaagcacatttggagggaaagacaagagagccatgaggagagggctgaggagggcagaagggctaggcagggggcaaattgagcccctcccttccccagtttttctctaagatatacagtgcaatagctccccacccctcagttgacgccagccctgtaaagctggccacagtgtgcagggagaatggggagagggtcttcagtgaggtggctggggcgagagtcggcctggacttccctggggtgctccaggccagagctctttcattggggcgagtgtggtgaggggacgtccttggtcttgcacgcacactacctgggggagtcaacactgggatggtctgtggggtgggagggcctacggatgggtccgtagaggtcccacctccctcattcctccttggcccctctccctagcttctcctgttagctccttctgctcctgaccccacctccttgctcttggcgcccctattgtctctggctacctccttgtcccaccacctccaggctgcatcccaccttccctcttggctactgtaattgtaaatagcgacctttggaaaacgttagcggtgtaacagtccaggaaactgtttttttttgttgttgttgtattgatatgaaatgagattctatttttgtcaaagtatattgtaataataatgactcaaacggcccgtactgtacagacgagattcttctgctgttgttcttgctcccctcccctcctctgagtccgcccctccctgctgcctcctcagtggggcagtgggcaaggggcccaggggcagccgaagcacggggtcctgagacctcaggcaggattggagatcaaaccagagggggcaggcccccagcctgctctctaggatcaccccccgccctaaggggcctggcctggggtgacgtggccaggcagactgtctgccccactccttcacacaagcccagctcctctgcccaaggggtgcggcgcccccttggggtttcctcccagttggagagtagagttaagacaaggcccagttttgtgttagccgaccgtctttgcccacctctatgacccagcctcttgcagtattcccatacttgatgcagggaaggaaccagaagcagaggggcctctacgcaggtacacacgtgtacctgagtgtgttcatgagggcatctggtgtttatgtgtctgagtgtagctttgtatttatgtgtgtgtgtgtgtgtatgtctgattgcacgggtgtacttttgtatttatgtgtgtgtgtggttgcacgggtgtgcctctgtgtgtctctgaccctggctgggtgtgtgtgcaaatctgtgtgactggagctctaggggcatctctgtgtctgagtgtgcctggtgtgtgtttacaaagggagagttggctgctccagctccacagccctgggaccccaactcctgtcttccctgctcctttccctgtgttcaccctcagctctgacacattgaactgcagttggggggattggcagttagccctctgtgcttctccctgcagccctacctctgccaaggtctctccctccagggacctctgcttccacccacatatgtccacttagtcacccacacttgacacagttcctggagtaccctcttcccccaaccccagacctgctttcagagcaaaactcaagtccctcttcctccgtgaagcttctccctcagctgagcagtgatcacttactcactcttaaccccaatccgctgactgggtggggacagcacgtccagccttcccacctctcctgcaggcttctagacggagtttcaaaaactgatgagcctcgatccagggcttgaaagaagccagggtgtaatcttgttcatgcatgcgtccccagagcctcgcccagtgcctggcacatagtaggcactcaataaatgctgaatgggtgaatagttgaatgataggtgctcaataaatgaatgaatggccttcccttctcaggctattcccaacattagtctgcccacctttctaggctgggcttggccaccattaaacacggggtgggggtgagggcccctgcaattcacggtgcaatattcaccagttttgccctctgcctcataaaggcaaacctggcttttgattaccatgtgtggatgtttcagtgtcctttcttctctgtccctggggatggggtggtctgtgaatatgtgacatttctgcagttcagtatccgaaggtttctcttgggggtaggggctcctgggcggccagatgaatgggtccctgggaacccagacctcagatgaggacttaatgtcttcttcctctcaagccaaattcgcctccacccactccctctgaagaactgggcatttgccaaagtaaccactggagtcatctaatggccctccccctccccaggtttcccacagctttcagggacagtgggcaagaggacacccccccccaccacctcagtggaacacaccattctccccccctcaacagcacactcagtgcagcaagactgacccctgaccccctcccagccctccctaccttggacaggaaggaagtaatgcaccttctcttgctgattatttatttgtttggagagacagaaatgtaaaagtgtatctagaaatatctatatctctatatatttttaactgactctttggaatcccctggggtggggtgaggggtaagtttaggctttcgcggaggggaggagacatggagcctgggaactccttgttctcccctctgctgcctctccccaccccttaaagcagttggtagaaggaatggtatttgtatggggggagggaggctggaatggagaatctggattctctcctcttccccattctccagagggagggaggtggtgaggaagaggaagggaggggcaggatgggccatggaggtgccccacccccacacctgacaatcacccacactcctggggctcttcctgggtcctggggcagggcgagtccaagtgtgaggctgttgatttgttttcaatatttcttttcgtgctgtatggtgatgctttcttagtattctacacaataagaaaagacaaagtcctcgagattcttatgagttttgtttgaaaactctttcactatatttgttgtaaagaggtttactattaaaagaaaaagaatacacgtttctgatactt

SEQ ID NO: 1404 - protein, 517 aa, Homo sapiens
MGRKKIQIQRITDERNRQVTFTKRKFGLMKKAYELSVLCDCEIALIIFNHSNKLFQYASTDMDKVLLKYTEYNEFSRTNADIIETLRKKGFNGCDSPEPDGEDSLEQSPLLEDKYRRASEELDGLFRRYGSTVPAPNFAMPVTVPVSNQSSLQFSNPSGSLVTPSLVTSSLTDPRLLSPQQPALQRNSVSPGLPQRPASAGAMLGGDLNSANGACPSPVGNGYVSARDGLLPVANGNSLNKVIPAKSPPPPTHSTQLGAPSRKPDLRVITSQAGKGLMHHLLLTDSFLLQNNAQRLGVSQSTHSLTTPVVSVATPSLLSQGLPFSSMPTAYNTDYQLTSAELSSLPAFSSPGGLSLGNVTAWQQPQQPQQPQQPQPPQQQPPQPQQPQPQQPQQPQQPPQQQSHLVPVSLSNLIPGSPLPHVGAALTVTTHPHIKSEPVSPSRERSPAPPPPAVFPAARPEPGDGLSSPAGGSYETGDRDDGRGDFGPTLGLLRPAPEPEAEGSAVKRMRLDTWTLK

SEQ ID NO: 1405 - DNA, 5972 bp, Homo sapiens
acccctcaagctaggctgagctgtgcctacgtcggcctcgactcccgggggctggaggagttacctttggagcccgaaaggaggaaggaagcaaaatatcaacaacagccgaggcggctcaggcgctcggccccggttccccgcttgcctgccgcccgcctgctggcccccgcgcccacgacgggggcccaggcctcacggcgccgcccagggcccgcgcggacgccggcctcatttattattctccccgcccggagctgcggcttcccggtgttgaagatcccccggaccaggggcgagggctacccgctctttgccgtgacaacaccgttcccccagccgggctggaggctgtgcagaaggtatcctgcagaccatgaactgagcactgttcccagaccgttcatgagcacagtgtaaggtgtgccgagacccaccacccagcgagcccctcccctccgtagcactgaggacccccggagaagatggggaggaaaaagattcagatccagcgaatcaccgacgagcggaaccgacaggtgactttcaccaagcggaagtttggcctgatgaagaaggcgtatgagctgagcgtgctatgtgactgcgagatcgcactcatcatcttcaaccactccaacaagctgttccagtacgccagcaccgacatggacaaggtgctgctcaagtacacggagtacaatgagccacacgagagccgcaccaacgccgacatcatcgagaccctgaggaagaagggcttcaatggctgcgacagccccgagcccgacggggaggactcgctggaacagagccccctgctggaggacaagtaccgacgcgccagcgaggagctcgacgggctcttccggcgctatgggtcaactgtcccggcccccaactttgccatgcctgtcacggtgcccgtgtccaatcagagctcactgcagttcagcaatcccagcggctccctggtcaccccttccctggtgacatcatccctcacggacccgcggctcctgtccccccagcagccagcactacagaggaacagtgtgtctcctggcctgccccagcggccagctagtgcgggggccatgctggggggtgacctgaacagtgctaacggagcctgccccagccctgttgggaatggctacgtcagtgctcgggcttcccctggcctcctccctgtggccaatggcaacagcctaaacaaggtcatccctgccaagtctccgcccccacctacccacagcacccagcttggagcccccagccgcaagcccgacctgcgagtcatcacttcccaggcaggaaaggggttaatgcatcacttgactgaggaccatttagatctgaacaatgcccagcgccttggggtctcccagtctactcattcgctcaccaccccagtggtttctgtggcaacgccgagtttactcagccagggcctccccttctcttccatgcccactgcctacaacacagattaccagttgaccagtgcagagctctcctccttaccagcctttagttcacctggggggctgtcgctaggcaatgtcactgcctggcaacagccacagcagccccagcagccgcagcagccacagcctccacagcagcagccaccgcagccacagcagccacagccacagcagcctcagcagccgcaacagccacctcagcaacagtcccacctggtccctgtatctctcagcaacctcatcccgggcagccccctgccccacgtgggtgctgccctcacagtcaccacccacccccacatcagcatcaagtcagaaccggtgtccccaagccgtgagcgcagccctgcgcctccccctccagctgtgttcccagctgcccgccctgagcctggcgatggtctcagcagcccagccgggggatcctatgagacgggagaccgggatgacggacggggggacttcgggcccacactgggcctgctgcgcccagccccagagcctgaggctgagggctcagctgtgaagaggatgcggcttgatacctggacattaaagtgacgattcccactcccctcctctcagcctccctgatgaagagttgacaatctcaccgcccgcccttccctgccccgggctcctcccgctcgacccccacttcctttcttgtgcttcgtgtcctgttgacggttacatttgtgtataattattatattattattattattattatattttttttaatttggattctcgctttggagagggggatgctctcatcccctctttctgtaccccccaccattttcactggctggggggctctctttttcgcgggaaggggggacactttgcacgttgtacacatatgctgcaggaagggggtggggggcccaataaggcctttgggaaaggacaggtgccgagccctgcatgtggagccctcccaccccacccccagatagagggaaataaccaaaaaactaccaaacaacagaaacccacactctagactgaaaccccaaagtgggcttgatgggtgggtttgtgtttcaaggggaaagtgaggcagaggttctgaaaagggtctctgtttttgtgttcatgtagccataggcacatggagcagaatacttaagcctggcccccaaatgcccctgcacacacacgtgccacacctgcgctgattcttgtgtgtgctgcacccccaaggtgtgtgggtgctggctgagctttgggccgggaaggcagcctgggaatctgaggctggagacaggggtttgaggtgggggcctctctggaagcacatttggagggaaagacaagagagccatgaggagagggctgaggagggcagaagggctaggcagggggcaaattgagcccctcccttccccagtttttctctaagatatacagtgcaatagctccccacccctcagttgacgccagccctgtaaagctggccacagtgtgcagggagaatggggagagggtcttcagtgaggtggctggggcgagagtcggcctggacttccctggggtgctccaggccagagctctttcattggggcgagtgtggtgaggggacgtccttggtcttgcacgcacactacctgggggagtcaacactgggatggtctgtggggtgggagggcctacggatgggtccgtagaggtcccacctccctcattcctccttggcccctctccctagcttctcctgttagctccttctgctcctgaccccacctccttgctcttggcgcccctattgtctctggctacctccttgtcccaccacctccaggctgcatcccaccttccctcttggctactgtaattgtaaatagcgacctttggaaaacgttagcggtgtaacagtccaggaaactgtttttttttgttgttgttgtattgatatgaaatgagattctatttttgtcaaagtatattgtaataataatgactcaaacggcccgtactgtacagacgagattcttctgctgttgttcttgctcccctcccctcctctgagtccgcccctccctgctgcctcctcagtggggcagtgggcaaggggcccaggggcagccgaagcacggggtcctgagacctcaggcaggattggagatcaaaccagagggggcaggcccccagcctgctctctaggatcaccccccgccctaaggggcctggcctggggtgacgtggccaggcagactgtctgccccactccttcacacaagcccagctcctctgcccaaggggtgcggcgcccccttggggtttcctcccagttggagagtagagttaagacaaggcccagttttgtgttagccgaccgtctttgcccacctctatgacccagcctcttgcagtattcccatacttgatgcagggaaggaaccagaagcagaggggcctctacgcaggtacacacgtgtacctgagtgtgttcatgagggcatctggtgtttatgtgtctgagtgtagctttgtatttatgtgtgtgtgtgtgtgtatgtctgattgcacgggtgtacttttgtatttatgtgtgtgtgtggttgcacgggtgtgcctctgtgtgtctctgaccctggctgggtgtgtgtgcaaatctgtgtgactggagctctaggggcatctctgtgtctgagtgtgcctggtgtgtgtttacaaagggagagttggctgctccagctccacagccctgggaccccaactcctgtcttccctgctcctttccctgtgttcaccctcagctctgacacattgaactgcagttggggggattggcagttagccctctgtgcttctccctgcagccctacctctgccaaggtctctccctccagggacctctgcttccacccacatatgtccacttagtcacccacacttgacacagttcctggagtaccctcttcccccaaccccagacctgctttcagagcaaaactcaagtccctcttcctccgtgaagcttctccctcagctgagcagtgatcacttactcactcttaaccccaatccgctgactgggtggggacagcacgtccagccttcccacctctcctgcaggcttctagacggagtttcaaaaactgatgagcctcgatccagggcttgaaagaagccagggtgtaatcttgttcatgcatgcgtccccagagcctcgcccagtgcctggcacatagtaggcactcaataaatgctgaatgggtgaatagttgaatgataggtgctcaataaatgaatgaatggccttcccttctcaggctattcccaacattagtctgcccacctttctaggctgggcttggccaccattaaacacggggtgggggtgagggcccctgcaattcacggtgcaatattcaccagttttgccctctgcctcataaaggcaaacctggcttttgattaccatgtgtggatgtttcagtgtcctttcttctctgtccctggggatggggtggtctgtgaatatgtgacatttctgcagttcagtatccgaaggtttctcttgggggtaggggctcctgggcggccagatgaatgggtccctgggaacccagacctcagatgaggacttaatgtcttcttcctctcaagccaaattcgcctccacccactccctctgaagaactgggcatttgccaaagtaaccactggagtcatctaatggccctccccctccccaggtttcccacagctttcagggacagtgggcaagaggacacccccccccaccacctcagtggaacacaccattctccccccctcaacagcacactcagtgcagcaagactgacccctgaccccctcccagccctccctaccttggacaggaaggaagtaatgcaccttctcttgctgattatttatttgtttggagagacagaaatgtaaaagtgtatctagaaatatctatatctctatatatttttaactgactctttggaatcccctggggtggggtgaggggtaagtttaggctttcgcggaggggaggagacatggagcctgggaactccttgttctcccctctgctgcctctccccaccccttaaagcagttggtagaaggaatggtatttgtatggggggagggaggctggaatggagaatctggattctctcctcttccccattctccagagggagggaggtggtgaggaagaggaagggaggggcaggatgggccatggaggtgccccacccccacacctgacaatcacccacactcctggggctcttcctgggtcctggggcagggcgagtccaagtgtgaggctgttgatttgttttcaatatttcttttcgtgctgtatggtgatgctttcttagtattctacacaataagaaaagacaaagtcctcgagattcttatgagttttgtttgaaaactctttcactatatttgttgtaaagaggtttactattaaaagaaaaagaatacacgtttctgatactt

SEQ ID NO: 1406 - protein, 515 aa, Homo sapiens
MGRKKIQIQRITDERNRQVTFTKRKFGLMKKAYELSVLCDCEIALIIFNHSNKLFQYASTDMDKVLLKYTEYNEFSRTNADIIETLRKKGFNGCDSPEPDGEDSLEQSPLLEDKYRRASEELDGLFRRYGSTVPAPNFAMPVTVPVSNQSSLQFSNPSGSLVTPSLVTSSLTDPRLLSPQQPALQRNSVSPGLPQRPASAGAMLGGDLNSANGACPSPVGNGYVSARDGLLPVANGNSLNKVIPAKSPPPPTHSTQLGAPSRKPDLRVITSQAGKGLMHHLTEDHLDLNNAQRLGVSQSTHSLTTPVVSVATPSLLSQGLPFSSMPTAYNTDYQLTSAELSSLPAFSSPGGLSLGNVTAWQQPQQPQQPQQPQPPQQQPPQPQQPQPQQPQQPQQPPQQQSHLVPVSLSNLIPGSPLPHVGAALTVTTHPHIKSEPVSPSRERSPAPPPPAVFPAARPEPGDGLSSPAGGSYETGDRDDGRGDFGPTLGLLRPAPEPEAEGSAVKRMRLDTWTLK

SEQ ID NO: 1407 - DNA, 5937 bp, Homo sapiens
ttttcgtgtggcgttggcggggattacctaggggactccttccgaggactcctcctgaaaggaaggcactctaggagccaccgaccgggttatcccaggacggggcaatggaaaggaggcccacggagacctgagaggaggaggagaaattgaagggaagagaaaaccaggattcctcagcagagggcagagaatcagcctttggtggcaagctctctttgtcaagggtgttgtcagaggggcctcctgccctgcatcctccctgctgtccatttgtgaaggcttctcctcagccacccttctccacagttggaggctgtgcagaaggtatcctgcagaccatgaactgagcactgttcccagaccgttcatgagcacagtgtaaggtgtgccgagacccaccacccagcgagcccctcccctccgtagcactgaggacccccggagaagatggggaggaaaaagattcagatccagcgaatcaccgacgagcggaaccgacaggtgactttcaccaagcggaagtttggcctgatgaagaaggcgtatgagctgagcgtgctatgtgactgcgagatcgcactcatcatcttcaaccactccaacaagctgttccagtacgccagcaccgacatggacaaggtgctgctcaagtacacggagtacaatgagccacacgagagccgcaccaacgccgacatcatcgagaccctgaggaagaagggcttcaatggctgcgacagccccgagcccgacggggaggactcgctggaacagagccccctgctggaggacaagtaccgacgcgccagcgaggagctcgacgggctcttccggcgctatgggtcaactgtcccggcccccaactttgccatgcctgtcacggtgcccgtgtccaatcagagctcactgcagttcagcaatcccagcggctccctggtcaccccttccctggtgacatcatccctcacggacccgcggctcctgtccccccagcagccagcactacagaggaacagtgtgtctcctggcctgccccagcggccagctagtgcgggggccatgctggggggtgacctgaacagtgctaacggagcctgccccagccctgttgggaatggctacgtcagtgctcgggcttcccctggcctcctccctgtggccaatggcaacagcctaaacaaggtcatccctgccaagtctccgcccccacctacccacagcacccagcttggagcccccagccgcaagcccgacctgcgagtcatcacttcccaggcaggaaaggggttaatgcatcacttgactgaggaccatttagatctgaacaatgcccagcgccttggggtctcccagtctactcattcgctcaccaccccagtggtttctgtggcaacgccgagtttactcagccagggcctccccttctcttccatgcccactgcctacaacacagattaccagttgaccagtgcagagctctcctccttaccagcctttagttcacctggggggctgtcgctaggcaatgtcactgcctggcaacagccacagcagccccagcagccgcagcagccacagcctccacagcagcagccaccgcagccacagcagccacagccacagcagcctcagcagccgcaacagccacctcagcaacagtcccacctggtccctgtatctctcagcaacctcatcccgggcagccccctgccccacgtgggtgctgccctcacagtcaccacccacccccacatcagcatcaagtcagaaccggtgtccccaagccgtgagcgcagccctgcgcctccccctccagctgtgttcccagctgcccgccctgagcctggcgatggtctcagcagcccagccgggggatcctatgagacgggagaccgggatgacggacggggggacttcgggcccacactgggcctgctgcgcccagccccagagcctgaggctgagggctcagctgtgaagaggatgcggcttgatacctggacattaaagtgacgattcccactcccctcctctcagcctccctgatgaagagttgacaatctcaccgcccgcccttccctgccccgggctcctcccgctcgacccccacttcctttcttgtgcttcgtgtcctgttgacggttacatttgtgtataattattatattattattattattattatattttttttaatttggattctcgctttggagagggggatgctctcatcccctctttctgtaccccccaccattttcactggctggggggctctctttttcgcgggaaggggggacactttgcacgttgtacacatatgctgcaggaagggggtggggggcccaataaggcctttgggaaaggacaggtgccgagccctgcatgtggagccctcccaccccacccccagatagagggaaataaccaaaaaactaccaaacaacagaaacccacactctagactgaaaccccaaagtgggcttgatgggtgggtttgtgtttcaaggggaaagtgaggcagaggttctgaaaagggtctctgtttttgtgttcatgtagccataggcacatggagcagaatacttaagcctggcccccaaatgcccctgcacacacacgtgccacacctgcgctgattcttgtgtgtgctgcacccccaaggtgtgtgggtgctggctgagctttgggccgggaaggcagcctgggaatctgaggctggagacaggggtttgaggtgggggcctctctggaagcacatttggagggaaagacaagagagccatgaggagagggctgaggagggcagaagggctaggcagggggcaaattgagcccctcccttccccagtttttctctaagatatacagtgcaatagctccccacccctcagttgacgccagccctgtaaagctggccacagtgtgcagggagaatggggagagggtcttcagtgaggtggctggggcgagagtcggcctggacttccctggggtgctccaggccagagctctttcattggggcgagtgtggtgaggggacgtccttggtcttgcacgcacactacctgggggagtcaacactgggatggtctgtggggtgggagggcctacggatgggtccgtagaggtcccacctccctcattcctccttggcccctctccctagcttctcctgttagctccttctgctcctgaccccacctccttgctcttggcgcccctattgtctctggctacctccttgtcccaccacctccaggctgcatcccaccttccctcttggctactgtaattgtaaatagcgacctttggaaaacgttagcggtgtaacagtccaggaaactgtttttttttgttgttgttgtattgatatgaaatgagattctatttttgtcaaagtatattgtaataataatgactcaaacggcccgtactgtacagacgagattcttctgctgttgttcttgctcccctcccctcctctgagtccgcccctccctgctgcctcctcagtggggcagtgggcaaggggcccaggggcagccgaagcacggggtcctgagacctcaggcaggattggagatcaaaccagagggggcaggcccccagcctgctctctaggatcaccccccgccctaaggggcctggcctggggtgacgtggccaggcagactgtctgccccactccttcacacaagcccagctcctctgcccaaggggtgcggcgcccccttggggtttcctcccagttggagagtagagttaagacaaggcccagttttgtgttagccgaccgtctttgcccacctctatgacccagcctcttgcagtattcccatacttgatgcagggaaggaaccagaagcagaggggcctctacgcaggtacacacgtgtacctgagtgtgttcatgagggcatctggtgtttatgtgtctgagtgtagctttgtatttatgtgtgtgtgtgtgtgtatgtctgattgcacgggtgtacttttgtatttatgtgtgtgtgtggttgcacgggtgtgcctctgtgtgtctctgaccctggctgggtgtgtgtgcaaatctgtgtgactggagctctaggggcatctctgtgtctgagtgtgcctggtgtgtgtttacaaagggagagttggctgctccagctccacagccctgggaccccaactcctgtcttccctgctcctttccctgtgttcaccctcagctctgacacattgaactgcagttggggggattggcagttagccctctgtgcttctccctgcagccctacctctgccaaggtctctccctccagggacctctgcttccacccacatatgtccacttagtcacccacacttgacacagttcctggagtaccctcttcccccaaccccagacctgctttcagagcaaaactcaagtccctcttcctccgtgaagcttctccctcagctgagcagtgatcacttactcactcttaaccccaatccgctgactgggtggggacagcacgtccagccttcccacctctcctgcaggcttctagacggagtttcaaaaactgatgagcctcgatccagggcttgaaagaagccagggtgtaatcttgttcatgcatgcgtccccagagcctcgcccagtgcctggcacatagtaggcactcaataaatgctgaatgggtgaatagttgaatgataggtgctcaataaatgaatgaatggccttcccttctcaggctattcccaacattagtctgcccacctttctaggctgggcttggccaccattaaacacggggtgggggtgagggcccctgcaattcacggtgcaatattcaccagttttgccctctgcctcataaaggcaaacctggcttttgattaccatgtgtggatgtttcagtgtcctttcttctctgtccctggggatggggtggtctgtgaatatgtgacatttctgcagttcagtatccgaaggtttctcttgggggtaggggctcctgggcggccagatgaatgggtccctgggaacccagacctcagatgaggacttaatgtcttcttcctctcaagccaaattcgcctccacccactccctctgaagaactgggcatttgccaaagtaaccactggagtcatctaatggccctccccctccccaggtttcccacagctttcagggacagtgggcaagaggacacccccccccaccacctcagtggaacacaccattctccccccctcaacagcacactcagtgcagcaagactgacccctgaccccctcccagccctccctaccttggacaggaaggaagtaatgcaccttctcttgctgattatttatttgtttggagagacagaaatgtaaaagtgtatctagaaatatctatatctctatatatttttaactgactctttggaatcccctggggtggggtgaggggtaagtttaggctttcgcggaggggaggagacatggagcctgggaactccttgttctcccctctgctgcctctccccaccccttaaagcagttggtagaaggaatggtatttgtatggggggagggaggctggaatggagaatctggattctctcctcttccccattctccagagggagggaggtggtgaggaagaggaagggaggggcaggatgggccatggaggtgccccacccccacacctgacaatcacccacactcctggggctcttcctgggtcctggggcagggcgagtccaagtgtgaggctgttgatttgttttcaatatttcttttcgtgctgtatggtgatgctttcttagtattctacacaataagaaaagacaaagtcctcgagattcttatgagttttgtttgaaaactctttcactatatttgttgtaaagaggtttactattaaaagaaaaagaatacacgtttctgatactt

SEQ ID NO: 1408 - protein, 515 aa, Homo sapiens; identical to SEQ ID NO: 1406

SEQ ID NO: 1409 - DNA, 5821 bp, Homo sapiens
acccctcaagctaggctgagctgtgcctacgtcggcctcgactcccgggggctggaggagttacctttggagcccgaaaggaggaaggaagcaaaatatcaacaacagccgaggcggctcaggcgctcggccccggttccccgcttgcctgccgcccgcctgctggcccccgcgcccacgacgggggcccaggcctcacggcgccgcccagggcccgcgcggacgccggcctcatttattattctccccgcccggagctgcggcttcccggtgttgaagatcccccggaccaggggcgagggctacccgctctttgccgtgacaacaccgttcccccagccgggctggaggctgtgcagaaggtatcctgcagaccatgaactgagcactgttcccagaccgttcatgagcacagtgtaaggtgtgccgagacccaccacccagcgagcccctcccctccgtagcactgaggacccccggagaagatggggaggaaaaagattcagatccagcgaatcaccgacgagcggaaccgacaggtgactttcaccaagcggaagtttggcctgatgaagaaggcgtatgagctgagcgtgctatgtgactgcgagatcgcactcatcatcttcaaccactccaacaagctgttccagtacgccagcaccgacatggacaaggtgctgctcaagtacacggagtacaatgagccacacgagagccgcaccaacgccgacatcatcgagaccctgaggaagaagggcttcaatggctgcgacagccccgagcccgacggggaggactcgctggaacagagccccctgctggaggacaagtaccgacgcgccagcgaggagctcgacgggctcttccggcgctatgggtcaactgtcccggcccccaactttgccatgcctgtcacggtgcccgtgtccaatcagagctcactgcagttcagcaatcccagcggctccctggtcaccccttccctggtgacatcatccctcacggacccgcggctcctgtccccccagcagccagcactacagaggaacagtgtgtctcctggcctgccccagcggccagctagtgcgggggccatgctggggggtgacctgaacagtgctaacggagcctgccccagccctgttgggaatggctacgtcagtgctcgggcttcccctggcctcctccctgtggccaatggcaacagcctaaacaaggtcatccctgccaagtctccgcccccacctacccacagcacccagcttggagcccccagccgcaagcccgacctgcgagtcatcacttcccaggcaggaaaggggttaatgcatcacttgattaccagttgaccagtgcagagctctcctccttaccagcctttagttcacctggggggctgtcgctaggcaatgtcactgcctggcaacagccacagcagccccagcagccgcagcagccacagcctccacagcagcagccaccgcagccacagcagccacagccacagcagcctcagcagccgcaacagccacctcagcaacagtcccacctggtccctgtatctctcagcaacctcatcccgggcagccccctgccccacgtgggtgctgccctcacagtcaccacccacccccacatcagcatcaagtcagaaccggtgtccccaagccgtgagcgcagccctgcgcctccccctccagctgtgttcccagctgcccgccctgagcctggcgatggtctcagcagcccagccgggggatcctatgagacgggagaccgggatgacggacggggggacttcgggcccacactgggcctgctgcgcccagccccagagcctgaggctgagggctcagctgtgaagaggatgcggcttgatacctggacattaaagtgacgattcccactcccctcctctcagcctccctgatgaagagttgacaatctcaccgcccgcccttccctgccccgggctcctcccgctcgacccccacttcctttcttgtgcttcgtgtcctgttgacggttacatttgtgtataattattatattattattattattattatattttttttaatttggattctcgctttggagagggggatgctctcatcccctctttctgtaccccccaccattttcactggctggggggctctctttttcgcgggaaggggggacactttgcacgttgtacacatatgctgcaggaagggggtggggggcccaataaggcctttgggaaaggacaggtgccgagccctgcatgtggagccctcccaccccacccccagatagagggaaataaccaaaaaactaccaaacaacagaaacccacactctagactgaaaccccaaagtgggcttgatgggtgggtttgtgtttcaaggggaaagtgaggcagaggttctgaaaagggtctctgtttttgtgttcatgtagccataggcacatggagcagaatacttaagcctggcccccaaatgcccctgcacacacacgtgccacacctgcgctgattcttgtgtgtgctgcacccccaaggtgtgtgggtgctggctgagctttgggccgggaaggcagcctgggaatctgaggctggagacaggggtttgaggtgggggcctctctggaagcacatttggagggaaagacaagagagccatgaggagagggctgaggagggcagaagggctaggcagggggcaaattgagcccctcccttccccagtttttctctaagatatacagtgcaatagctccccacccctcagttgacgccagccctgtaaagctggccacagtgtgcagggagaatggggagagggtcttcagtgaggtggctggggcgagagtcggcctggacttccctggggtgctccaggccagagctctttcattggggcgagtgtggtgaggggacgtccttggtcttgcacgcacactacctgggggagtcaacactgggatggtctgtggggtgggagggcctacggatgggtccgtagaggtcccacctccctcattcctccttggcccctctccctagcttctcctgttagctccttctgctcctgaccccacctccttgctcttggcgcccctattgtctctggctacctccttgtcccaccacctccaggctgcatcccaccttccctcttggctactgtaattgtaaatagcgacctttggaaaacgttagcggtgtaacagtccaggaaactgtttttttttgttgttgttgtattgatatgaaatgagattctatttttgtcaaagtatattgtaataataatgactcaaacggcccgtactgtacagacgagattcttctgctgttgttcttgctcccctcccctcctctgagtccgcccctccctgctgcctcctcagtggggcagtgggcaaggggcccaggggcagccgaagcacggggtcctgagacctcaggcaggattggagatcaaaccagagggggcaggcccccagcctgctctctaggatcaccccccgccctaaggggcctggcctggggtgacgtggccaggcagactgtctgccccactccttcacacaagcccagctcctctgcccaaggggtgcggcgcccccttggggtttcctcccagttggagagtagagttaagacaaggcccagttttgtgttagccgaccgtctttgcccacctctatgacccagcctcttgcagtattcccatacttgatgcagggaaggaaccagaagcagaggggcctctacgcaggtacacacgtgtacctgagtgtgttcatgagggcatctggtgtttatgtgtctgagtgtagctttgtatttatgtgtgtgtgtgtgtgtatgtctgattgcacgggtgtacttttgtatttatgtgtgtgtgtggttgcacgggtgtgcctctgtgtgtctctgaccctggctgggtgtgtgtgcaaatctgtgtgactggagctctaggggcatctctgtgtctgagtgtgcctggtgtgtgtttacaaagggagagttggctgctccagctccacagccctgggaccccaactcctgtcttccctgctcctttccctgtgttcaccctcagctctgacacattgaactgcagttggggggattggcagttagccctctgtgcttctccctgcagccctacctctgccaaggtctctccctccagggacctctgcttccacccacatatgtccacttagtcacccacacttgacacagttcctggagtaccctcttcccccaaccccagacctgctttcagagcaaaactcaagtccctcttcctccgtgaagcttctccctcagctgagcagtgatcacttactcactcttaaccccaatccgctgactgggtggggacagcacgtccagccttcccacctctcctgcaggcttctagacggagtttcaaaaactgatgagcctcgatccagggcttgaaagaagccagggtgtaatcttgttcatgcatgcgtccccagagcctcgcccagtgcctggcacatagtaggcactcaataaatgctgaatgggtgaatagttgaatgataggtgctcaataaatgaatgaatggccttcccttctcaggctattcccaacattagtctgcccacctttctaggctgggcttggccaccattaaacacggggtgggggtgagggcccctgcaattcacggtgcaatattcaccagttttgccctctgcctcataaaggcaaacctggcttttgattaccatgtgtggatgtttcagtgtcctttcttctctgtccctggggatggggtggtctgtgaatatgtgacatttctgcagttcagtatccgaaggtttctcttgggggtaggggctcctgggcggccagatgaatgggtccctgggaacccagacctcagatgaggacttaatgtcttcttcctctcaagccaaattcgcctccacccactccctctgaagaactgggcatttgccaaagtaaccactggagtcatctaatggccctccccctccccaggtttcccacagctttcagggacagtgggcaagaggacacccccccccaccacctcagtggaacacaccattctccccccctcaacagcacactcagtgcagcaagactgacccctgaccccctcccagccctccctaccttggacaggaaggaagtaatgcaccttctcttgctgattatttatttgtttggagagacagaaatgtaaaagtgtatctagaaatatctatatctctatatatttttaactgactctttggaatcccctggggtggggtgaggggtaagtttaggctttcgcggaggggaggagacatggagcctgggaactccttgttctcccctctgctgcctctccccaccccttaaagcagttggtagaaggaatggtatttgtatggggggagggaggctggaatggagaatctggattctctcctcttccccattctccagagggagggaggtggtgaggaagaggaagggaggggcaggatgggccatggaggtgccccacccccacacctgacaatcacccacactcctggggctcttcctgggtcctggggcagggcgagtccaagtgtgaggctgttgatttgttttcaatatttcttttcgtgctgtatggtgatgctttcttagtattctacacaataagaaaagacaaagtcctcgagattcttatgagttttgtttgaaaactctttcactatatttgttgtaaagaggtttactattaaaagaaaaagaatacacgtttctgatactt

SEQ ID NO: 1410 - protein, 284 aa, Homo sapiens
MGRKKIQIQRITDERNRQVTFTKRKFGLMKKAYELSVLCDCEIALIIFNHSNKLFQYASTDMDKVLLKYTEYNEFSRTNADIIETLRKKGFNGCDSPEPDGEDSLEQSPLLEDKYRRASEELDGLFRRYGSTVPAPNFAMPVTVPVSNQSSLQFSNPSGSLVTPSLVTSSLTDPRLLSPQQPALQRNSVSPGLPQRPASAGAMLGGDLNSANGACPSPVGNGYVSARDGLLPVANGNSLNKVIPAKSPPPPTHSTQLGAPSRKPDLRVITSQAGKGLMHHLITS

SEQ ID NO: 1411 - DNA, 25834 bp, Mus musculus
  misc_feature (1)...(25834): n = A, C, G or T/U
ttcctggaggggcttggtgacacagaagcaggccttggagactggacttaaggcgtctagtgacctgcaataggttgtggatgtgatggtctataccttccacaagtacgccagtcaagaggacgagaggctcaaacacaacaaaggggagataaaggagcttttgcgtaaggagctgctgagctatgtgggggtagtgaggcaggccaggaggggagcctgggctaggtagggcaagtctgttcctgctttcatttccaaggtgcctgctagtgccagtgccagggtggcactgaggatttcccatcagccctcatttcacagtccctggggtgcccattaggtctatatgtgaaagggctattgatggcttcagcattcttgagcacaatgctattgggggctccagagtctatctgtctaatcctgtaattggctagttgaatggtcccaaactcagagaaaggtagcagctggccatgggtcacacaaggacattattggtgggcattaatttctctttttattttacacatttatatgccaaaccaagaatgtatatagagagagtggattctagccaagacatacaccctggggcatttgccagagaagcgctgtgacctctcaatttgtctcctgccctgtacagactaatgggtaattatagagctaggtctcagaacttaatgtatgaggcaggtcttgcccccccccttcttcattttgggttaattctttttcattgttttggctggtatggaaaggtttgtcttgtttgaattcatcctactgatggggggtagggagggcagtgaagctctgattttctcattatcaagatgaagctggggcctagcaaagattagtttcttcatactctgaggaatacccaggaaccccccccccccccacacacacgcacacacactccagtaggcctattggagacacttacatcataagtctatctgtccttccttactgaccttcttggtacctcacaagggtttcccgcccacggtagacctggctgcccatcttggaaataaaagctgcacgctgatgtcagggaaggtgttggaggtgggttgggcagtgccccactccgtgatgactcctgtccctgtcaccttcaggataacgtagatgatgagaaggtgaagaaggaaatgaacaacctcgataaggacagtgaccagcaggtggacttccggatgtatgccctggttctggtggattctgctatctggtttaataacttccttgaggggtccccagcgctccactacctgccgtggatctcttggttgaaacaactctctatctttttaagtttgtattaaataaacttttgttagtttgctggtggagagtattataatggctcagtgatgccttgtgccttgactgggtcagttaaaggcctgggaacagaggagatcctggtttctaacaccttccgtactgtaccccaactttctgaggccaaaggttctactcttttttttttttttttttttaggtttttggaggcagggtttctctatgtagccctggctgtcctggaaagtactctgtagaccaggctggccttgaactcagaaatccgcctgcctctgcctcccaagtgctgggattaaaggcgtgtgccactactgcttggcctcaaaggttctactctttgggatttcacatgaatgaaattttgggaattgaggtaggctggtaacattttatttggttaagaaaggtattttaaaaaggaagattgggagctgggtgtggcagtgcagatttttaatcccagcactagggtggcagaagcaggtggatcgctgtgagttcaaggccagtgtggtatataaagcaaactctagaacagccagggctgttacacagagataccctgactcaaaacaaaacaaaacaagacaagacaagacaagacaagacaagacaagacaagacaagacaagacaagacaagacaaaacaagacaaaggaaggttggtggcatggtggtgcaacctttatcccagtactcaggaggcaggggcaggggcaggggcaggggcaggggcaggggcaggggcaggggcaggggcaggggcaggggcaggggcaggggcagcacacacaaaaaatataaaacccacctacaactacaatcattttatctacccctccactaattctaacttcacagaagggagggatacaatcccagaacatagcacaaannnnnnnnnnnnnnnnnnnnnnnnnnnnnnnnnnnnnnnnnnnnnnnnnnnnnnnnnnnnnnnnnnnnnnnnnnnnnnnnnnttacgaattcggactcggtaccccctgtgcttgtttttagaaaaccttttttcctatctgctttcaagtgggttagctcagttttgagtttactccctccttctcgatctctgataaaaccccttaggagccaggctcaaaccaaaaatccttatggtttctaccgtttttttcctaaggctgtcacttaagttgccacatattctgcattctaaagtatatcaggtgacagtttgaacacatggcttgctgtaccgtgacaagggccaccagctttccatcctatagactctaagccctatatttcacttttacctccatccaatttcatcttttaagttattactcttgattgatctttatagctactggcttttctaccacttacacagcattcagaagttaatcgaggcttgacctgcaataccttaactaaattaacatttgaatgtccatgtggttagacttcttggtggacagttcaagtttggttcagtgacttatagatgccctactagctgtctgttgctgtataatgaaccactccaaaatatggtggctggaaacatacatttatatctctcatggttctgtgggtaggttgggaagagtttggggaatcttacttggggtgtctcaggcagttgtagatggaaattgaggctacagttactcaagggtgctctgtcagctttgcacttggtgctggttgttttcctggagctcagaactgtcagtgtgctggctagatttatgtcaacttgatacaaactgtagtcatcagagaggaaggagccttgattgagaaaacatctccataagatcaggctgtgggcaggcctgcagggcattttcttaattagtgattgatgggggagggcccagctcatgtgagtgggccctctttcctgggttggtggtcctaggttttataagaagctggctgagcaggctatgtgaaatgagccagtaagcagcgcccctccatgacttcttcatcaactcctgcctccaggatcctgtcctgtttgagttcctgttctagttttcttcagtgatggactatgatgtggaagtgtaagcccaataaaccctttcctccttaacttgcttttcagtcatggtgttccatcgcagcaatagaaatcctagctaagacatttagcttactggatctccctccaacagggtgtcaagaatgtgggcttctctcttttatcaccatgaaaaagaccctttgtcctggatagaccctgccttggccttgtctgccagccatatatgtgcaataaagacagagcaccacctgagagcaagaggctgtcttgtagcctctcagtggctccttcctcctctgcagagctctgtctgatgtactctacaaatgaccttcacatacatcagagctttcttgggaagaaaaaaaaataatcagaaaagcaccgactttcatcatcatcatcatcatcaccaccaccaccatcaccatcaccatcaccatctattattttacttaaaaaaaaaaaccaacctttttttcctccaagttgttaacatacccagctaaagtagccatattacatagctaagctctcaaagatacaggtaaaaccctgcatagagaggtcactactgccatatcaataagacaaaggctcttgaggaaaaagcttttcacgtctcatcttcactctgccttctaactagagtatggtcactgagtataacagccatgtgtgatcaggaatcaatgaatatagtgtagtggatggtgtgctgtaggtttaaagaacaaaacaataaaaggatgctggatttcagatggggcctggacacaactcgaagagcatgagtgtgtgtgtgtgtgtgtgtgtgtgtgtgtgtgtgtttgcccacaagcatgctcctgggaattctgaactacatcttaagaatgtttcagcttccagtttagcctcttgtactgctctctctaaggcatctcagaagctaggggccatgctctgagaagcccaagctgtgtggggacacagcttcctcctaggaaactctgatgtgtgtatggctcatttgtagagcacatcaggcagagctctgcagaggaggaaggagccactgagaggccatgtgacagccacttgctctcagtgcatctgccttcattcatatagggctgggagataaggccaggcaggcctctgggacaaatagtttctattcatggtaataaaaagagagaagcccaccttcttaacactctgttggagagggacctggtaagtacaggtcaggaaatcatgatgccagtaattaacattctcggggaagttttcaaagctcttgatgagcacactgttattttagcttcatggtaaccccaaaggggctgtcattaacctttttacagatgggaaagctgagagaggcagctttagccatttgtgatccctgcttctgaccaggtgctcgagatactaaagcactggccatttaatcttcagtgatcctgccctttgcagatgaggaaacagaggctgggattcataaaataaggaatagtgtcagagcatgacccacatttataagaaaactccccatccctttgggacactgggatggtgggctgggccttgttcctctttctgaaaccatatccagaaaccatctttgtgtgacctggaggggacccaactgaacagggttcagaggtacctgtcccatcatcctgaatcacagggagatgagacccccattcaggtggttggctagtgacctctgatttcttttggtgtgccataggtgcagggcttctcagttttggatttggacagtcagttgggctattggggccagacttaccttgctgtctctgaggtttcccccacttggagacgttctaaagaggctattcgttccttctggtatctgtcagactgtcaccagactgttgaatcctgactaaggagcttccctattctctgtgctgaggcagaggagggtctggacatcactctgcttgtcaaggatctgtggccagatctcccctagtctcctgaaattgctgttgggatgagaaacacagaaaccccacctcctgtcgtatcagcgttttattgtatggctccaccccgggctagggatggactgtgcctttttttctgtgatctagatggaataggacaccaagaaacgtggttggtatgagtgtggtcacaaggtggtgatatgactgtgaattttgaaactatctgagttactcttatcttggtggctttagcctcgaagggcaaggacagaggttagggtaagctggtctcctactagaagccccagacaaacatttattaaatgactaatgtgcctctgtgcagagttcagcagaaactgacccaaaggttaaggtagcaaaggagacaagcacaaatggtggaaatccctagcgtttttactcgtagttattgctagagcccagggttgtgctatgaaacctaggttgtgctcaaatcttcagcaatcaccctggttcagctttccttgttctaagagaacaggcaagcagtgccaagctcaatctcatcgtgttttagctatccattagacactcttgtgggctggaaggtcagtaaagtggctttcaagtaagaccttgaaaagtaccctatgtggcttctatcattttaaaccaaacatcagagatgtcagtcgcactagcacaagacctgcccagctcatcacctccagagctactgatgttcaaagtcaactaggagccagcaaagctagaattaaatggcgccacacttaagagcatgtactgtttgtgcagaggaactgagctcggttctcataacccacacggcactcagtcatgggttctgagaagatggagtgagctggtaccctacagttcccatgtgggacacttcatctctccaccaacccactcttctcatctgtgcaatggacacagcttggttgtcaaagcaagtgataggtctaacctctgcaggctcttggtttagattctctcttcacctcccagttccaatactgtagcttcagttctgactctagcttcctcactggcctcagtaatcagatacccctttccaaatgttctccatacatggctcagaagatcagaaaggatgtctattgtttcagttaagttaatttagcctcctggggctattggatatgggtggttactctagacaaagggcttaggaccttttgccagaagtaaatagtgtgtccagatccttgggacaccctatcttatttttccccttgaggtgcaagagcagatgctgtcctttagaagggtgatgtattttccagggatcgtaggcgatggtggtgatagtgaggagagtcagagctttagcttgtaagaagtccggccagatcggctagcatctgtgctcaccctttgcacacttgaggccaagcttctcagtctccagccacgacacattttccagcggtcagctctcctgtcctcagggagttagttatgcaaagtgagaagccatggtcctaggctcagcctaagggtgggaatggagcatgtggacaggaaagagcaagaaagatggaagatagctctagtccaggccttggaactggggtcctctgctgtgcactgggaccactgcagaaaaaggatttagggaagagtctggaaacttcaatagggcaggaagattccagaaactttgttctttttttggggggggtggggttggtacaagggaagagagtttagagtcattgctatcatctttatggaggcaaaagtgggcaagatgacctggtgaggaaggatggggtctaaccccttccccccagtaatccagggaaactcatattaaattgaactcagagtccagagcactcacattgccacaataactagtagcaaaatgtatttgcaaaaaaaaaaaaaattctgagacaaggtcttactacatagctcttactggcctgaaacttgctatgtagactaggctggacttgaactcaccaagatctgcttgcctctgccttttaagtgctgggataaaatacatgttcccccatatatggcaatacttaggattcttacggtaggaatctttgagataggaaattaagtctctaacaaggtaaagtgcagacatggtgaagttaggtgctgaggtggggtggagttctaagtgaaggcccaattaagcattctttccatgtgcattctccaactccatgtctccaacaaggcatgcctctaggcctctcccagctttctctcggtggacagagaagctgtgttctcaggggctgtggctgtgcccaaaaacgtgaagggctgttggataagaaagtgggctcaggagccaggctgctgggctcgtccagcctattaaacattcctttgttattgtctgtttctcccactagattgtcatctcccttgagagggactgtgtctgttttgtttatgctatacccccgatgcctagtatcagtgcctctaattacttgtataaacagtgactagcaagcctgccactcattagtcatatgattccgggcaagttgttacctctcggagttaacatttaccaagccttcactgtattttagcagtgtttattccatgagccttgcttgtgctaactcaaactccacaagagccttatgagatggttactatttttatttccatcaatgaggaaaatcaggtcacaagagcagagatgacatgcttaaggtagctggtagcagaggcttaacacagatgagattaagtcattgacctagaagcaaattaattgttggtctactctggcccctccttctgcggccatgtgaccctctccgtcctgtgtctcagactgctcataactccttgccaataaaacagagttaatcacaactcatacttccttctgcctccattgcccactcccctcatccacagcctggcaacctcgaagaggagattgtgtcccagacaaagctgggtaccgagcccagggtgagggccatacaggcatgaggttttttgtcactggccaggaagccaggtttctcttctccttcctgtattcttctgggtgttgtgttttttttttttttttttttcttgtggaatggagaagctttggggtgggagagaacagagaagcagcaggagggtatttccatgtctggtcagtggtggtctcccccatgccagctaagaatggcaggggaaaacaaagaatagccagaaatgccaggcagaattaaaatgatcaagttcaaacatcaaagaccaacaaggaattaagcccagacatggtggtgcacacctctcaccccagaacttgggaggcagaggcaggcagatttctgtgagtttaaggtcagcctggtctacagagtgagttccaggatagccaggagatagctatgtagagagactctgtctcaacaaacaaaacgagttcctctgtggttggagagatggcccagaggttaagagtacttgctgttcttgcagaggacccagatttggttctcagcacccacatcagggggcttacaactatctgtaaccccaactctgtggggactcagtgcctgtggcctttataggtacctgcactaatacagacaacactcacagacagacacataagggaaaataaattacaatctttcaaaataaaatcagatctttaaaacaacaataaaccaaaccaaacaaataaaaacttgtttaaaaaacaaaaacaaaaccgaaaacctcaagtgatggcaaagtctgtgaagctgagcagggcgggcaccctgagggctctggccatacccactctcaaatttgggtttgatgatttgggggaaaagacacaagatgaagcccagggctcacagaggtgataagtagagacttgatcctggaaccccatggggtaatatgcttaagccaaaaaacgaacactctgccccaggactgcctggaaagtcactcgccccagcacagaacacaacagtggaaccttgtgagctctggagcttggggacatgccagctttctcatgaatctgtgacccaagttcatccattatcacttggagcagaaaggcaagaaagttcaagccctgacagctggtggctgcctcagagaacagccttctctctaggcttcaaaaatacctcctttcctccagcgaaataagcaattcacagtcaaaggccacccaacactcagtgctctggaggctgggcagagagggtgttccatggcctcagactcctcacctgtaaataggagccttagccagatgctcccaaggtctcccctgcacagatactctctggaggtacaccctaagagagcccaagatgtgtccccattttgtattcttggtctcttcacaataaagagctcagtagagggatgtgtgtagctggaagatgcaagcaggaagctgttaccagttcccagctttggggaagggcagaggggggaatgagtaggggagcggtgcctgagactctgactgggtctttgatgtgtgcgttgctaggtgggcggtgggcctgtaatagaggctactgagggatggaggcaggggaccctgagggcagcctcagcgttgacctacttgggtccttataattgctcccttcatctctcgagaggctacaaatagggacacccagttggtaggctcctacagctgaagcaacagcagcagtggtgagtatggttgcttgggaactgcattgggctcggagttggggcagctcagaaagccctcaacaggtagcctgttcctggagacagggtctggatatgggagcagaaagctgatgtgagcaggtgatggggactcagagggtcccttgtacactaaggagctgtaaggaagtttgttttgggtagtgtgcccagccacgatcttgtactgatgtgggggggacagtagccagctatgcttctggggtagcccttagtgagctccgtgcttttgctccttgactctttgcttcattcctggggacgagttgggacaggccagggctgcaggagaagagaggattcctttgagtcttcaagccctgtgcttctgaaatagcaactgaagtggcgccaggcaggctgggaggaatcagaagggctcagaggagccgagctcctgggatcacccctctttcctctccaaggatcatggtgctttcctcttctgggaacatggatccttgctgcagtgccaggctatcacagagaattagacccccataatgcttgacacttcagccccattctcctactttcctgccagctacagtcttgctagctatttgctccccatagagggaactcaccaggaagagtcttggctctggctaccctgtgttggaggactctagtcccccgagggagtcaggagtgagtcattggactcacatggaaacaactccattgcctccctgccagcccagggttcgcccaggctgcatgggcaatggaaggggacaatagatgtggggtgaaggaaggaattctaggaagtgtttcccttccatctcagtgggggactcttctcaaagccttctgaggtcccccgggggatgggaggatagctaaaggatggagtaggtcatagatgagtagatctatgtatgaactggtggactctgcagacgccacctggtccatgtttctgactaggcctgtgaggctagattatcccactttgcagataagacaactgagacccagagagaaacagttcgctcagggcttcagagtgcacaatagaatgagggtcctcaattgcagtttctttgagttcagggtaggaggcatagtgaggtggaggggtcctgtcaggcctcaccactgcctctggcattagcctcaccaggatctggacaaagaagccctgggcagggcttcctgtgcaagctcttacaggatgacgctccaggtctccaaaaggcagaggctttctaggatcaagggcagcatcacatggaatggtgcccaataaaagactgagaattcccaggtgttgtgatgggaaacgatgggagggagtcagagtcagagggaggctcccagttggggtgaaggtggtagatattctgctcctgaggaatttatggtgatgtcagggaactgaaacttctgtctagaaaaatcacaacaggcacagcggggaggtgaattgattccttgcgagtcatacccttgttttgtgacagtgaggatgacccggcccctggagcaggcagtagctgccatcgtgtgcaccttccaggagtatgcagggcgctgtggggataaatacaagatctgccagtcggagctcaaggagttgttgcagaaggagctgcccacctggacgccggtgagcacctcatatctctccccacttggactctgcaaatcgtggcctagggccaagcagcagcatagggtagcacatgagctgagacacagggctgggaagggggactgaaatgggtgtcttatcaggtgggtaggatgaggttggccccatgagggttttggtttggaatggggcagcctaaccatcggaggggagtggtgtgggaagctactttggctccttattctggtttcctgaccctgccttctcatcccttccacagagtgagttccgggagtgtgactacaataaattcatgagtgttctggataccaacaaagactgcgaagtggactttggggagtacgtgcgctcacttgccagcctctgtctctactgccacgagtacttcaaagagtgcccccctgagcctccttgcccccagtagcctctgatccaaaggtgtacgctatcccagaagggcagggtctgctccagtcctccatctttgtccttgaggtggtcctgggtgtgtagccacacccttcccactctctctgtggtacccctttcaatctagacttgccaagttcttgatgtgctaaccccacccagctacccatgagctttcgaggctttcctagggatgtctagcttgtgaggggtgggacagtagccagcctttgccgcttctcttcttggaagggaagaacatctctgctcagccatgtgcacacaactgggaccgctgtggcaggggcctcctcaactcccaataaagaaatgtcttcttggcttacttttgtttttttctgatgggacacactgggccttgggaccgagtccttgttcctttatgctccttactactggaggtaggaggcttaccatggaaggcatggacccccaaagcggtgtcaggccctgtagaaatgcacacatttcaggagggtaggggtaacacgtgtcctatcagatgagactggagggtctctgtctctctctgtcccctgtcttgagatagaagtccttatcttggactttcaaggaggacaaggggctccttgggaggtacttctgaccagatgctgcaaggagagtatggttgtgggagcccaaagccaaacctccatctaaccttcactcaatccccgaatttgtaccctatccttagagattaatcctgactcccccttttacctatttcctctttaactctcttcttcaagctgaacattcaaccccgaatgctcctgtcattcctcaatatccttactccagcttccatccattcgaaaacctccaggccacactgccaccctaactccatcatggcctcctaggtatagctcctacttcatacctggggtggtcccaaggtccctcctgacttgctagcctctatcctgggtcttcctgattgtgacaagaagctgtttaggctggagggaagtgctgacattgtcccactggctggggtcacctccttcgttcctgggccacatatttccagggcagctccttatcccttgcccataacatctccatctcctttcctgtggcccacacctcatgtccaggttgcccgttctcaaagcttcctaaacttctggctgagctgtggctgcttggtggtgtccaccccatccaagtctctgccgtgcccactggagctcactcactacttgattgtgcctgctggggagggagcaggaagcctggttcccagactgggctggtcgagggtgctatgacatttactacatcaaccaacagcaagagcacagtatccatgttcccccatcctctgcatgggcagggcctggcagggtataaataggtcagattgttgggctctccccaaacctctctattcagcacttcctctctcttggtctggtgagttgtgttggtctgatagcactgctagcggcattagaggctgaggctagggtagaagaaaggggggctgctgggggaacagatgtctttaataaatccagatgagagattctgatgtggaggttcatgtatgtgtgtgtgtgtgtgtgtttttcacgagaatgaaaaccaaaaaaaaaaaaaaaaaaaaaaaaagtgtataaatggctacatctgagctcccggaggttttgagatactgaggctggcttgcatgttgctatagtgtatattggtggtgcttgggagtcactgtcatgcataggatgctgactcgtgttgctgggtaatacaagacagtgtgtggacactcgggtacaggaagcaaagcgaaggcatcagtaggcctttttgttttacagtatttaaattacagtttttatttgtgtgtatgagcgtatgggttgggctggagcaaatgccaaggcgacattgtgggagccaaaggacaatttgtgtgggagtcaatctgttccttctagcatgtgggctgtggggatcaaactcaggccctggagcttggtggcaagcacctctacccactgagctatctctccagcaccctcctgcaggcattcgtgtttgtagtgtgtcttatttttaatagccctatgaacatatagcacctaggccaagaaagcctggcttccccaccctctcctcttgcatccctacctctgccacttcatcttactcctattaggcagctggggtttttccacttttttttgtctgcctctgggcaggcagccagcagccgcgcccaacgctgggagggagaagaatgggccagggcctggtgcttgtggttgagctgtgggagtgagtaagctgatggaaaactgctgttgttgaggccaggactgagaggcacagaaaggtgctggcatggatctccagagtttgaggggtaggctttgcaggtttcagagcccagagcacatgtgaccttcttgccatcaatgggtcccattcctctgatctccccagggggtgaggtccatctcttagagagttggctgggatagagcacttaaaatggggacagaatgagtgtgatttgggtcatgctcagcaacacatatccagttctcaacacactgttggcgtgggttggagaatgttacttttgtgtctcctgcccttaggtctcaacggttaccatggcaagacccttggaggaggccctggatgtaattgtgtccaccttccacaaatactcaggcaaagagggtgacaagttcaagctgaacaagacagagctcaaggagctactgaccagggagctgcctagcttcctgggggtaagtgggtcctgcctgtgtattgcacacgtgatgcatctgcaggaggaggctggggctggtaggcactagtcttgatgcagtacttagctatagctggcatatatccctgctctgggtgcttggtacggaaccacaatgaaccacctacttcacactagcccccagctgagacaggcttaggatgaagataactgaagaggcagaggaaaaccaaaacaaccacattaggcagtcagtgtctgaaaccacagcctagatcagggctgtctttccggagatgggcactagaaatcgagtttttatttgtgaagacatgatcgtggaggcacacaaatgcctgcagattatcctctcaataacaccttatattagttaacggatcactattatgacagtttcctattaagataattaaaacaagcacggggaagatgtggtcacatcctttcccagctatcccatgtgttcatcccatagtttagccccgaggctagcaaggagtgcttgcaaaccttcctgagctcctgactggaggcaaatatctggtttgagttggcttctaattgctcctcttctactgccagaaaaggacagatgaagctgcattccagaaggtgatgagcaacttggacagcaacagggacaatgaagttgacttccaggagtactgtgtcttcctgtcctgcattgccatgatgtgcaatgaattctttgagggctgcccagataaggagccccggaagaagtgaagactcctcagatgaagtgttggggtgtagtttgccagtgggggatcttccctgttggctgtgagcatagtgccttactctggcttcttcgcacatgtgcacagtgctgagcaaattcaataaaaggttttgaaactattagctgttgtctgagagactggaggctatgggctgagggctgtggtagagactgctggaagttgacctggagctttgtgggggccaaactaaaaaaggttggggaggggtgggtggcttattttgagtacattgcaagtatgtatttgtgtgtgcgtgcttatgcatgcgtgcatgtgtgcgtgcgtgtgtgtttgtgtgtgtttacgtgctcctatatatgcaacagagcaaactccgggaacactaaaggcagaaaccaccagaggcttagcttgaaaggctccagatgtgtgctgttagccagcccacagttctccctcctctctccagcactgcctctgggctcaaactgaagttgggatgggattaaaggtcacatctgctgctggttggggtctggagagaagacaacaggcctgcctgagtcatgaggaaggagtcttgaagccagagaagaatggagaggtggactggcactcagccctgacatttataggccaggtcctggcctgctaccccatctagctcattggcttcaaacactggatcaatcctttcctgtccatgaagggttggatgaagaagggtaatatagagggaggtcattcgtagtagcacaaggatctctctctttctctctttctctttctctctctctctctctctctctctctctctctctctctctctctctctctctctctctctcacaccttgagcttctgatcctccttgccagcctcctcagcaccggcattatggacatatgctaccatggatgactgaaatagtcattttcttaacatagtgtctcccatagaggctgtaggacaagcgattaccattactattattatgttatctactatttttttaagatttatttattattatatgtaagtacactgtagctgtcttcaggtgcaccagaagagggtgtcagatctcattacggatggttgtgagccaccatgtggttgctgggatttgaactcaggaccttcggaagagcagtcggtgctcttaaccactgagccatctctccagcccaggttatctactattctatgatagtatctactattactaagaatcaggttgcttagaggaagacaagagacctcagggagagtaaaggaggcagggggtagtagctaggtgggagggaaggagatgatggggaggtgaccatagttttagagacgtaattttggccataggacctaataaatagaattgagatccccatctcctcatcctcccaccctagagcacaagacataacgttgcctccctttgggataggcttaagggcagtgcttctggggtgaagaggatggcctgagattagacgccaagctcttccctgggtgatatggagatgcctaatgaaaggtgcacagaagccgtcccaaggctggcaggtttggtcctcttgacctcaggcttcctttctcatcattttgtgcttttctctctagcctcagaggactggggtaggtgactcagatgttcccttggagtttgactacagagacttaggtccaggctaagcctgtctcctctctttgcactcccagtcaatttgcccatcttgggagtgtgctccctagagcatccttctgcatcactctactttcggaaactcctgttgcttagagacaagtcccagatgtattactagtgtaatagttgtggtgggatgacaaagggggcagcagagagaaaacaggaaggctagcatgggacttcagccaagatgagtgttatgcccctaacccaattctgttcttagattcagtgtgagtgtttgcagaacacaggcaacttgtcttgacctctgtgccaatgatcgtaccttaacctgagcctcctccccagttcatactctcaatcccttttccagtcccaaaccttcctttggacctcccccaatcctggattcttagttctccaagctaggaagtctccaacaactattttccatctttcactttatgttagctagtgactttagccatgtccttggcagaaattaccttccttcactgatcccatcccaagaggggtcctttctgcttttggaatggattcagagatggaaggcttcagtgtggcgtttatcctagcatatggggagttaccctgtgtttgacccacaccttttaccattttttttctggagactttccctttctctgcctattacttcaccagatggtgaggcttcataggaaaaatggtttctgttattgaaaatacgtgtcatgggtaacttcatgtgccatatctagctctgtttgtaaatagcaagtcaaaatttccagcgaaggttccctccaaccttgtctggaagccctcatatttctgacccttctcattggctccacccatcctgatctcctgggtactggggacgagggaataaaggcactagtggggaggctgtggctgcagaatagattctccaggttcacttcttccttggtgagtccttccttcagatgacctccttcatttctgctgggtcagtctgggggagaaaactgtgacaagacatggagcccctccacaaggaaggtctggccttgctagtgggagcatgctcggggaggacaggacagaggacttggaattgtgactgtaagataccctgagatccaaccttggcagcaggaaagatgaggcaggatgatcatgggtttgaggccagctatcttaagatacattgtgagacactgtcagaggtgtgtgtgtgggggaaaccagccagatgtccctgcagaggctcagagtttcttccttaccttgagttttggtcctggctgagcctctgtgaggtgagaagccgacagtctgagtggcaggagatgaaggatgggtcctgcccattccaagaacttcttgggttggaggcagaggctgtcagtttctcaaccaccctcccacccagcccgggttctctacaggatctgcaaaagcccctggttctgtgggctttgcttccttcctctttaaggggaatgtgttttaagttttgcgtcccacaagcttcagttgtctgctcttttggtggagtggctatactgacagaattgagaccatcaataatcaaacctaacttccagaactagttcttacaagatcctggccatgctgatagccctgcccctcatctcctgcccctgccaggctttgggtacagctctctgggcaccagactggaggttactgagcaagtccagtcacctctctcctacttcctgctgagaccttatctcccagtttcagccccagccccctctgacccttggacttctttttgaccccctttactgtgagacactccatctcaggtgcctcaggataaaggagggtgactaggtgagaactgtggctggaagtgagtagggaagagacaaatcctgaccctttcatctgttctacctgaacctatactctctttgtcagcatgtcttgatcagggaagctgcaccttctttgggggttggacttacaactttagctgttatagtgtttgccatggctctcattacaacacacacacacacacacacacacacacacacacacacacacacacacacacacacaatttttttccccttgttggtggagtttggtctcactgtggactcctgtcagtggtggtttgtttgcaagagggtctttgggtatgcatgactggtgaggagcaagcttagcttctccagtgttgtgattgtcctctctcctagtccagggtacatatcgttatggagactcctcttgagaaggcactgaccaccatggtcaccactttccataaatattcagggagagagggtagcaagctgaccctgagtaggaaagaactgaaggagttgatcaagacagagctgagtcttgcagaggtaggtgactatccttccatatcccaccacatgctctgagcactccttctgggagatacccacctactctcagggtactgtagtttaagcagtttaagtgccagactgcggaagggccagagacaaggaaagagctggggaatccctggctatcgagtctctagacctctgttctggaaaggaggaggtgagtctggggatggacttctgcccatgggaggctaaggaatcggatacaggagactttgatgatgggttgcatagcctgtgttagggatcttgagggtctgagggatgtggggtgctaggtttggctgtgtacgactggagggtagagatccttcttgattatcctccatgcctggcagagccaaggtcctaagtgatgctaacaaatagactaataggctgatttgtgaacatggggtgagaaggagagagctttgaatctgattggatggccatgataggctgatgtgagggtctactccatagaataaccgaaccttggaaatatccgagaccttgtccattgggactgagctggagttctaggcctgggtaccaacctcttatttatttttacaatgaagtcctaaataccagtgtccccctggagacaaggttcctggagtatgtccacgggcagtggcgaagcagctgccacacttcttaggcctctgtgacctctctctctgaggcatgtgaagtttaccatagcatatacatttccttttctttttgagataggatttctctgtgtagacttagctgccctggaactcactctgtagtctcttacctggccagcctctagctcacagagagccacttgcctctgctttctgagtgcccccacacctggcctggcacatacacagtcaatcccagaaactgttttgctatcctggagctaataaaggtagaggggaggacctctggttcatctggtgctaattagggggacagagccccaggggaggagcccagtctggggaccaggatcgtgttccagagaagcagtttccagcatcatgactagcaacatcctgcatccaagggagacctagaactgattgcaatggagggaaagcagggtctacaaatttgcatctccttgttttaccctaaggctctgtcttcaacttcctagtagagccagggtgcagggaccaaactgggaggaggacatctggtgccaggccaggttttagggtagggggcatgctgggttctcagttccagtatactgatcttacagagagtggtgatgtctggatcctttaccagcttggccttacagtgcaagcaggataagtctaggacttagctcaggatgatgctcagggccacatagccagacctcaagctgttttcagtaggaattggtatgaattacagattattatttctttggatgggaagatgtcccaggagcaaaggctagactaagccttcctactgtaattcatttggaatatggtcctgtggtaaaggtgtgggctggggctgggctgctgagtagtctcctcctcttgggcccttgtagaagatgaaggagagcagcattgataacttgatgaagagcctggacaaaaacagcgaccaggagattgacttcaaggagtactctgtgttcctgaccacgctgtgcatggcctacaatgacttcttcctagaggacaacaaatgaccaggacactggcagctcctgatcctgacctctgcagcctctttaactgcccctcctatggcccctgcccttctctttctcccagatggatccttccagcagagaaataaagccttatccattacacgcactggttttaaggtggtttgtgtcttggctgaggcaggggagaacagacattttggaccactaagccttgggccacacacaggtggtctgtggatagcaggagctgggctctcatccctcttcactggcagtccttcatcatggacattgttggaggtgtcctgactttgttctgcactcctgtaaaataacaaagctgcccagacagcaaagatgcagagaaaacaagagaaaaggccgtgagagctaggaggccagagggatgggctgtggcccagcagtgatggtcccgcaggtctgacttggggatagcccgcaggagaccaccccaggagcccttctcctctcccttccaggaacacccctcccattactcactgaagagtgacttcaggatgctaatccctccccacaccctaccaacttcctcttctcaagactcctccccattacccccccccaccccaggagaaaatgttcaaaacttttcacttgagatgagtaactgagaatgctcgctgggcttggctctactatgtgcacattcatgcataagctgctctaaggatgaaaatccaggcagtgagtgggaggaggcgagtgatgttgctagaaatttatggttggtgggggatgctgtttaaaatcttttagactgtgttctttccccatgccccctttgatacaaggctcaaaattctaccttttgggatcaacgtctttagctatatatcaagatttagaccagtggttctcaacctgtgggttgagacccctttcacaggaattgcctaagaccatctgaaaacacagatatacacattaagattcataacagtagcaaaattatagctatgaagtagaaacgagaataactttatgattgggggaccaccacaacttgaagaacagtattaaagggccgcagcattagtcaggttgagtgagaaccatttcttagaggatgtggtagacagactgcttcccctccctcacttggggaccttgccactagagggcaacagcatcagtgtggttcccagtccccctcacactgatgctaactttaaggacactgctctcgggctggcagaaggttcagcacacaagccagagtttcgagtcacgtgccagaagggaaaactaaacacggaattagagaaaacttgatgcctctggcttgcactggtctcctttgggcccgttagggcccgctaaactccctcattccgctcctaatcctggacagtccaggcaacaggggcgtggaaagttgagggggctgggatgttcgtttgccttgcctcaggcgctgggtggggtcggggcgtgccagcactccctgggcggacctcacggatgctggccactataaggccggccagactgcgacacattccatcccctcgaccactcctttggcgcttcgctgtcgaccgtgcggtgagctctcgctggggggtccctctagggtctttctgctcctgggcaaggggttaagccacttccttcccccgtcagcctctgcaggctcagtgggtggaatgcattgggatccaagttttcggagcccagggaggcagggagagccatgattaggtgggttgtatcaggcaaacccagaggctaatgcatccctatggggcggcaacctgagtctgctcttctggggtgcaggagggtttgccctgggtgtgtcatcgtcccagtgtgtggctatgtcaggaggtgcccaggggcactctccattctcttccttgctcagtcatatgccctagttctcttggaagccctggaggacagtgctcacagatcccaaagccccttccattcttatatccctcacctaagttgccccggctgccacctgtgttggcttgagactgactgcctcaggcaggggggtggtgagagaactctctgctatcagcagcactgactagcccctctgtcaaacagcttcttctagcccagtgatcagtcatggcatgccctctggatcaggccattggccttctcgtggccatcttccacaagtactctggcaaggaaggtgacaagcacaccctgagcaagaaggagctgaaggagttgatccagaaggagctcaccattggctccgtgagtagcccctgtcccggttccccctcctgcctctcatctgagtggcatttaatcacagttcctgatcttacttcctgtggagggatgctcgtatgcctccatgctgccctgtcccctgagggaggagcaggggctgaggagagtaaatcaaggtaaacccaagctgaaggcccatctttggtcccaacgagcacttgtttgagagaggacttccagggaaggggtaaggaatctagggtgttggccaccactgagtgtggacttctccttcttaatgtattagaagctgcaggatgctgaaattgcaaggctgatggatgatctggaccgtaacaaggatcaggaagtaaacttccaggagtatgtcgccttcctgggggccttggctttgatctacaatgaagctctgaaataaaatgggaccgttgagatgacttccgggggcctctctcggtcaaatccagtggtgggtagttatacaataaatatttcgtttttgttatgcctactcatgtgttctggcttcccactgatttccagttgcttcctgccttgctgctggacccaccatccagtggtcttagtcacagttaaactctgggagtagtagctcattggcccaccaggccaggtctgccagctgaccaggaatctttatgggtattagaagaggaggcccctctaggcaaagccactctaaacaaaggctcaatcaagtgaccttcaggagaaagtggcctttagaggcaggtctgcagtagtcccagcagtctcctggcagacacactttggtctgggtgtggtgaaacagggagtactaggtgggccctgacgttgggcaatccaccttttcactgtgtgtttgtgtgttatatgagggaggcgtggggagaggcacatctgaggtgagcagggagggacacaggatgactgagttttccgtagctgcctgtgttccagttggaggtggaggagactgtaggagacggtccctagtgtcaggtatggggtcctttttgttgagctaaggagctggcagctccacgcacatgtgactcacgaggtgctcgcaaacagggcagggctggggtcccgagacatgccagatgcggcatcaggcctttctgtcaatattgacccagcctgtccctgcagaatgactcatggggctacttccctggaacgtagttgaaccctcaatccctatcagagtagatggccaacggagtaactgtctattgtgtacagttaaatcataggtgtgggggaagctgtgtgtgatgtgtctgggtgtcatggagacagcatttgttgctattcctccagggaaggcctaacccaagttggacaacatcctggccaagccccgaagggcaaagatctggacttcatgtggagaccatagctgttttcacttcttactacccaccccttctccaatccacttaagacgttaaatggtcttcccatgctctgggtggggcaaataaacagcaacagctgtatttcttaaaaacctttcttctccagcagtgtcctggtcttaccacgttgttggacagccagagggtccccgggtgggccacccccattccatgctgttcagtataggctctattcagtggctctggaaaagtacaccacacccagttgttgatactttggggtgtggagggatcgccctcttgtggacagagagcaggttactggtagggaggctgcggttggtggtggtggtggggcgtgtcaagaaggagtggggggtggggggaggagcctggcaggtgggcataggaagaaagtcagttaattttctgagccttgtggaaggagcaccagcggcaccgtggatgggagccaaagcttaagaggtctgggctgtgagagggggttggaattagctattcagggaatgtaagagtcgagccatcgtttagttctcagcaatcaaccctacttcatccgaggtacatctatgataagcaagtcaagggagggaaagttttgttaaagacaggtggaatccagtcccatcctgccctcctctttctgtggttagatggtcagacaatcatctaggctcttggagggcaagggggaatttttttttcttttaggtacagggcctggtggtggaaggaga

SEQ ID NO: 1412 - DNA, 712 bp, Mus musculus
caaatagggacacccagttggtaggctcctacagctgaagcaacagcagcagtgtgaggatgacccggcccctggagcaggcagtagctgccatcgtgtgcaccttccaggagtatgcagggcgctgtggggataaatacaagatctgccagtcggagctcaaggagttgttgcagaaggagctgcccacctggacgccgagtgagttccgggagtgtgactacaataaattcatgagtgttctggataccaacaaagactgcgaagtggactttggggagtacgtgcgctcacttgccagcctctgtctctactgccacgagtacttcaaagagtgcccccctgagcctccttgcccccagtagcctctgatccaaaggtgtacgctatcccagaagggcagggtctgctccagtcctccatctttgtccttgaggtggtcctgggtgtgtagccacacccttcccactctctctgtggtacccctttcaatctagacttgccaagttcttgatgtgctaaccccacccagctacccatgagctttcgaggctttcctagggatgtctagcttgtgaggggtgggacagtagccagcctttgccgcttctcttcttggaagggaagaacatctctgctcagccatgtgcacacaactgggaccgctgtggcaggggcctcctcaactcccaataaagaaatgtcttcttgg

SEQ ID NO: 1413 - protein, 106 aa, Mus musculus
SNSSSVRMWLEQAVAAIVCTFQEYAGRCGDKYKICQSELKELLQKELPTWTPSEFRECDYNKFMSVLDTNKDCEVDFGEYVRSLASLCLYCHEYFKECPPEPPCPQ

SEQ ID NO: 1414 - DNA, 732 bp, Mus musculus
gaggatgacccggcccctggagcaggcagtagctgccatcgtgtgcaccttccaggagtatgcagggcgctgtggggataaatacaagatctgccagtcggagctcaaggagttgttgcagaaggagctgcccacctggacgccgagtgagttccgggagtgtgactacaataaattcatgagtgttctggataccaacaaagactgcgaagtggactttggggagtacgtgcgctcacttgccagcctctgtctctactgccacgagtctcaacggttaccatggcaagacccttggaggaggccctggatgtaattgtgtccaccttccacaaatactcaggcaaagagggtgacaagttcaagctgaacaagacagagctcaaggagctactgaccagggagctgcctagcttcctggggaaaaggacagatgaagctgcattccagaaggtgatgagcaacttggacagcaacagggacaatgaagttgacttccaggagtactgtgtcttcctgtcctgcattgccatgatgtgcaatgaattctttgagggctgcccagataaggagccccggaagaagtgaagactcctcagatgaagtgttggggtgtagtttgccagtgggggatcttccctgttggctgtgagcatagtgccttactctggcttcttcgcacatgtgcacagtgctgagcaaattcaataaaaggttttgaaactattagct

SEQ ID NO: 1415 - protein, 137 aa, Mus musculus
IHECSGYQQRLRSGLWGVRALTCQPLSLLPRVSTVTMARPLEEALDVIVSTFHKYSGKEGDKFKLNKTELKELLTRELPSFLGKRTDEAAFQKVMSNLDSNRDNEVDFQEYCVFLSCIAMMCNEFFEGCPDKEPRKK

SEQ ID NO: 1416 - DNA, 36799 bp, Homo sapiens
aactcttggcttcaggtgatctgcctgcctcagcctcccaaaatgctgggattacaggtgtgagccaccatgcccagtctcttttatatttatatttaatccgggctaggctgggcatggtggctcacgttggtatcccagcactttgggaggccgaggcaggaggattgcttgagctcaagagttcaagacccgtctgggcaagatggcaaaactccatcaccacaaaagatgcaaaaagatgcgcacagtggcgcacacctatagccccagttactgaggaggttaatgtgggaggatcacatgaggctgcagtgagctgtgatggtgccactgtactccagccttggcgacagtgagtctatgtctcaaataagtaagtaaacaaaaattaaaaagaatccagtccacagggcatttgaaggcaagaggaaaagatgccagaatcagagatggggagaagatgggcttctggcgcctgctgaggttgagaaatgagacagataggctgagtgtggggtggagagaggatgggcagagagactgaggctggtctgaatggaaatgaaatgttagggctctcagggttatcggggaataattggagcttctaggaaaggtttaacgttgtgaccacctgtgttcgtcatgcctccccaccccttactaattgtgtgaatttggcagactttgagtctcagtgttctcctctgtgaagtggggtcatcttattccaactcctgggattgttgtgtgaattaaatggggtaatgtacggagagcacctgacgcacagcgagtgcttcaaaatttcagtctgcaccccccagcaaaggatatgcacacgcccattgtgagtgacaaatccaggatgacctgaacccaatgtgataacgtgggtcctcgcatgctggtcatgctgccgggagacacttatggatccaattagtacaacaggggaaataaattatttaatgcattttgctaagacagaatacctcagaacttattttgtggggcggggcataataaagggggtccttctgctgaaaacgtttaagctcaggttcgtggcaccactcaaccaaggtcgacagtcacacagtaagccagaggcaatgtcaggacttaaactaaacctgtggcccccacaatgaggccatttctctttcccctgaacggcctggggaaagggggtgggtgggcagaacttggcagtggccaatccctcacttctgtcccctggttttctcctgcccttatctctaggcttgcattgattgattgattgagacagggtcttgctctgtcgtccaggctggagtgcagtggcacgatcatggctcactgcagcctcaaactcctaggctcaagtggtctttccgcctcctatctcccgagtacccatatccctaggcttttaaaatggcttccaggtatctggctgccgtctcagacatccacctgggcttctgggcagggactgtccgggaaacctcatctatgtgaagcaggtgtgggtgtaggaaggccgcttggaaatgaatcagcactgtctcctgtttgagtcgtaagcagggcgccagagggtctggcggacaagaaagggaggatgacaggaggccggcactgcaatgacacgccttagccaccagagggcacgaagcagctgggcaaaatcccgcggggccgctggtggaaaatttctggcacctggagcccggagatggggtggacggaatgtgaggacccagcttcctgaggctgggccggggcagagtcactgctttggatgtccgcagggcctgcttgtgtcttgactactctgcctttgtagacagctggagaatgtgagagtgggattgggatcggactctaggggccattccgtacaactctcctgccctgccgtgggggagggagttgcccaaggttacgcagcaagttagtggcaaatgaatacgattatcaccagtctcaggtatatggccatttgatgggcgcagtcgcagcctcagttcctgagacagagacacctgattaaggacaggccttcaggagctgaccctagtgacccgcggctctgctgctgtctctgtttttctccctggcttttccatctgactgactctttgtcttcttcgtctgcctgcctgtctccgtctctgcccgctggggggtttgctcaactccctcactgggtcctgggagccgcagtttcctgctgtcactcctcagggatttgtagctctctgaagctcttttccgacccgttgtctcggttccactcttgggatccagaggagaggtgattatttcgtagcatagtcagtggtgtgatttcacggggtgagaaggactcccttgctcctaagcactcctccagtgacccctgttgccatgtggtagccgtaagcactggttggcacctggtgtgggcgagacccttacctcatgcagaaatgagtaagaccggtgagctcaccatgtgggggtgaggctgagagaaaacaagtacacaggtgattcagtcaaaatcagaattctctaagtacacacgaaaagggcaaaaggggcgctttgtacaggacagaacaggtagacactgaatccggttgggccctgggaaggctccctgcagtggcctttgaagggggggttggatttcagcaggatagagggcatgggcatgtgtgggcacgttctgaacagaggggtcagcgcaagccgagggtcttggccacactagttgcatgtgccggtgtgtttaagggacacgcagcagcaggccgagtctggagcgcctcactgccaggctttttaaaaatttttaattttaatttaattttattttatttttactttaagttctggcatacatgtgcagaatgtggtttgttacataggtatacatgtgccatggtggtttgctgcacctatcaacccatcatctaggttttaagccccgcatgcatcaggtattagtcctaatgctctccctccccttgcccccatccttctccccgcaactgcccacaggccctggtatgtggtgttcccttccctgtgtccatatgttctcattgttcaactcccacttatgagtgagaacataccgcctggctttaagggacagccatggggatgcactgcagtttctgagcagggaaggccctgtggaggcccttagttaaaaggaaagaatggctgtgaaaatcgatgcattgcgctcccttgtccctcaccctcagtgtgaagggtttttattccgagttctacttgaagtaggcctcgatgggaagacaagtagcatgaggggttcaagtactgaggggagcaagggacactcggtggctgtgccaaggtgtagaagaggacactgggggccccaaggcctgacttcatgtacactgctcaggctggcccccaagtcacacggtgaccgctaggaagggaccagcctgttctcagtctgatcctcctgccatgtcattatccaaagctcctcctggcagggcctgtttggggtctctgtgccagtgctttccctgccaggctgggctggggcttccacctactgctctgggactgctgctgccctggccctgggggaggagggtgtgccgctgagtcactgcctgggcatctgggcctggaacctcgggtgagtcacttagggctgaggtagaggggctgggggaggggaagaagctactcgacagctggagcagggaggggagctggggccacaggaagggcggtgccctgatgcccagacgggccgggatagacaaagggccaaggaggaaggggccctgggagggggcagccctcccttgggctgggctctgaatggccacagtgtttgcctttctccgggtctggggaggacatgtgtgtggggggcagtgagagagggctgtggctgagggctgtgcttcaggcctggattctggcttgggaagctgtccagctggtgttttcagccttgggtagggatgtacccctacccacccacccagccctcaagctggagaagaggaggccaaagttttcctgttcagcctttaactactcgggacttccttatgctccccacagactgtggcccagcccaactgcggctgtgtgtagagcaaccccatttctcactgcttccccatccttccagacaccttcctacacagagggaccttcccaggtatttctaagcacacttagttacctcattacctcattaagaggtattctggtgctggccattaaaagtcactccacttcatccatgccctgaagtcagtcctgtccttctcctcctgatgtcccccagctgcctcctctggcccccagcttcctaagggtggccccaggttgcttctctctcacacacacaggcgcatgtatgtacacgagcactggaccatgaagtctcagcgtgtgctcacagcctctcacacaggagtgggctgtgactcacaggcatgtcatgagaatgaggcctggcaccagtctccaggccccagagcaggggttgcctcccctcaccccggtccaggatgcccagtccccacgacacctcccacttcccactgtggcctgggtgggctcaggggctgcccttgacctggcctagagccctcccccagctggtggtggagctggcactctctgggagggagggggctgggagggaatgagtgggaatggcaagaggccagggtttggtgggatcaggttgaggcaggtttggtttccttaaaatgccaagttgggggccagtggggcccacatataaatcctcaccctgggagcctggctgccttgctctccttcctgggtctgtctctgccacctggtctggtgagtacctctgtcctgctgagggcagggtggggaggatccccgtgggtctctgtctttgtctccacagttctctcattccagcttccctggtgggatcaacctgggcctctctgggccttcccccttggaagaactctctgtgaagtgctgaagtgttgactgaagggttttttttttttttttttttttttgagatggagtctcgctctgtcgcccaggctggagtacagtggtgtgatctcagctcactgcaaactccccctcccaggttcacgccattctcctgcctcagcctcccgagtagctgggactgcaggcgcccaccaccatgcccggctaatttttttgtatttttagtagagatggggtttcaccatgttagccaggatggtctcgatctcctgatctcgtgatccacccatctcggcctcccaaagtgctgggattacaggagtaagccaccgcgcccggccgactgaagggtttttctccaggttcctctgtgaggtctcagtgcaggggttgctctgaggccctcccctggatatctcagtctaggggcccttctttgggggtctaggcctaggagcaggaggtgtgcatgtgggcgttgctgcaaaaagaatcctgagatttttttttttttttttttttttttttgcaaagtcctggattctagcaggactaaggtgcaagaggcaggggtctcaagactctgcctgggtcatggccccaagcagcaaagctctgccccctgcctcggtgaaggcagggctggcatgatgggcccagggcatgccctgcctctggcatagctcctctggcctcaccctgaaacctgcctaacctttccaggctggtctgagtattctcagaggccttgccgctgaggtctgtcccatcctgatcccaaggcaatgaacatttcatatctttaattctaattccaacaggatccttcctggtggagagaatgttaagttgcccccaccctatccatgcccctgtctgcctagaggctcaggggccttcagggtgaggggagacacattccccaccctctgggagctcctagtctgagagaggaaacactcctgcccaagggagcttccagttagatggcagagagagatgcctctggcttcaggagtcccgagtctaaggagggaaacgactccttcagggagcttcctgctcctaggctgtagccatggctcctgccagactgcacaggagcccccatctgccagccggtgcatgtggccctgctccccagagcctgcgcagatgccatcaaaatgggactctggtcaccctgtcatttcccttctggcagacactaaaatggggagccctgccctcaggggggtgtcccaagtgccatcagaggaggcttggtgactcccagacacaagggaagctttagcgtctgccctcagggtgagatggaggtatcgcctccggcctcagggaaccacagtctgagggggagatgcagcccctgccttcccattcagagaggggttttgtgaggtggcttgggggcatagggcagaagtggatcctacaggctgagctaaggccccaagagcctcagcagtgtacccatcacctggcacctctgcagccacagatccatgatgtgcagttctctggagcaggcgctggctgtgctggtcactaccttccacaagtactcctgccaagagggcgacaagttcaagctgagtaagggggaaatgaaggaacttctgcacaaggagctgcccagctttgtgggggtgagtggcacaggcctgtgggggaggtcctggtgtgagtgtgggggtgcaggttaaatctctcccccagttccgggtgcctgtcgatgcaggtgccagggtggggcccagccccctccccactttagcttcatggctccactggagtggaaatgaggcccgagtgggagtgcttaattaatggctgtttcctgcagcattccagagaaccatgtgctgtgagggccttccgagtccatctgtttaatcctgtcattggagacttgagaaaccagagcccagaagggaaaagtgattgtcccaagatcacacagcactggcacgttctctctctctcttttcttttcttttttttttttttgagatggagtttccctcttgttgcccaggctggagtgcaatggcacgatctcggctcactgcaacctctgcctccaggggtcaagcaattctcctgtctcagcctcctgagtagctgggactacaggcgcatcccactacgcccagctaatttttgtatttttagtagagacagggtttcaccatattggccaggctggtctcgaactcctgacctcgtgatctacctgcctcggcttcccaagtgatttttgtatttttagtagagacggggtttcatcatattggtcaggctggtctcgaactcctgacctcaggtgatctgccctcctcggcctctgaaagtgctgggcttacaggcgtgagccaccgtgcccggactccttttttttttttttttttttgtggtggggggacaagatctcactctgtcacccaggctggatcatagctcactgtaatctcgaactcctgggctcaagcaatcctcccaagtagttggaactacaggagtattgtcaccatgcctggccaatttttatttttgtagagatggagtcttgctatgttgtccaggctgggcttgaactcctgggttcaagcaatcctcccacctcggcctcccaaagtattggaattacagatgtgaggcactgtgcttgacctctttccatttttatatgccaaactaagaaagtatgtagggatagaaaagcccagctaagatatatagtctgggacattttgtggagaaatgcatcgaccttcaatttgtccctcaccctccctatactgactcattggtgattcccaaagttaggtgtcaggctttgaacacatgaggcaggtccttctttcctttttttaattttgtttttgtggctggttaaatttttctaattatttcggctagtattaaaaaagtgtttttcagctgggtgcagtggcctatgcctgtaatccccacagtgtgggaggctaaggcaggaggatctcttaagcccaggagttcgaccagcctgggcaacatagcaagactccatctctacaaaaataaaaataaaaattggccaggcatggtggcatacgcttgtagtcccagctacttgggtggattgcttgagcccaggagttcaaggttacagtgagctataatacagcctgggtgacaaagtgagatcactctggttgccaagaccagcctaggcaacatagcgaggccttgtctctactaaaaataaacaattagctgggtgtggtggcatgagcctgtggtcccagctacttgggaggctgaggtgggaggattgctggagcccaggaggttgaggctgcagtgagttgtgattgtgccactgcactccagcctgggcaacagagcaagaccttgtcttaaaaaataaaaagtgttcttttctgaatctacctggctggtgttggggagcagcaaccttcggtttcctcatcagcagaatggggtgatgatacctacctcgctgggctcctgtgggattcgagctgatgcatgctcagaggagcatccagtgtcctccctgtgtccaggaggagggcacactggagatgctcaccaatgagtatctgtctctctccttactcactgggccctcttggtagctcccagggcctcctgcccaccttatacccagctgcccagtggggagggagagctgggaaccaacctgaatgtgtgagggtctgggtgtttggtggagctggggttggggctggcttggtgatgagtgtatttcctgtcactttcaggagaaagtggatgaggaggggctgaagaagctgatgggcagcctggatgagaacagtgaccagcaggtggacttccaggagtatgctgttttcctggcactcatcactgtcatgtgcaatgacttcttccagggctgcccagaccgaccctgaagcagaactcttgacttcctgccatggatctcttgggcccaggactgttgatgcctttgagttttgtattcaataaactttttttgtctgttgataatattttaattgctcagtgatgttccataacccggctggctcagctggagtgctgggagatgagggcctcctggatcctgctcccttctgggctctgactctcctggaaatctctccaaggccagagctatgctttaggtctcaattttggaatttcaaacaccagcaaaaaattggaaatcgagataggttgctgacttttattttgtcaaataaagatattaaaaaaggcaaataccatccaccatcactatcatttcataaaaagataaaatttcaattccaataaaggaggaaaggtataatttcagaataaaggacagaccttaacattcaatactgcaagtaatgagttgtaccaggatctactcaagagatatgaattagtctaatcgaccccgcaaagctttatttaaaagattccttgttagaccgagcacggtggctcacacctgtaattccagcacgttgggaggccaaggcaggcagatcccttgaggccaggagttcgagaccagcctggtcaacatggtgaaaccccgtctctaccaaaaaatacaaaaaatttagctgggtgtggtggtacatgcctgtattcccagctactcgggaggctgacgctggagaattgcttgaacctgggagatggaggttatagtgagctgagattgggccactggactccagcctgggcaacagagcaagactgtgtctcaaaaaaaaaaaaaaaaaaaaaaaaaaagaatacaggccataggcagtgctgtggtttgaatgtgttccccaaagttcatgtgttggaaactttatctccaaagcaatagtaattaacaggtgattaggccatgagggctctgctgtaatgaatggattcgtgctgttatcacaggagcgggttccttatagaaggatgaatttgtccccccaccttttatttctctccctctctttgctcttccaccaggagatgatgcagcaagaaggccttctccaggtgttaccccctccagcttagacttcctggcctccagaatggtgagccaataaatatctgttttgttttgaataccagtctgtggtattctgttgtagcaatacaaaatggaccaagacaggcagtacacctgttttcagaaaacaagtgtattgtattctatacaacacattctatattatattgtacattcttttttttttgagacagggtctcgctctgttgcccaggctggagtgaagtggcatcataatctctgctcactgcaacttccgcctcccgggttcaagtgattctcctatctcagcctcctgagtagctgggattacaggcatgtgccactacgcccagctaattttgtatttttagtagagacgggtttctccatgctggtcaggctggtcttgaactcctaacctcaggtgatctgcccgcctcgggttctaaagtgctgggattacagatgtgagccatcatgcccggccgagagcaaaaatttattatctcttatggttctgcaggtagactgggtttagttgatggttctcacgtggggtcttccatgtaggtggaaatcggagctagagtaatctgaatgtttgaacaaactcaacttctacggtagcttgcttaacatgcgtggcaactgatatcgaatgtgagctgggacctcagctagaactgccagccggagtgcttaccatggcctctcgatgtggcttgagcttcttagagcatggcagtagggtcctgagaggacaaatcccaaagtgagcattgcatgaggcctacgtggaagctggtaggcttaagatttattaattttaattttaattaaattaattaatttatttttgagacagggtttcattctgtcacccaggcccgggtgcagtggtgcaataatggctcactgcagcctccacctcccagggtcaagcaattctcctgcctcagcctcccaagtggctgggactacaggtacacgccaccatacctggttaatttttgcattttttgtagagacagtgtttcaccatgttgcccaggctggtctcaaattcctggactcaagggtcccacctgccttggtctcccaaagtgctgggaatacagatatgagacactgtgcctggtatttcttaagatttatttcagaaatcccaggacatcatttctgctatattctaatgataaaaaaaaatcattaagtctggctcagattaaggggaggaggagaattagacatctctctctttttttttttttgagatggagtcttgctctgtcgcccaggctggagtgcagaggtgtgatcttggcttactgcaacctccacttcctgggttcaagtgattctcttgcctgagtagctgggattacaggcatgcgccaccacgcccgggtaatttttgtattttcaatagagacagggtttcaccatgttggtcaggctggtcttcaacccctgacctcgtgatctgcctgcctcggcctcccaaagtgctgggatgacaggcgtgagccaccgcgcctggctagacatcttttaatgtaaagagcagcgtgcataaaattgacagtgaccatctttggagactaaataccatagtctgtcttctagcaaccgcaattcacatccctcccatatgcaaaatacattaatctccttcccaagacccacaaagtctcatctctttaaggcatcaatttgatgtctctgatcttattatctgagacaggcccagagatatgaacaaggcttctcatgtgcagttcctccaggacggctcctcaaaagtggttcctcttgacctgaagtcctgtgaagaacatagtcgatgttcacaggtgagataaagatacataactgccatccaggcttgttggctcacgcctgtaatctcagcactttgggaggctgaggtgggtagatcacttgagctcaggaatttgagaccagcctggccaaagtggcaaaaccccgtctctgctaaaaatacaaagattagcctggtatggtggcatgcgcctgtaatcccagctactcgggaggctgaggcaggaacatcgcttgaacctgggaggtggagattgcactgagctgagatcataccactgcactccagcctgggtgacagagtaagactctgttttttttttttttctttttttttttaaaaagataactgccacaaacacgcctattcttaagggtgtggtggtgtactggaggcacaaattggtgcattggtccatagcaattccgaaattgagtcagacatatgtcaccagattcttgactagggcccagttctgctctctataagtggttcttcttggctcttggcctctaggttcttgactccattttctgagttaactctctattttccaaaagaagtaactgtgttgatagctaagtagctttctcagcctagttcttgcccatttgaagttgaagactcaaaaacttcttttggttttaagccatctcggtctcttttagtccaaaatgatataattcctgtaaaaatgtggcctcactgtgcatcaatttataattcacttaatagacaaagccatacctacaaatctttttaagattggtctctctccagcttggactgagagtcagggtgctgggagtaaatgcccttgagattcctaaaagccttctagtctgaaagagcctaagaggtacacttctagaattattagacgttgtattatttatctgagaagatctaggaagcttgcccttaaatctttttgaggtctcattacaaggtcttacctttgacttacttcatctttatcctgagttcctttttactgttagggatctggatttggtgtttgccccacggccatttattagtttgagagtcatttgctggtggaaagactgtgctgggccctctataattctttaagaagctgaatagttcgttccttctggttttttttttttttttttttttttaatggagtctcactctgtcgcccaggctgtgcagtggtacgatcttggcccactgcaacctctgcctccccggtgagtagttccttctttagttcaacattttttttttgagacggagtctcgctctgttgccaggctggagtgcagtggcacgatcttggctcactgcaaccgctgcctctggggttcaagtggttctcctgcctcagccttcctagtagctaggactacaggcatgcaccacaatgctcagctaattttttgtattttcagtagaggcggagtttcaccatgttggccaggatggtctcgatctcctgacctcgtggtctgcacaccttggcctcccaaagtgctggaattacagacatgagctaccgcgcccagcctagttcaactttctagtctcatattttatcataggcagccagaagaagccaattggtactttcgtattctgcataaaaatctccttacccatatccataaactgattaggtacctttctgttttccatgtaactacagacaacagtgttgccagacatcctggaattacctaataggatctctcttttctagactccagtaacaatttcctcactgtccttcaaatcattactaataatcttctagagacccttctagctttcacccattgcctgctcccaaagccaatgacacctgtttcagtttttttgtaatagcagcatcctactcttgtaggtctttgatgaaagatgcaaggaacaagctcatgctaactttctaaactttttctgccacttcctctattactacacctaggtttctttttggtccatgttcccagatatgccagggtctgaccaaatgttttgtcatttcacaacaaaggtcctgactttccagcctgacatattgggtcatcatatctcactaccttcctccctctacttagccaagttcacattttagattcttttttttttttttttgagacagtgtctcactgtgtcgcccaggctggagtgcaggggcgcgatcttggctcactgcaacctccacctcctgggttcaagtgattctcgtgcctcagcctcctgagtagctgggattacaggcacccgccaccacgcccggctaatttttgtatttttagtagagatggggtttcaccatgttggtcaggctggtctcaaactcctgaccttgtgatccacccacctcggcctcccaaggtactgggatgacaggtatgagccaccgcgcctggcccccacattttagattcttttacttgaggattccactttaagatatcaaattctctactagttagggtttttttttcaactataagttacagaaaatctgactaatgctagcggcttcaattgtcttatacaagaagtctggagtaggatgttcaggtttgattcagggttccggagatgccatctgagatccagtgtcttttcattttttggccctttaatatataggacatctactgttttcctcatggcttgttgtttcgtgatcacactgtggctgctatacctccaggcctcactgtccatgttccaggctggaagacagaataaggatgaggtgcaaaatgccttttccacaggagcctttgcctttttattatgatagaagtgccctcccccagagacttccacttacatctttggccttaactgtgtaatttggctagtcttagctgtaaccaagggtttttagctgaccacattgacatcttagaagaaaaaaaatgggtcttaataatgaagaaagaggggatggatagtggaagagtaatgcagagtgttttcctgaattttttttttttttctgagatggagtctcattctgtcgcccaggctggagtgcagtggtgcgatctcggcgcactgcaagctctgcctccagggttcacgccattctcctgcctcagcctcccgagtagctgggactacaggcgcccgccaccatgcccggctaatttttttgtatttttagtagagacggggcttcaccgtgttagccaggatggtctcgatctcctgacctcgtgatccgcccgcctcggcctcccaaagtgctaggattacaggcgtgagcccccatgcctggcctgaactgtttttttacttacttgggaaatcgatctttgagaaccacttccagagtagctcagatagggtccccagagacagaaaaggccaagtgagaaggcgctgggacaattgcttgttctcacttatgattctgccttgactgcacatctggggctggcgaggcaaggcggagcaggccttcaatgatacatggtctcttttcatagcaataaaaagagagaagcccaccttcctaatatcctgtaggaaagggagccagtaactataggtcagggaatcatgatgatggtaattaacatttctgtagcagttctcagagttcctttcatgcacactgtaatttcagcctcatggtaaccccgagaggagctatcattaggccgtttttacagatgaggaaactgagagggagcagcatctgtcatttgtggagcactccctccagctaggcactctgctggtctattcaagtgtcatctcatttaatcctcggggcaactgggtgagagcagagctatgctattagtttctgcacgtcacagacaaggaaacagaggctgggagaggttaaataaggagtagcgtcaggacttgacccatgtcttaagaaaggtcctcatccctgtggacactagggtggcagtccgggccttcctccccttcccacagccatctccaaagcctggggctttgtgtaaggtgaaagggacctggatgagcagcatccagactctcagtgtccctatcctgagtcactgggggaagcaggcccacttgctcctggtggattagtgcagtctggtttcttttgggccttaggctcacaacaattcctggcttctcttggctcaggttctggggctgttttggctggtggagactagcctcagctggctgcccttggagctgggcaggttctgaaagaggctgatttcctttccttctgggcatttgacaaactaacaaacaccactttcccagatggttccggcaatcttcccttatcccctttcctctccccaaatctctgtgcagaggcacagaggaggagagtctagaaatagctctgttcaaaagtttgttgggccagttgtctcccacttcctcctagagctgctgctggaggagagcctcaggaacacatacctcaccctgcatcctgccctactgtcactttggcatttgctgtttcgcattaatccctggcagcctattaaccctccaggaaaggacagaatgaaggcaaagctgggctctgagacaagggactggctgaaatagggcccccatgcccttgtctttaggtcacttgatctctccactgactcactgctctcatctatgaattggtcacaatcagtcaatgacttggcagtcaaaagaagtagtaggtctaagtaataggtccacaggcctctttgatctcagttcagatcctcttcccatctccccaggcccagtccccaattctgtagcaaaggccttcctggctctacaccagtcccagtcatcaaataccccttcctacaccttccctatatttggctcagatgatgagaaaggaagctaatcattttgacaaggttcgttggtcccatggggctatgggattggggtgggttcaccctgtctctggggcccaggcccttttggcacaagcatgtgggatatccagatgctcaggacaatttatcttgttcttccccgaggttcagaaccagacactgaccttcagggaggcggtgcagtttccaagggcgtatggtgatagtggtgatattggggcgacagagccagggagaatgggtgcaggggagagagagtcagtgctataataagtcctgccagatcagatagtgtcagctctcacccttcatgcacccacacgcgttgcccctacggggagagagctccttgccctccaaatatggtgcatttctcagtggtcagctccacatctgcagtgggggcgggggaggcggctctggaaggtgagcagcaagggtcctgggctcagcccgagcatgaacaattgagtgtgtggacactggacggggtgtgggaggaggacggtccctctccaggccttggaggggcggttcatgtgggatgcattcggaaccactgcagaaagggagattcaggggagatgctggggaagaacttccagcagggcagagagtccaatcatcccaagaagagtttgtgaaagcaagggaagggaagttacagctctcccctccacctgcatggaggaggcaggaccaagtgaactgttggggagaggctggttctttccctcccctcccgccctccctgaagccccactgaggtgactcagtgcatgtttgttgaattggactcagaggcctctgccctgacattgtccacagtgacagcgagtgatagaaagcgctttcatgtcggattcttaaagtaggaatcttccaaacccattttggaggaaggaaattaaggctctaacaaggaaagaatgtaacatgcttgagggcaggtggcaagaggaaggtagagcctagaggttctttccatgacagtctgccaaccccaaagtcctgtaccttgacaactctgtccccccaccccacccctcaggcctcacctcccagaatgagctcccgccctccccgcagtctcagtctgagtctctcccagtcctctcccagtggacaaaccaaggtgctgcaacccagagaggtctgccaagctgagaaacgccaggggctggcggatgaggacaagggcaaggagccgggctgctgggctcttccctgaccacccatatattaataaagtacgtcgctccctacgatcatcttctttctcccagctctgctttatttttcttcatagcatttatatcagcaatctgttaagcacctattttgttattgtctgttttccccaagagactgtcatctccacagagcagggacttttgttttgtttatggctatacccccaatgcgtctaaatatttatacgaaaaatgaatgcctgctaggcctgccactcactattacgtgaccctgggcaagttacccatctctctctctctttttttttttttgagacagtgtcttgctctgttgcccaggctggagtgcagtggcacgatctcagctcactgcaaccttcgtctcctgggttcaagcgattctcctgcctcagcctcccgagtagctgggattacaggtacgtgccaatatgcccagctaatttttgtatttttagtagagatggggtttcaccatgttgccaggctggtctcgaactcctgacctcaggtgatctgctcgccttggcctcccaaattgctggtattataggcgtgagccactgcgcccggcctcacccatctcttgattaacatttatcaagcccttgccatgtgctgggcactatttactctatgaactttatatgtattagcttatttaaaccccgcacaaacctatgaggtagttactattatcaccctccatcactgacaggtgagtaaaatgaagccccgagagcagaggtaggctgcttaagggaggtggctgggggcagagctgggatatcataggtgggaataattaagctcgacctagagctgaattaattgctggtgcactctggcccccccttctgctgcgtgactgtctcttgttctctgccccctgctccccatacttccattaaaaagcccatataaaacagggctatgtagcccattataaaacagggctaatcacagctcctcttttccttccctcctctattgctcactcccctcctcaacagggctgagtctccaaggagaggacggcacaggcaaggcttgggtgctgggggccgagggcgaggtcgaaggtgtcactggcgctctggctgcctgcacgggcaggaaggcttctttgccggcctgggagtcaatctccttcctcttttccctctcacgctcttctaggttttgggttctcttcctataaaacagggaggagtttctcaggctctggtgtgagggagagaatagagaagttacatgaaagtatgtctgtttctggtaatatggtggtctgtgcccacttcagcttaaaaacaacaacaaatgctgcatagaattaaatcttttcaaagcattgaagagaccacaaggcagtaagaaatgagtaggccaaaatctaagtcaaagcagaatctgtactggggccccccgtgccctgaggtcattggccaagccaagccgaacctgagctttgatcctgatggtttggggagtgaggaagacagaagtggaagcccagttctcaccccaagaggggacacaaatggatgaccctcccatgatgctgagaccccaaaaggctacacactcaagctaaaagccagaggaaatcccatcctgccacccacaagacttcaaggaaagttgttttggtgctgagcagagcaggggaagaaggaaaacagcccttaaggagctccagccactggccagccttcatgtgactctagcccaaattcattcccatcacctggggtggaagggccagaaatctcaagcttagactctggaagtgcccctgggaggaacacacctccttcctgtgcctcaaagacatcccacctgatgatttcccccctgggaagcaagcagttcacagccaaaagctgggatctggtcaggcaagttcagacttctcgtctgtaaaggggaggcttagccacgtgctctccaagttctacccggaatagagatttgtaggggtgcaacctgagcgaggcagaagtgtgtccccacttggtattctgggggcctctgcagagtgaagagatggggctgtgatgtgatggataagccagactgtctcctccaactgagctggaaggacttggcaggagactgtcccctgttcccaactctgggggagggcagatggggaatgaaaggggagtggtgtctgagcccagactggcctttgatgtgtgcgtggataggtgggcaggtggggcctgtaatgggtctgctgagggatccctgagggcatcctcagtgttgacctacttgtgtcccccataattgcttccttcctttcttgggaggctacaaatagtgacgccctgtctctaagctcctacagctgaaacgccagcaccagtggtgagtgccagctgcttgggtcctgccctgggttgagtgtcagggcagtttggggacccccagtagccagcctgactcctgacccagggtctggcattggaagcagagagatgaccacaggcgggcctgacacggggagggaagtcagatatagtggacgcagaggtttccttacacagtgaggggctgttggggaagtttgggcagggaggtgtgtagagctaaggtctgccttggggtgggagcactgggctcaaggctctggtcttccccttgatcaggcccctcacctgctccttgcctccttgcttcacctctgagtctcctcatttctgaggatcatggccctttcctctcctgggaacctggacaccttgctctaatcctggggtgtttacaatgaattaaatcctggcagtgcttggcactccccactccccttcccctactttcctgccagccacaaccatgccagccatttgctcccagcagggggcccagcagtgggcaaatcttcagggagagtcttggccctggccgccctgtgctgcaggactcttgtcccgtgggggaatcaggagtgagtcactgggctagcatggaaaaaactcttgccttcctggctgccttcgggttttcccaggctggaggcatcatcccagaagggcggtggaaggggacagtggaagtggggggaggtgagcaattccaggaagggcttcccctccaatagaacagagtatccctatacagaacctccctgctcaaaacccccaggggtcgggagggtaacctcaggggaggccagtctcagattggtaaacacccgaactggtcaactctcaagagaccatctggttcaggttcctgactgggccagcgaggtgagatgaaccccaacttacagatcaggccccgcccctgagacccagagagacaaatggctcaccaaggttgcacagctggcgacaggcagagaggatcccacaagtttttcttctgggtgcagcttcctcgagttcagggcaggaggcagggtgagggcagtggtggtgaggctgtgggggcgcctctcagacctgcccctccctgctaaggcctagcttctccaagggctgagggcagagaagcacagggccaggctctccttgtgcaagttcctgcagggagggaggcttctagggcatctcatgggctggggcagactgggaccgagccatccctgggtgttggggataagaagaggtggcagataatctgagagtgcttaaggagccccacggtggggtgtgtgggtggtggggtaggatgctgtctctctgaggagtttacagcgatgttggggcaatgagacctctacatggggaaataacaacaggacagcagggggataaattaggaggggctggtgtggtctgggagggctactcagaggagggggagactgcggggcctgaagcctgatggaggttaagatgggtctgggaacagtctctgagaaacacagagggcagaggtgagctggggggctggcctggaactctgctgtgagccacacccttgttctgtgacagtgaggatggccaggcctctggagcaggcggtagctgccatcgtgtgcaccttccaggaatacgcagggcgctgtggggacaaatacaagctctgccaggcggagctcaaggagctgctgcagaaggagctggccacctggaccccggtgagcagtcagagtgtccgtcccctcctcctccggggggaggcactgcctagactctgcaaagagagacctggggacaacaagcatgagcacaggacagcaagggagggggctggattgtgaggagggagtgggagggggagaactgacacagcagaaacctcagcttcctcatctgtaaaatgggatgacaatcatccctgctgccttgcagagctgttgagaggactgagtgagagcaccatgaagaatgcctaacacttggtaggcactcagtagcaaatagtaggtgctcgattaataatctgagaggacagatttgggaggggattgcaacgagtgcattatcagagcagggaggttgaagtcggccctcagaagggtgtagtttggggtggggtgggtccacttgggagaggaaggagggaggtggcgtgtgaggctgttctgccctcctcatcctactcccttacctctcccaacccttcccttgcacagactgagtttcgggaatgtgactacaacaaattcatgagtgttctggacaccaacaaggactgcgaggtggactttgtggagtatgtgcgctcacttgcctgcctctgtctctactgccacgagtacttcaaggactgcccctcagagcccccctgctcccagtagcctctgctccagggggtgcgctggctgtcgggggctgggcatgtctcccacaccccctcctaccctctctcctgtacccctttcaatctggacttgcccaggtcttctgcgatcagttaacccattttacctaggaggcccagagatgtgagggctccttcctcaggatgcccagcgaatgaggggtagagccactctggggcccagcctgcctgccgcacccctgtggcctcccttgtggatgggaggaggcgggatctgctctgaggccctcgaggctcagcagagcgtgcaccaatgagaccacgatgggaaagggcctatttaactcctaataaaaaactggcatcagcttggttttgtttggttcttctctgaggacgcgtctcctgagctctttgctcctctctggccttttccactgcgggaaggcagctgagggcaggggcagggtgctccctgagggaagttgcagaccctgcagaaatgcagtggcctccagggtccagcaggagggcgtggggacaaaacaaggacccctgtcctcccttcctctctctctttctttgggatctttgagagaggactgcctgagtttcccctgggactcagtgctcatggttggaggagggtggggccgtgggtgcagtgggggtgtttgttccctgcctcgggctgtgggagcccagagagcagcactaatgggattagggtgtctgaggtgtttctcccagccaggaaggggtgctctgtatggaggggtaagggaataacttgagctagcccctatccctgaagccgcagccccctgagggccttaaccccctacttctaaccctcactgggtttgtagcccaccctgagaggttgacccgaattataactcccctatttcatgccatttcacctctaactctccaccccaacctggattcttcattcctgacactcatcccaactttaaatggcccctcctgataccctctccgaacctgagatctatccgtgagcccccacgcctcactgccactccactccatcactacctcacccaggacctttcccactgacgttcctgaggtggtcccagagcctcctttgggtgtgagcctgttcccctccagatccccccgccccgaccctgagccttacttggcatggcagacagtaccgggcatggggatccccaccccagtttttgtttctgaatctttatttttttaagagacaaggtcctctgtgttgctcaggctggagagcagtggcttgagcatagccaactgcagtctcgaactcctgggctcaaatgatcctcctgtctcagcttcctgactagctgggactacaggctacagccatgctgcccagctaattaaaaaaaaaaattgtttttcctttttatagagacagaagtctctctatgttgcctaggctggtcttgaactcctggcctcaggcgatcctcccatctcccccctagcttttgtgtcaccacatttccagggcaatctcccacctgtcacccaccaccccctgcatctcctttcctaggtccccatgggactactccctgtcccccatgctccaggcacaggctgccccttcctccacctctctaaaactcaggctgagctatgtacactgggtggtgcccatctcatccagtcccctgctagtaaccgctagggcttacccgttacccacgggtgcccacctgggaacaggaggcttggttccacggctgggctggtggagggtgctgtggcacttaccgcatcagcccacagcaggaaggcagtatccgctctcccctgtcccctgctatgggcagggcctggctggggtataaataggtcagacctctgggccgtccccattcttcccctctctacaaccctctctcctcagcgcttcttctttcttggtttggtgagttgtgttggcctgactggcatgcaaggggtgtcagaggccagggctggggaaggagaaggggaggctggtgggggccagatgtgctaaagagatccagatgtgagattctgatgtggaactctgggtggattgtgtgcgtgggtgtgcatggcacacacacacatgcacgtaagacggaggaaaaaacaaacagaaaagtgagcaagtgactgaatttgagctctccaggtgcttctgagatgtgggcttgcacacgctgttgctatagtacgtgttggtatgtatgtgcctgtgggtatctgcactggctcatgtttgctgggttgcgcactcgggagcaggaagcaaaggaaaggcagaaggcaactgtgggcctttgtctggtggtgtgccccatgagcctctgccctgcacgcagcagcccagctcgagaaggtgcatggcctctgcagcttctcttccaacccttgcctctgccacctcactttgcccctccccatgctgagagctaagcggctgtgctggttttttccactgcaggcccctgggcaggcctccagcagccacacccagttctgggagggaaaagaatggcaagggcggggcctttgtggctgagctgtgggagtggatagactgagtgaggggtggaaaaaatgctgttgttgaggcaaggcctgggaggccctgggagtttgctgcccgaatctccagagcttgcgcagcggatcttgcaaatgttcactgcccagagcatgtgttccccactgtgcacaccctcccagccaggtgcgggggcccactgctctgggctcccccagggagggagcagagtctcgccaagtgctcctggagggatgggagtggagcctggcattctgaacacatctctgaggggtgggattaataagacggtctctgtgcctcctgctcccagatcctgactgctgtcatggcgtgccctctggagaaggccctggatgtgatggtgtccaccttccacaagtactcgggcaaagagggtgacaagttcaagctcaacaagtcagaactaaaggagctgctgacccgggagctgcccagcttcttgggggtgagtgggtagtgcctgagtgagtccccacgtggggcatttcccacagaggagggcagcagtcttgctctagagcattagctacagagggcatctatcagtggggtggctgcctggggtggaaacacattgaacaccaccactcactgcctggccccatgctgaaagagggctgagaatgaatgggtcagacactgccaggtgctttgcacaacttaactgaagggaagactaagctcagagtgctaagtaacttcccaaggtggtcagtgtacacaactgccatccggaccgggactgtctgactcttgccatcactccaacagtggacactgtttgagtttctatttggcttgtagatgtgaagacacagatgtggagatgatcacaggcctgcagacgttcccttcaaacaataacaatgtatatttgtatcaaacataacacagtttatatattgttttcatgactattactacctcatgggattattagaacaaccttgggtgaaaatgtagtggtcccgtcatttttccattgcaccaggtactcagacttccttatccaaggagcaccttctccaccctagcttagccttgagggttggagttccaaactggacctcccaaaggagcctccctgaactctggtctgggagtagaaactgggtctggtcctggctccacccactgggcttctgttttctatctgtagcctcttctccctccagaaaaggacagatgaagctgctttccagaagctgatgagcaacttggacagcaacagggacaacgaggtggacttccaagagtactgtgtcttcctgtcctgcatcgccatgatgtgtaacgaattctttgaaggcttcccagataagcagcccaggaagaaatgaaaactcctctgatgtggttggggggtctgccagctggggccctccctgtcgccagtgggcacttttttttttccaccctggctccttcagacacgtgcttgatgctgagcaagttcaataaagattcttggaagttttgaggctgatggtttgagagactctgggggcgtgggttggggactgagggatatgttgtggggtggtggtggggagagctgggagttgagctgaagttttatggacagcagaccagtgaagttaggggagggatgcagggtgactaacagtgtgtgtgcacaggcaatagagttcactcggtgtggtcaaagccgagaaggggacccctcaccacccccctgccaaggtttggaaggtcccagctgtgggatctcagccagcccacttacccctcccacctctctccaaccttgcctctggcaggatcttgaaccgaggctggaattgaaggtcatatctgttcctggttggggtctggaatggagtttgggtgtcctgggagtaagtcggagggaaaagaataaggctgagttgcagggaggaagtatttaggcgagagtgggatggggaggagggctggcactcagtgctgacgttgacagtccaggccctgtcctgccacccacttccagatcattggcttcaaaccacagggatggattaatcctttcctgtgcgtggtaggatcagggagggcaatgtggagggagacccgctgtttgcagcagcatgagaatataggcattctcgaatccaccgtctctgccataaaggtccctggatgagatctgttatcagtcaggaatcaagctccttcagagaaggacaggggacctcagaagagatgagtgggggtcagtggctggagtgggagtgaggcaaatggtgggaaggtgaccatagttttggagacaaaattccacatatatgatctgacaaatgaaattgagattattttccccccagaaaatataaggcatgatattgcttccccttaggtaggttcaaggccagtggctccagggtgcagtggtgggttgaggttagacttcaaggccatgtctgggtgactcagggatcttttaggaagaggtgcatggaggtcaggtgcagaggctggagggctttgtcccactgacctcctcttgagggtcctctttcctctcatcacatggggcttttctctcaggtttcagaggagtggggcaggtgactcagatgttcccgcagggtttgaatacagagacttgggaggaatttcagttcaggagaaagtctgctgccttccgctgccctctccatccaccctccctgggagcgccctccctggggcctccacccaggtcacgctctccttcagagatgcctactgcatagcaaccaatccctgctgcctctccaatcttgccagctgggggtggggtggagtggggagcagtggggaggccccccaggctggggtgggactgcagcagtgataggtactacaccctgagcccaggtctgttcttggactggtggtagaagtatgttgttctactgtggtagaacgatgtctgagtgtctcctgggatacaggaaactctccctggcccctacttcctccttgactgcagcctgaacctgaacccccctccccaatccacaacctctaccccagtgctgggccttagcccttcgctggacaccttccctattcctgattctcagtcctccatgccaagagtctccgacgagcctttcctgtgaagagcagtgaggcctagaagaaatcgttcatttaaaagccctttaaaaacctctgggcccatattagctcatgaccttgaccatatccttcgcagaaaatatcttcctccactgatccccatctcaagggctgtcttctctactcctggagtgggtggcaggatgggtgggaggggcccgatgtggagagcttcctaggacacggggagatggtgccctgtgtttgtcccacacttctgaggttttctttccaggacagcctggtttcccttcttcggcttattgttccatcagatttcagattttgagttctgatttttggtcagaagagtaaagtttctgggattggggacgtgtgtgctatgggaactcagtgtgtccccagcccttgtttgtaaacaaggaaggtgagattggcagaaggggtttctccccagctccatcccgggaggctctgacgtgggcatcctcaagtccccaacaacttctcatgggccctttctctcccctggattcctagggacagagatcagggaaataaaggcagaaggcagtgagagggaggctatgcctgctgcttggattctctgggctcactcccacagtggtaagtccttccttcctatgtctctgttcatctgatatctggtgggtcacgctggatgatgagggtgacaagtggtggtgacctccaccaaggaggcctggccccacaagcgggcatgcgctcagggagaagagggcagagcctttggaatttcttgagaaatggctctggggtggaggtgggggtctggactagccaggatgctcctgcaggtgcacagagtcccttgccttcaactgtggtcccagctgagtctccttgaggtgggagaggctgaggtttttgtggtgggagaggaatgatgggtctggttcaagaatggcagggagggctttgggctggaggtgaagactctccacagatttaacctgcagccttcaagttccgtgggtgttgcctccttcctccctgagggggaagtggtttttgagtctgagtcacttgagctccatctgtctcttcccttggctgagggtggctgtgctattggaatccaggcccttattcaagcgtagcctctggatccaggttttggaatgatcctggagatttcaagaggccccctgccctccctgcccgctgacccgtctctgtgtgcactgctctgggccagagtctggagaccagctgggccagctcagctcacctccctgctgctccttgttgagaccccatcacccagttccagcccagccccctctcagccctggactctctctttgccctgtccccgactttaataatgggacactcctcgatatcaggtgattcaggcactgggggaaaggctggtgaactgcctgtggaaaaccagttcctaagctggaagaagcagagagaaaatcgtgacccttgatctgctccaccatctgccaccagggccttttgaggaggtcgtcttctcatctttctgcctcaggcctacttttcaacaactccccagcaggagagtctgtggtctcctttggggtcttgctgttctccttgtaccagcagctccagagtttgttgtgggtctcattgtaacctgtactgatatagatgggcgctcttgttagtggatttcagtctcatcctgggttccagtctcttgttctttgagggaggggcctcagaggtaggctagtgctgctggtggtgacttcctgaggaatgggatcttcccctctccctctacagagctgcacactgtgatggagactcctctggagaaggccctgaccactatggtgaccacgtttcacaaatattcggggagagagggtagcaaactgaccctgagtaggaaggaactcaaggagctgatcaagaaagagctgtgtcttggggaggtaggtgattgttccctcatcctccaccccaaagtctgagtactccctctgggggacacatacctaccctcaggatcctccagcctaagccaggggcagggtggccaagggctacagacagagacaaaggaagatggtggggatttcgggccagcaaaactctagccctctgtgaaggagaatgggtcagggtctcactgagaaggaggaagggctgagtctggagggtttagagaaggagattgaggagccttcgatggtggggccaggctctcccagcagtggcagaacctgtgctaggggtcatgggtggtgaagggatgcagggtgtccaggtccagctgtgtacaactcaagtgtagggactctgcctgattcttctctgtgtgcacagcatggccagggctctctgatggtgctggcactcaaactgaaaggttaacttgtaaacatagggtagtgaggagacagaactggttctcaccagatggaggtggtgggagggaggtgactgacagaggggaaggcccatgaggttattataatacaatatccccgaggataaataaataaataaatatatatatatatatatatatatatattttttttttttttttttttttttgagagagtctcgctctgtcacccaggctggaatgcagtgacatgatcttggctcactgcaacctccgcctctcaggttcaagcgattctcctgcctcagcctcttcagtagctgggattacaggcacgcaccatcacgcccagctaatttttgtatttttagtagagatgggggtttcaccatgttggtcaggctggtctcgaacacctgacctcgtgatccatctgcctcggactcccaaagtgttgggattacaggcgtgagccactgcgcctggccaaggataaatatttttgagacagagtctcactctgtcacccaggttagagtgcagtggtgcgatcatggctcactgtagccttgaactttcaggctcaagtgatcctcttacctcagcctcctgagaagctaggactacaagcaaataccaccacgcttagataatttttaaaattttttgtagagatggggtctcactattttacccaggctgttcttgaactcctggcctcaaatgatcctatcgcctcagcctcccaaagtgctgaaattacaggcatgagccactgtgcctagtcttattatttttatagttaaaaaaaatcaatgctcaaatacatcaaataacttgcctaaggacaatccgctagtgggaggctgagctggagttctgggccaggcctgtgaatcatcctccctgtttcctttaaaatttagcctgggtgcctctccatctatcacaccttgagccctggtaggccctcccagaaagaaggtccacagtgtgccacatgggcaggggacagaagcaggtatgggcgtccccaggcctgatctctggccttctgccaggctgcctgcatcctggaggttaatgagggcagagggaggggccacaggtccagcagggattaattacagaaggagagacgcccagaggagggcctggcaataacaggagcccaggctggggactaggatcacgtgacagacaagcagtttccgcctttgtaagtcccaatgtctcctgtgaaaacctgtagctgacggcaatgatgaggagacatcaggatctgcttgtctatattttcttcctgttccacccaaaggaccctgactccatcgtcctaatggagccaggctgggacatcaggggactgaacaacagtgcacaaccaggctccaggcaggcctcttgcacagctctcctagcaggggagggatgcagtggcttcacagccccagtgcactgctctcattgagagacattttgtccggggttattctcacctagtccttagaatggggagagagtcactcagagacttggataatgctcaatgccacataatcagcaaggtgttctttttttttttttgagaaggagtttcattcttgttgcccaggctggagtgcaatggcatgatcttacttactgcaacctccgcttctcaagttcaagcgattctcctgcctcagccttccaaatagctgggattacagggatgtaccaccatgcctggctaattttgtattttcagtagagacagggtttcaccatgttggtcaggctggtctcgaactcctgatgtcaggtgatccacccgcctcggcctcccaaagtgctaggattacaggtgtgagccaccacacctgacccagcaagctgtttttatcaggtgttggtataaaacctagatgattgtttctttggctgggggacagtattgcagggaaggcaggctaggctagcattcctgctgtcatttatttccattcaggagtcaggtccctgaccccctacctcatgccaggcccttccctaggtgtgggcagtgggcagactctgggggtcgagatgctgacagtgtcattgactcagctggggctcaccctgaagtttcggggtggggatgacaccatgcagtggtgcgagggcagggctgggagcggggtctgagctgtctctccacctgggtccacaaaagatgaaggagagcagcatcgatgacttgatgaagagcctggacaagaacagcgaccaggagatcgacttcaaggagtactcggtgttcctgaccatgctgtgcatggcctacaacgacttctttctagaggacaacaagtgaccagggctgccctccaccctcaccctccaccctttgctgctgacctcggctgctcctctcacagaccctctttggccccctgccctcctctccctcccagatggacccttccatgggaggaaataaagtttccatcgcaggtgctgggagtctggttttgaagctgtcttgtctaccttggcctggggagaggggagcacaggaagggtctctccttgagtgggttgagacagcttctgcctctgggggttagggtcctgggctcccactgcattcctctccttctttggtgtggacgtcattggttttgtcatggcttagttttgcctgcctggaaaatggggaagttaggccaggcgggaactctgcaaggatgcagaggaagttaagagggaaagttgctttgagaggaggacactgggaggggttgggagtggctcctgagggcggtgataggcaggcaggcctgacttgtccacagctcaccggaggccaccttggcagcacctgtaggaagggcatgtctggcctccacaccagccccctccctcttcaccatttccccttcaatagcaccactctcatcatctatgggggacagtgctttcttctctccctgcctcctccatcaaaatcttttctcaggggagggtctgaaaaggccttcactcccccgtaaataacgaatggtgcttacagggctgggctcccacgtgcatgcacattaacaccaaaggtgctgtagtgaatggaatttggggcactgaggggaaggagtggaggtgttggtaggaacttgttgctggtgggggatgggcgccgtagatatcctttacaccactggctactccccctatctcctctggggtgaccctgagtatcctctgtgggacaccggcatcctgtgaggcgccctccttgcccacattgacgctgcgctggctcgagggtcacattcacggtctggcagaggaagcaggggtgaccgccgcagtcctcctcctgctccccttgccgagtcacgtgtcacgaagagcaaactgagcaaactgagctgcgcagatgaggggagactcgtcaccaggcgtgcagtgggcactgctgggctcccccatcccgtcctaacccggaacagccccgggcaggaggcgtggaaagtcgagggggtaaaccgcgaatgtgcgttgtgtaagccacggcgcagggtggggcgcgggcgggacttgggcgggcggggtgggcttggccgagctggcctccggggcaccgaccgctataaggccagtcggactgcgacacagcccatcccctcgaccgctcgcgtcgcatttggccgcctccctaccggtgagttctctccaggagccctggatactttccagggccagctgccctcacgctgggggtccagccatcccctgcccagttcagccgctggatccagactggggccatctgtggcgctcccccgctggagggatagtcaggagcagcagtgctgtgccaggcaggccttgggctaagggatcgcaatggggtgtgctcttttggggtgcggaagggagtgccctgggtgtgtcattgccaccatgtgtggccctgtgaagctgtgtttaagctgcctttgcagcctccattcccctcccctgcccagccatactcctcaacttctggatcccctgaaggacagttctcagctgtgcccaaagctactgttcctatatgcttcttagaatccttaagccacctctcttgccttggccctagtgtgctctctccttccccttcaagccctgggctgtctcctgatgccattgtgtgtggcctgagactgggtggttccaaaggaggcggggctagtgcaggcagcattattggggtgtgtgggtgagaagtccttgctcccatggcactgactaggccctctgctgccagctccaagcccagccctcagccatggcatgccccctggatcaggccattggcctcctcgtggccatcttccacaagtactccggcagggagggtgacaagcacaccctgagcaagaaggagctgaaggagctgatccagaaggagctcaccattggctcggtgagtggcctcctccccaggaccccttttcccacccttgtcctttggaagcaggattaggggagagagaggtgccaggtgcatctgactcacatttacccacattctgaggccctggtccacatgtagaccctgagctgtagacccactctcccagcgggtaggggatgcttccagccggatatccatctctccaaatgaggaccagtaactgagaagtagctgaggagaagcaatgccaaagtgacatgggtccttggtgatgagggagcacagagccacttgcagagaggattgcctgggagggggaaggggaagaatccagggttgtcatcaccactgagtatggatttcacattctaacacattagaagctgcaggatgctgaaattgcaaggctgatggaagacttggaccggaacaaggaccaggaggtgaacttccaggagtatgtcaccttcctgggggccttggctttgatctacaatgaagccctcaagggctgaaaataaatagggaagatggagacaccctctgggggtcctctctgagtcaaatccagtggtgggtaattgtacaataaattttttttggtcaaatttacccttgcgtcctggcttccgaatgatttctgttcctccttggcttagtgggacaccagccattggaagatttgctcacggtcaacctctgaaaatgactcattgactcgccaggccagaggacccaccctgacaaggctgcctctagcacataaggtgcctttatgtgaatgaggagagatgcccctcttggcaacgccatcctaaggaaaggctcaagtggtttccagtagagagagtcctgggatgagcttggagatggaaatggtccctgggccgggatgtgatggggtttgggggcctggaagtgaggcagagatagtcccagaggctcccagatgtgttttgctctgggtgtggcaagaggggccctggggtggggcaagtcccctttctcatcacagcgcaggggttagatagggcacatctgagatgcctgaggcttggctcagggagtttcctacaccagtgaggacgctgtgtgactgagtctactgcggctgcccaggtcccaggtggagtgggggaggcacactcttggagtgtgtccctgcattcagggtgagggctttttgttggaacggtggtctgaggagctggcagctgcaccaacacgtgaaccacggggtgttcagtaatggggcggggtatccctgcagcctcagcgtaatgactcacccggcacttccacgggatcccagcctggatctcagcccccatcagagaagatgactaattgaatcattgtccatcatctggattagtgttttcaggcagaagggaagaggataaggagggtaaacgctgtttccgggtgatgccacatcattcagcctctctaggcctagtccgagctgggcaagtttacctctagcttctggggaagagatcttgactttagatggagaccacatccttctttccctctcacctccccacttcccttgggggtccaactttgtggaattaagttgtcttctgtccccactgggtggggattggtaaacagctgggagatgcacctt

SEQ ID NO: 1417 - DNA, 859 bp, Homo sapiens
ggggaggtgagcaattccaggaagggcttcccctccaatagaacagagtatccctatacagaacctccctgctcaaaacccccaggggtcgggagggtaacctcaggggaggccagtctcagattggtaaacacccgaactggtcaactctcaagagaccatctggttcaggttcctgactgggccagcgagtgaggatggccaggcctctggagcaggcggtagctgccatcgtgtgcaccttccaggaatacgcagggcgctgtggggacaaatacaagctctgccaggcggagctcaaggagctgctgcagaaggagctggccacctggaccccgactgagtttcgggaatgtgactacaacaaattcatgagtgttctggacaccaacaaggactgcgaggtggactttgtggagtatgtgcgctcacttgcctgcctctgtctctactgccacgagtacttcaaggactgcccctcagagcccccctgctcccagtagcctctgctccagggggtgcgctggctgtcgggggctgggcatgtctcccacaccccctcctaccctctctcctgtacccctttcaatctggacttgcccaggtcttctgcgatcagttaacccattttacctaggaggcccagagatgtgagggctccttcctcaggatgcccagcgaatgaggggtagagccactctggggcccagcctgcctgccgcacccctgtggcctcccttgtggatgggaggaggcgggatctgctctgaggccctcgaggctcagcagagcgtgcaccaatgagaccacgatgggaaagggcctatttaactcctaataaaaaactggcatcagcttg

SEQ ID NO: 1418 - protein, 101 aa, Homo sapiens
MARPLEQAVAAIVCTFQEYAGRCGDKYKLCQAELKELLQKELATWTPTEFRECDYNKFMSVLDTNKDCEVDFVEYVRSLACLCLYCHEYFKDCPSEPPCSQ

SEQ ID NO: 1419 - DNA, 650 bp, Homo sapiens
gtgtgcgtgggtgtgcatggcacacacacacatgcacgtaagacggaggaaaaaacaaacagaaaagtgagcaagtgactgaatttgagctctccaggtgcttctgagatgtgggcttgcacacgctgttgctatagtacgtgttgatcctgactgctgtcatggcgtgccctctggagaaggccctggatgtgatggtgtccaccttccacaagtactcgggcaaagagggtgacaagttcaagctcaacaagtcagaactaaaggagctgctgacccgggagctgcccagcttcttggggaaaaggacagatgaagctgctttccagaagctgatgagcaacttggacagcaacagggacaacgaggtggacttccaagagtactgtgtcttcctgtcctgcatcgccatgatgtgtaacgaattctttgaaggcttcccagataagcagcccaggaagaaatgaaaactcctctgatgtggttggggggtctgccagctggggccctccctgtcgccagtgggcacttttttttttccaccctggctccttcagacacgtgcttgatgctgagcaagttcaataaagattcttggaagttttgaggctgatggtttgagagactctgggggcgtgggttggggactg

SEQ ID NO: 1420 - protein, 101 aa, Homo sapiens
MACPLEKALDVMVSTFHKYSGKEGDKFKLNKSELKELLTRELPSFLGKRTDEAAFQKLMSNLDSNRDNEVDFQEYCVFLSCIAMMCNEFFEGFPDKQPRKK

SEQ ID NO: 1421 - DNA, 607 bp, Homo sapiens
attcttcccctctctacaaccctctctcctcagcgcttcttctttcttggtttggtgcttctgagatgtgggcttgcacacgctgttgctatagtacgtgttgatcctgactgctgtcatggcgtgccctctggagaaggccctggatgtgatggtgtccaccttccacaagtactcgggcaaagagggtgacaagttcaagctcaacaagtcagaactaaaggagctgctgacccgggagctgcccagcttcttggggaaaaggacagatgaagctgctttccagaagctgatgagcaacttggacagcaacagggacaacgaggtggacttccaagagtactgtgtcttcctgtcctgcatcgccatgatgtgtaacgaattctttgaaggcttcccagataagcagcccaggaagaaatgaaaactcctctgatgtggttggggggtctgccagctggggccctccctgtcgccagtgggcacttttttttttccaccctggctccttcagacacgtgcttgatgctgagcaagttcaataaagattcttggaagttttgaggctgatggtttgagagactctgggggcgtgggttggggactg

SEQ ID NO: 1422 - protein, 101 aa, Homo sapiens; identical to SEQ ID NO: 1420

SEQ ID NO: 1423 - DNA, 922 bp, Homo sapiens
ggggaggtgagcaattccaggaagggcttcccctccaatagaacagagtatccctatacagaacctccctgctcaaaacccccaggggtcgggagggtaacctcaggggaggccagtctcagattggtaaacacccgaactggtcaactctcaagagaccatctggttcaggttcctgactgggccagcgagtgaggatggccaggcctctggagcaggcggtagctgccatcgtgtgcaccttccaggaatacgcagggcgctgtggggacaaatacaagctctgccaggcggagctcaaggagctgctgcagaaggagctggccacctggaccccgactgagtttcgggaatgtgactacaacaaattcatgagtgttctggacaccaacaaggactgcgaggtggactttgtggaatcctgactgctgtcatggcgtgccctctggagaaggccctggatgtgatggtgtccaccttccacaagtactcgggcaaagagggtgacaagttcaagctcaacaagtcagaactaaaggagctgctgacccgggagctgcccagcttcttggggaaaaggacagatgaagctgctttccagaagctgatgagcaacttggacagcaacagggacaacgaggtggacttccaagagtactgtgtcttcctgtcctgcatcgccatgatgtgtaacgaattctttgaaggcttcccagataagcagcccaggaagaaatgaaaactcctctgatgtggttggggggtctgccagctggggccctccctgtcgccagtgggcacttttttttttccaccctggctccttcagacacgtgcttgatgctgagcaagttcaataaagattcttggaagttttgaggctgatggtttgagagactctgggggcgtgggttggggactg

SEQ ID NO: 1424 - protein, 101 aa, Homo sapiens; identical to SEQ ID NO: 1420

SEQ ID NO: 1425 - DNA, 559 bp, Homo sapiens
cattcttcccctctctacaaccctctctcctcagcgcttcttctttcttggtttgatcctgactgctgtcatggcgtgccctctggagaaggccctggatgtgatggtgtccaccttccacaagtactcgggcaaagagggtgacaagttcaagctcaacaagtcagaactaaaggagctgctgacccgggagctgcccagcttcttggggaaaaggacagatgaagctgctttccagaagctgatgagcaacttggacagcaacagggacaacgaggtggacttccaagagtactgtgtcttcctgtcctgcatcgccatgatgtgtaacgaattctttgaaggcttcccagataagcagcccaggaagaaatgaaaactcctctgatgtggttggggggtctgccagctggggccctccctgtcgccagtgggcacttttttttttccaccctggctccttcagacacgtgcttgatgctgagcaagttcaataaagattcttggaagttttgaggctgatggtttgagagactctgggggcgtgggttggggactg

SEQ ID NO: 1426 - protein, 101 aa, Homo sapiens; identical to SEQ ID NO: 1420

SEQ ID NO: 1427 - DNA, 964 bp, Homo sapiens
agatgatgcagcaagaaggccttctccaggtgttaccccctccagcttagacttcctggcctccagaatggcccagagatatgaacaaggcttctcatgtgcagttcctccaggacggctcctcaaaagtggttcctcttgacctgaagtcctgtgaagaacatagtcgatgttcacagtgtcttgctctgttgcccaggctggagtgcagtggcacgatctcagctcactgcaaccttcgtctcctgggttcaagcgattctcctgcctcagcctcccgagtagctgggattacagtgaggatggccaggcctctggagcaggcggtagctgccatcgtgtgcaccttccaggaatacgcagggcgctgtggggacaaatacaagctctgccaggcggagctcaaggagctgctgcagaaggagctggccacctggaccccgactgagtttcgggaatgtgactacaacaaattcatgagtgttctggacaccaacaaggactgcgaggtggactttgtggagtatgtgcgctcacttgcctgcctctgtctctactgccacgagtacttcaaggactgcccctcagagcccccctgctcccagtagcctctgctccagggggtgcgctggctgtcgggggctgggcatgtctcccacaccccctcctaccctctctcctgtacccctttcaatctggacttgcccaggtcttctgcgatcagttaacccattttacctaggaggcccagagatgtgagggctccttcctcaggatgcccagcgaatgaggggtagagccactctggggcccagcctgcctgccgcacccctgtggcctcccttgtggatgggaggaggcgggatctgctctgaggccctcgaggctcagcagagcgtgcaccaatgagaccacgatgggaaagggcctatttaactcctaataaaaaactggcatcagcttg

SEQ ID NO: 1428 - protein, 175 aa, Homo sapiens
MNKASHVQFLQDGSSKVVPLDLKSCEEHSRCSQCLALLPRLECSGTISAHCNLRLLGSSDSPASASRVAGITVRMARPLEQAVAAIVCTFQEYAGRCGDKYKLCQAELKELLQKELATWTPTEFRECDYNKFMSVLDTNKDCEVDFVEYVRSLACLCLYCHEYFKDCPSEPPCSQ

SEQ ID NO: 1429 - DNA, 97584 bp, Mus musculus
  misc_feature (1)...(97584): n = A, C, G or T/U
caaccaccccacctcacccatctccagagttcttccatctttcccaatgtaaactctgtacctattaaaattccttctagcttctttgtccctcaagtgcttgtgactgccattctactttctgtccacaccacatacaaaaataatcacatactataccttggatttgtatactataatttttatattgtctttcataactagctaatatcattcagcatcatcttcaaggtttaccctgttatagaatgcatttcattttttttaaaaattaaactagggctggtgagatggctcagtgggtaagagcactgactgctcttccgaaggtcctgagttcaaatcccagaaaccacatggtggctcacaaccacccttaatgagatctgacaccctctctggtgtgtctgaagtcagctacagtgtatttatgtataacaataaataaatcttttttaaaaagataaaaaattaaactatttttcataagagtgccctgcagctgggcggtggtggtgcaagtgcaggcttagatttcttagtttaagagcttcaacctcagcggggtgtggtggcgcacgcctttaatcccagcactagggaggcagaagcaggcagatttctgacttcgaggccagcctggtctacaaagtgagctccaggatagccagggctacacagagaaaccctgcctcgaaaaaaaaaaaaaaaaaaaaaaagagcttcaaccttcgttctagcccaccacccaccagaggcagtggaaaggaaaggctaatagaggaaaggcggatgtggacctgtttagaaatagttctttggggtgattccagtcttcactgtcaggatatcagcagttcaggtcacacaaatcagcagtggtggctcaatccactcgcaaacaccatgcatgcatcagcaacaacagtttgatccagaagaaaccacaaagcactctctgcccatcggcctgagttcacaggagcagctagaagcttccagaacaccatcagcaggtctctggtgcatttctctctccaaagtcatgacaactgatgatcagtaaagaaggcaaagcaaaccaatgctacagcatcatcagtgaagacctgtcagtcagcagggcccaacaaaaccagcgaagagtaagtagcaaggcaagtcaaggccatagcctcacccactgcctgttatttttataacctttccgagcatcacatgtcctctcaagcatctgctccatcaaagcatcacatgaccttccctcaggcagcttctaggaaaacaccacatgtctgttctcagcaaaacatcctcccacatgtctgcctcaacaaaaacatcctctcataggacagtttccagaaaaacatcatgtgacccaaaggagtctccaaagaaaccagacatttccactttctggatgctttaatcccagcactcaggaggcagaggcaggcagatcnnnnnnnnnnnnnnnnnnnncaggcagatctctgggttggtttaaggtcacactggtctacagagcaagttccaggacatagaaaacctgtctcaaaagagaaagaaagagagggggggggggcaataaataaataaataaattagagtgccctgcaaattctttcttttcttccttttttttccaagacagagcttctctgtatagccctggctgtcctggaactcactctgtagaccaggctggcctcgaactcagaaatccgcctgcctctgcctcccaagtgctgggattaaaggcatgcatcaccactgcctggtcttttttttttttttaatgtcgctttgccatccctgatggtccagtgacccgctgtggaacaacagctacttagctgccttttttttccccttcatatatataagcacagtgtagctgtcttcagacacaccagaagagggcatcagatcccattacagatggttgtgagccactatgtggttgctgggaattgaattcgggacctctggaagagtagcctgtgctcttaactgttgagccatctctccagcccaaattcatattctctctctccctctccctctccctccattcctttcttttcttttcttttttttctttttttcttttttggcttttaagtgagttggtttaattcaaagtggtacagaattcagagtacaatgaagatggaacagtaggctctggtgggattccagactgggttcactttaaattcacagctgaggtaggaattgctgaacgagccattgcattagtcactttattcatttttttttacaaaagtttattacaatgtacaacatgctccaagataacactccattctagctattaggtggctgtcttagttggggtttctattcctgcataaacatcatgaccaagaagcaagttggggaaaaaagggtttattcagcttacacttccacattgctgttcatcaccaaggaagtcaggactggaactcaaccaggtcagaaagcaggagctgatgcagaggccatggagggatgttctttactggcttgcttcccctggcttgctcagcctgctctcttatagaaccaagactaccagcccagagatggtaccacccacaaggggacctcctattgagaaaatgccttacagctgaatctcatggaggcatttccccaactgaagctcctttctctgtgataactccagcttgaatcaagttgacacaaaactagccagtacagtggcaaagatgttatgacagggaatccagatgtttaaataggaatggaagaggagggtcaccatcaccccagatgtgaggaacagcttactttttgccagatttcttaattccacctgtggccagggggcccttccctgcggccttggcttttagctgctcgagtttcttctgctcctccttttgtttctgcctgaaagccttatcttcctcgtccatctccttggcctgttcttgggctgtttcaggggcttctttttgccaccttccaggcctgacatggagcctccagccccttctccagcccctgatcctaagccagaaacggggcttagaagcctgcacttannnnnnnnnnnnnnnnnnnnnnnnnnnnnnnnnnnnnnnnnnnnnnnnnnnnnnnnnnnnnnnnnnnnnnnnnnnnnnnnnnnnnnnnnnnncctccctcccttccttcctccctcccttcctttttctctcttcctctctctttctctcttcctctttctttctttctttctttctttctttctttctttctttctttctctttctttctctctttctctctttctctctttcttgctttcatatctccatggagacgaagtagtgtcatgtggaagcgtctcaaagcccacccttctaactttctatctcttcttgctcccaccttttgtatttgcagaactccaatttgagtctggtattcattggacgctatacattcagggacagccctactcttagcttcaggagacagtcttgactcgtttaaactagccatggcagttgtgtttgttgttgttgtcaatggttggtttagcgtatttgcatgtgagacaggagagaacactaggaaggtgactgctggggaacttgcttgctttcctttgtgtatgagtgttttgcctacaggtctgtctgtctgtctgtctgtctgtgcaccacttgcttgtctggtgcccttgcaagtcagaagagggtatgtgatactgtggaattgaagttgtggatggttgtgaggcattatgtggatgctggaactcaaacttgggtcctctgcaaggaccagtttgccattttctggaagcttgcattcagcttgggaaggtaaagcccagctaatactctctgtcatgttctaaactgagctgtgctgaccataaatgcagtaaggagttacattgattttccttttgctgtttttgttgctacagacccagcagtttaaaacagctgttcctcctattggagggcttggtgtcaagagtccatctaggcacagcttgtttggggcctctattcagatttcacatggctacaatcaaggtactgttaggcggtttctttgtggcacttgggtcctcttccacgtgtcatgtgtttgttggcagaatttcatgaggatataagttggagggacctatagtcttcctatccccaagagccactcaggttctgaagtcccctgttgcttcacatatgtgggttgcctcctagacagttctgaaccttccccaaagccagcaggaccagtcttgctaagaagcagccttacttgacacagcagaatcatgggtgtgacacagctgtcaactttggcacattttattgcccagaagcaagtcacgggttctacttaccttcaagggagggggttacacaagagcgtgactcattaaggggtcatccggaactgtagttgcctcagggatttagaaaagggaaatgtcagagagagtagcagtcttcagggacactggagagagacttcagctagggcttggccgaggagagttcagagcagcaaaaaggtaaaaaacatctacaaccaaaaggttgtgtgagcagacatgcagaggtggggtttccacttaagtatctctgcttgaaaagggtgatggaactcactgcccctgcaggtcacaggatgtagggagaatttatcaagatggtggacagaggaaagagagtatctggctttggtcagaacactccagttcaaggttcagttcttgggttaattagcaggtctgctgttatctgagcctttgtgagggtaaactgggctctgaggtgggatgtgctctgcaaacaatgagtggtccaagtctgatactgaagacagctttgctgacttccaagactccgtgtgtccgagtcccccggtctctgattcctcttaactgatctctttgctcttcaagtcttctgcatagtggctagaggaaacgtttcctgggcagcttagcttagagtaaggtattgtctactttactctgtcatttgtcaccacccaaaggcttccaaacctatgcagtggcccagactccagtgtccagtcgtgacttgacaaattgtcttgggcttctcacaggctcttcaggttcactaggctccaagtgaactctgtgtcactcctcttccttcttgtactgggggactgtgtaccctcacttcctccctgtgccacggtacctgagatcctcccaggttctgagcctctcctctcccacacctccctccttgtatcccctctgctaccgccctagtttgagtcccattaattctcccgaatcactgcaactgcttcttaattatctatctcagctcactctccagacgtcccggagcatgaacttttctgaagtgcaagtttgacaatgtggttaatccattcaagaagcattcaaagacccctaaaatcctaggaatgaaattccaattcccgggcacagacaatatctagtatcttggagcctcccaagttctaactctcctgtcttccaactctgttctcccggccacagtcctactgagcagcacattcccacactacactgaggttctttcggacctcaacatccctcaccatcattctctgttgtgaatttgtccatgtataaccacatctccctatgccctcacctccagatgcttgaaagtgtctgtcacctctctcagtgtgatttaactgttctagttttgtcttttgctatcttgactgctagcctatgaacttttaagacatttcacatagcccaggctggccctgaactcagtaagtagctctgtgaggctggccttgaacttttgcatctagttctccagtgtatatatgtatataccattgcatggacttggcaacttattctctctctctctctctctctctctctctctctcacacacacacacacacacacacacacacacacacacacacacaagcatatacatgtacattttttttgtcatgttgttttgttttgaggcaaggttttgctgtgtagcactggttgtccttgaactctctctgtagacaaggctgacctcaaactcacagagatcacccaagtgctgggattaaaatcatgtgccaccatgcctggctaaacatatttttagatgacatttctttctgcttgtgtctcagtcaggggacatcttgtggagttggttctcttggtgtctcagggagagagcttaggttgctagcctggctggaggcacctttaccacagagccatccccatggcccttgctggcctggctgtaggctgctttaccaccaaaccatcacctaggcccttattttctcattcttattatataccaaacttgtctttcagtttgatctttcctaaaattcgttatgtctttttgaggcaagatctcactctggacttgtgacgattcccctgcctttcattctcaagtgccaggaaaacaggtataagtccccggtgctggctcatttagttagctaattaattaggtttgtttttaataagtcagggttcccgtgccagactggccttgaacttacttagctgcctggattaccttgaacctcagatcctcctgcctctacctgcccagtgctggcattacaagtggtgtgagagctgaaacccagaacttcttgcatgctagacaagcaacgtgccattgagctatgtccccttactggctttcatttgactgaaagtttgaaagttagagaagagttaaagaaaaggaataatgagaaaagtctctctcctactcctgtcccctgcccagctgtccagactccttccctatcagcaatctctccaaccagtttcttgtatctaaagatactgagctatgtggttccccgtttatacactgtaagatattacgtctgtgctctgtcctattctcgcttgactgggcacagtctctgtgagctcatttcatgccataccactaggagcttctttagtttttctttttgttttaagtgatgatgttttccattgtggatgtatcatattttacccaatgactgttattaatccaagctactgtgactataaacagtactacaatgaccgtcacaaaagtgttatttcccaggtgtgtgagtggaaacggactctgaggggtgaagaggttgcatgaagggcagtgcagtttgactccctaaacctgtagtctgtagctatctcgtttatctctgcatctctcaccattgttaaaaagcctagaacagaaggtacattcaatttgtgtgtgtgtgtgtgtgtgtgagtgcacacatatgtatgtgtgtgtgcgtgtgtgctgaaaaaaatattaaaaaaaggtctcttatagcccaggatccccttgaacttgctctatagctgaggatgatgaccttgaacttctgatttttcctagggcctccaagttctgagtgctgggagtgtatcaccacatcttgtttttatgcgactagggattaagctgggcttcctgcatgctaggcaagtggtctactgactggctgacacccttagcctcattcagtgtatctatatgtatatttgtttatgtatatatgtatttatatacgagtaagtacattacaatttatgtatatgagtgctcaatttgcatgtatgcctgcatgatggaagagggcatcggaacccattgtagatggttgtgagccactatgtggttgctgagaattgaactcaggacacctggaagagcagccagtgctcttaaccattgagccatgtctctagccctcccaccttcagtatatttttttaataaaaaataaaggcaaatgttgtttgtttgtttgttttttgagacagaatgttagcatgtagctcctggttggcttgcctcaactcacagagatgggctggcctctgtgtcccgagtgctgggattaaagatgtgggcttggcaaaaataactagttctatctgggcatgttgatgcacgcctttaatcccagcactcaggaggcagaggcaggcagatttctgagttcaaggtcagcctggtctatagagtgagttccaggacatccagggctacacagagaaaccctgactcgaaaaaccaaaaaaaccaaaaaccaaaaaactagttattttagcagcaagttctttccatccagtactcaattcaaaataaattattcaagtccaaaccagattccatcattatgttgaagcaaaacttattctatctttattatttcagtatttcagaactaaccaagagtcttcatcagctttgttgtaaaacaaggttacttttattccttttgtttataatgcaaacctttctttttaaccttcatatgtatgctctaactgtagtgactttgtgtctccattcagtatgtttcaaaatctcttaatccccctattgcttcttctgtcccttgtaatcttaaaaactctccatggccagtaaactctttcaggggcttgtttgtttttataaattatctgcttcttttaggttcataattttttacttgtgtaacctcatctaccaagcagggactgggctagtgctgtaaagcgttaataagttctagatgtaaagacttggtacatagtcatgttgagaaaggtagttcttggtgcttctcctcttcttctgctggatgccaagaaggaagactcctggctcgttatctccaggttatttctccggttggggggttgtgttaatatgtcactttgggagatgaagtaatgtccccctcaggacaaagagcaagtctactgtattcctttgtacagaatggcaacctttccaagttgtgtgtcttaggctctgataccttaggggaacatcactcatcagagctctttatctacatggtgcttggtggggaagaactgagaatacctgaggaggctgatactgtttcctttgtctttgctttgtggaatcttgtgtattctacaacatctactaaacaggaatggattaactagtgaccttatcagtagggggaaatcaaataccaaagtggagcagtgatggcgtagattgctatgtgcattatttctgtcattacttgctgtcaccaggcacccagctctatcaagtttatatcctgccagatcgccaaaaacaccaactgcatgttttctaagaattctcttgtgctattggaagaaatgaaataaacaagataaaagcaacttcaaaactcttgctaaattaaaattattgaccactttaatatccagttctaaatcatggaagctgttgttttcctccacacatgcttttttgtatgtctgtatatagccgtgaagttgcaataacatggaaaagaaagttgcgcaaaaacagctgagctttaaatgctgttacataattgctgcttgactttggtaacactaaagttccgtatcctaatacttgaaataaggaaccgaattcacgatctggttgtatcacttgattgctggggctttgtccaacatgaatatacaaatgaataaccgattcaagattgcaatgaatcaccaactagtggtcgggcataatcccagcaatcaggaggcagaggcaggtggatctctgagtttgaggtcggcctgctttacagagccagttcaggacagcaagggctacaaagggaaaccctgtctcgaaaaaacaaaacaaaaaaagattctcatcatccaaccaaggaaacttaaccagagcccaaagcccaataaaccacaactcccagaaggctttgagcccggatgcgtcatgcaccatttgcagaactacatctcccaggaggccctgcagcgcccaaccgtctgcttctcccgccttgctcccttttcctcaccccctcgcagcgcggtggcccactagctccagcggtcggcggagcgggcgcgcgccggggtcgcgcggctgccggagggggcgggcgcgcgccggaggagtggaggcgtaggggggcgggggaccgctcgcttgctcgcaagatggcggacgaggacggggaaggtattcacccctcagccccgcaccggaatggaggcggcggcggggggtctgggctccactgcgccgggaacggtggcgggggaggcggcggcccgcgggtcgtgcgcattgtcaagtccgaatccggctacggcttcaacgtgcggggccaagtgagcgagggcgggcaactgcggagcatcaacggggagctgtacgcgccgctgcagcatgtgagcgccgtgctgcccgggggggcggccgaccgggccggggtgcgcaaaggggaccgcatcctggaggtgtgagtatcgctgccgccacgccccgtcctcctatccttcgcctgtcctggccccgcaccctgtcacccaggccgcacctctcttagctcgagagcctgccgcgaccctcgccccccgcgggccttcgcggcccggcttggagcctcctgctttcctggcgtctccagtttgtgctctccctgctgctcccatgcctttggctgctctcaacccgtttgccttcttctatagcatgcctctttctgccccttactgagggagtctcctttcgacctagccagtactgtgtcctccccaacttttcatctttagcatcatagtttcctggtcgctgccactcccctcagaccttgtggactgtcccttctgccctctagacctgataggacctgtggtcagctcattttcctctggaggcatcatttctccccaccttaaccctccacccactttccttagttattccccgttatgataaaagcacaccgacatttttgcatccaccgtttggccttttctcccctcttcttctttgtagtcacaccatctcgagtataccttatcacatgcgtttttgggggaggggttgcaacctgattttcaggctagcttctccatggctacattgcttttgagtacagccttttctggctccccgacttcccacgtgcaccactcctcacaccttggagttcggtttaatagtgctcctagctcctgcttccctcagactgcagtcgacttaggtctttgcccgctccgttttcctcctgctctgtgctattgcaatcctacactttaaatttctcgacgtagctttcccttctctttttaaggccccttctgctgttgcaacccaccttctgctgcagtcttccttcatcgaacttgttcaggctcacttgtcaccaccacatcccttaaagctccagagatgttgtcttggcagtttgaacgcagacctccactgccctaagctgtgttgtggttgtgattttgtactttgtcctaaatttgtatagtggttgttggttgacttgttggcgctgtgtgctctcattgtctccattctccttcaatcctggatctctccttactgcatctatattgtatcgccccccccctccccgccccccacacgcagcctctccttccatgatgggatttactcacacaagtctttcttctttttaaatatttcattttaattgtaagttccacagctgcctgctcttcattttgtaaaacagattcatgtatgagctgcacttacagaatcttgggagtctgtccttgtaaaggagcccccttcctccaggcctttccccccccccccccatttttgtgcccattactcttactctgtttcctcgtcttttccacttcaagaaagagtagctcactaatgcatgtgtgtggagagcttgcacatttcttctgacctttatggaaagagatgcttgtggggtttttgttttgttttgttttaaattgctatattacagactattttctaatattttcgggtagtatatttttagtctttgtgggtagcattaagatactgaatacaataatgactttgccttctaactgggtcccttggtatttattttctagaaaacgcaaaagttgtgactgatggtttcttctgatagaaacttttagaattgtcattttgctttccctgtggaaattagctttgattcagctctttatatttagttttaaaatatatacagttataagtgtattaaagttctaggtcatttgctgtatagggtccaaaatgatgaaactacagctaatatctaccaagagtgtttaaactttttactcttattatagtctccagcagaaatcccagctgtaaactagccaatgtaaagaagagctgagggatcctgtgaatccttatgagagactaggagcctaggaagtagaagctaatattttttggtactgtccttggtggtgagagaaatttttctaatttttggtggcaggggaaaagaaatactgcctagacagttgttcctggaaggttggtgatgataaaaagaaatcttcatggtattggttttgagcttttttttttttttttttttttggtttttcaagacagggattcctttgagctttttgtattctgattcaaaattctttttcaaaattcaaaattctttgaaactctggtaccactgtagaagtaacagaggtaactaacaattctaagctagtttataacttctgagacttctgtatacctcccccaactcccccatttccttagacttttcaagtaagagaagaaaaaatcaactaactttagggatttatttatatatatgaggcagagtcccatgtagcccgggctggcctcagactctgcatgtagcgtctggttgtcctgcctccacctgctgagtgctaagattccaggtctgtgccactttgttgggcttatgttgtgccgaggatggaacccagggatttagggcttcatgcttgctaggcaagcattctactcactcagctacagttcccagcctgagcttttcaatttgtcttacccaaattcttaattaatctttcagttgtccctggaaagcttttcatgttgatgaaaagtgatagaatctgagttagggataggttggttattactgtatatagctttatcgttgtgtgccaagtcacaggcaggtagatgtctgggccttgataattgaagtttgagatttctccctattttaaactcctttccctatgtgcagacagcttttactccagttgtcatgttgtcattgtttggacaactggtaaaggtgtgaaagaatagtaacaaatttaagtggatctagacttgaacatcagcaagaggagccatttctttgtgttgctcttagagtctgcttacccaagctcattgactcctgggataattgttaaactcgactggagccagtattggctcactttctccttttcctttcaaggctggctagagtcatgttgcagggcttggtaccacagtatgaagaagccctctgggctctaaatttactatggatggaaagtttcttgactaacacagtctccaccttgtaattttccccagtgtaatgtgtactgtgtgccttccctttgatgtgcatgtaccttgaggccagagtatgaaagatgctttcaacaaatagaaccaaaataaatatatctttgcactgattatatagtatgtgaataactgacttcaggttaatctctataaagttaacgtaggtctgaggatacttgattttgagagagttgcctttgggagagttgctgtgtgcagtggggtatagaactgcctacaatttttgagattgtgtttgtaggccttttttgacctgatcctgggatctttgtatgtgtgtgtgtgtctctgccttctcctctctcaccacagggttggctggggttaaagatgtttcccccggtacatccagcttttaggtgggttctaagagtcaatctcaggcggtcaggcttgcacaagccagcacttttacctgccaaacctgctttggagagtgtgaatttcaagcacagacccttaaggcttggcttgtaaacattcaaaaccatgatgtctgtcactgtctgccagtcagacagtatatgcttcccttcttagtagctacctgataatatacccatcagcttttccttgctaaggttaaagcataaataaattattttgtgcagtttgttttttgagggtcattttttgtttaatttcatgtgaatttatgaaaatagtttaacggtttgataatgatttttacagttgagtgagtcatgagacattgagtatcttcttaacctctattaaaaaaatttgatttttttttccctttggctcagatttcccaggtagacttggataataatgcttgaaatgattgctgagcaaacggaatgtttatggcaaagtcctcacacttgccatgcatgagaatcacttggggtcctaaaccagaaacacagacttgcagctacactctttaatggctgtgattcagtgagtgggtcttgcataagactaggaatctttgtcactcctttgccaggtgtagggaatgtaagtcacatgctaagccacattctcagaacaacatgatagttacggactcttcaagattgttctcagcgcgttgtgctttatcgttacggttacactgggagcccctagctaggactttgctaacacacagtgacttattaagctcctgaattccaaactaaggggaagacagttcctcaccaagctgtctgtccaattgtccctacttaagtggattttgctgttgtcttgcaacaaaggtgtattatcatttagagacaaatgatgataatcattgtgtcatctcgcagtgtctatggtgtgttacagtttgcagtgcaatatatattcatttgaacttcaggacagccttctggaaggaaaggtttaaagctccttgggggcagggactgtgttaactattatgtttattgaatcccaaatatgttgtggaaccttggttttctttagtgaatactaaagtactattaaatactaagtagataggagtaaaattatccctgagttgtaagaagagtctgtactgagtgacatccagagttaaatccaggtcttaggatgctctcccagttagaaagcttgttttggttattgactgttaacagtcaactaccttattttttatttattctttggaagttttatacctgtatcttgatcatatataccccagctcctcccaacttcccttaggattccccctcccacccctgtgatatctccttcccaacttcatgtcttccttttataactaattaattagataatttttaacccactcagtccaattagtgctgttcatatgggcatggatgtaggccattcactggggcagggggacctcccagtggccatacttttcaagaagagtaacttccttccccagcagcagccatcaattgccaatagctccacagcctaggtgggggtctccggatagtcggctattctggatggtaactggttatttaaaatcaataaagagtagctgaactttgtttgtgacatgtgacttgcatttttttttttatattcatcctttatctcatgttagtatggatcagaggctggagtctaaagcaaactaactctttgctcttctattgcttggttttctctattgccagcaaagggaaggaacatgacagtcattcttgttacttaaaaatacttttcgtctcatgtagtgagggtacaaacaaataatagtaaacttgaaaaccacattaccttcccttagaaatcatttttatgggttgctgtggcttagtaaaggcatggtgcaggcgtttaatcctggcacccgagaggctaagacaggctgatctctgtgagttcaaggccatcctggtgtatatagtgagttcaggcaagccagggctgtatagagggactcagtctaaacccctttaccttctaccccaccccccaaaagaagactgattaattgcataagggctagtctttaatttgtggtaaacaattgtctttcagccactactagtttattagttaattttaatttgttttaggtgagggcttgttaccatgcactgactggtaagtattttagaagccaagtctcaatgtctcaatgggaataattgaaatgctagataagcagagagatttaactgtctttggattctttgtttttgtctttgtttttcgtttttgtttttgttttttgtttttgttttttttttggttttttttgagacagggtttttctatgtgtagcctgggctgtcctggaactcccactatagacaaggctggccttgagctcagagatctaactgcctcagcctcccaagtgctgggattcaaggtgtgtgccaccatgcccaactgagatttaactgagaagcaaagactttatgatcacaacaaagtgctttaagaatacaatccatgctgagtttattcagtgcatggtgacattaccgacaaagactattgtggtagtttagcttaagccagggacgttcattctggaaaaaaaaaaacaatctttaggcagtgttggaagctttttaaaaaaccaggcctcatggtagtggcacaaacctttcattccatcactaaggaggcagaggtagctggattctctgtgaatttcaggccaccctggtcttcataataagttccaggacagccagggatacatagtgaaaccctgtctcaaaaaaccaattaatcaaccaaccagccaacccttttcaaaaaacccttcagtaaagtttgtgtttctagcactcagaaggctgaggtaagtggatcttgagttgtagaccaacctgtgctacatagagaaatcctatctcaaaaacaaaactaccaaaaaataaccccaccctaaaataaaacaagacccaaaaaataaccccaccctaaaataaaacaagacagaaaacccaaattgttacaacttttatattacaactcagtgtacacacagagacctgcattaagtgccaccaaagtaaaccaccaaaactattcactgtttgtctttttttttgtacagtagtcaactttctacctttttaaaaaagcaatgtcttttaaaatttttatttattagtagtgtgtgtatgaatgcacacatacatgcacgcatattgcatgtacatgtgtactgcaagatgtgtgtggaggccagaatatggctttgtggagtccacattttctctcttttcatctttgtgtgagttttggggctagaactcagggctggctttccaggtatggccattttgcagtgagctaccatcttgccagcccactctttgtttgaatgctcattggaccatgtccacactctaaaaaccctgatttgttcatcctttggatgctaggtcttacaggtgctaggcaggtagtctactatccatgagtttatctgcagccccaaacatagtgatttagctatcaccctgcctccccacccactgttaatttgtatggactggtttcatttactcttaggcacaaactgggattaaaggcaggtgccaccaccacctggctaacaagtctggattttgttcttatgtgttaggaatatagttgtgtgtgtgtgtgtgtgtgtgtgtatatatgtatgtgtatatatatatatatatatatatatatgtttgtacccatgcaaattttggttttattttgttgaacacatttccaaggttgaagtggaaaaatcggtgttaaaatgaaagaccatttttctcctttgactgtcttctgctgtatagagaagggagctgagagcaaggttgctctgacacgctgtgttagaagcagctgatgagacgctgcctttcatttgttcccgcactttgcccagagtcctagccagcttctggaatgtctgcttcctgtcaccttatgttgtaaatgactgagctgggcttatcactgtgtttatagcattttgtccttaggtgctccagggccctaactcccgatgtcttgttctagatatactttgtgtctgtgattggaaagtgccaccttggatttaaatccattctgttggtggtgccggaaacatggctcaagggctaagagcagtagcttctttcccacaggactagagccgagtactcagcacccacaagacagctcacaaccacctgtaactccagctccagggatccaatacccactctgaccacatactgcctctcttctcacatgtgtgagtgcagaggacacacacattacatggacataaaaataatcttaaatcttctgttttggtattatagcttgttggaagttgaggtgactaaagtactaaagtgtgtatctgaagtctgccttcagcatgaaaaaggtgaattttcgctgtgtcaggcatgtgaagggtgcttcagttttgtgagattctgttaattagatgtcaggtggtgtgtgtcatcttgtacttagtctctttcggctaagtaaggctctcctcactggaggagatgtgcccattcttgagtatttgagttgctgaatgaggcaccgtgtatgagtgttcttatgtttttccttaagtgaacttctgttttgaaaatgttcttgtttgtgacagtccgggctggcctttagctcactacttagctgaagttggccttgaactaactctttctctctgtctctctgtgtctttctctctctctttctctctctctctctctctctctctctctctctctctctctctctctctctctctctctccctccctccctccctccctccttccctccctccctgcttccctccctctctgttttttgagacagggtttctctgtgtagccctggctgtcctggaacttactctgtagaccaggctggtgttgaactcaaaagaggtgtgcactaacacactgggctggttttgaattcttgattcttctacttgtatctgaatgcattaccacattcggcttggttttattaggttgtccaagctgacaccaaacttgctatatagctaggttgactgtcctcaatgttctcccatttccacctactgagtgttgggattcagacatgtgctatcacgcccagtggagaaacatcttttttttttaaaatgttttgtttttgcttaagctatctgaagcttttgttttattttgtgctggttaaacccagtgtctatgcatacttaaatacctaaaatctattgagctatacccctaacactactcaaaatgtgatatatttgtgtgacagacctcagatcaagaccagaccccccccccccaaaaaaaaaaaaaaaaaaccaaaccaaaccatgtatgctgtggattcaatacccaagtgatctgcttactaagagccatctgtaggagttgtctgcttgcattggtactcttcagctgctttcaggaaggttctttcagaactgtttaatgaaaataataaggaaattggtccttaatacagcagaagtttcttaagtctgtgtgtctgtttgggtttagttatatactgttgtttagaattgagaggcagactgagtatttggagatggggaagatgtgataatttcagaaagtttggaaacgcaccttcacttgttttgctagttacttatcttcaaaatgtgcaaggtctacagaatatactctgagggttatactatatttatattaaaagatgctatttaattataagagcaattaagcccttagggctagagagatggctcactggttaagaacacttgctgctcttgaagaacatgcaggtttagttcctagcacccacattgcagggactcacaatcatccttttttttattttttattttactttattttgttttttcgagacagggtttctctgcatagccctgactgtcctggaactcactttgtagaccaggctggcctctaattcagaaatccgcctgcctctacctcccgagtgctgggattaaaggccatcatgcctggcttacaatcatctttaactcaagctccagggaaattgatccattggcgccttttagacctcttggagacacacacacacacacatacacatacacacacacacacacacacacttttacacacacacacacacacacacacacacacacacacacacacacacaaacagatcttcaggttgggtgagatggcatattcaattaatcttggcactcaggaggcagaggcaggttaatttttatgagtttgaggccagcctggtctacagagcaggttataggacatccaggtctacagagagagactctgtctcagaacaaacaaacaaaagagcagtaagccttcataactgctgagccgcattgttgacagcccctggaattttgtattctagcaggagtgagatgaaaaaaatggttttattgttgataacaaaggtcatgctggcttcataggcaatttccaaactttttttctagcttgattatgtattttttaaaaagatttatttatctattttatgtacatgagtacactgtatctgtacagatggttgtgagccttcatgtggttgttgggaattgaagtttaggacctctgctcactcctgtccgtcccccccccccccccccagcctgagagcttctggtgctgacccacacacagctttaccagggccagttttcactgttatgaaaactctttttttagtgtcaattttctgaatagaaatacttggtttggtttggttttgtatttagagatagggcctctctgtatagttctagtcttggaacatactatacagaccaagctggccttgaactcacagaaatctgcctgcctctgccctctggggtgctaaaattaaaggcatgtgccaccatgcctggctggaaatgccttataagtattggtaaaggctggagagatggttcagtagttaagagcactggctgctcttgcagaggaccctgcacctacatggtggcttaaaattgtttaatgccagttccagggcattgaacagcctcttctggcctctgtgacaccaagtatgcaactggtgcacatacatgtgggcaaagtacccatacctttaaattaaatgaaaaataaaagtgctgataagggctagagagatctattagtggttaagagcatttgcgttacaatcagagaaccagggtttagatcttaagttagtgttctataaaagctgtaactccagcctctaggaatgacacacacacacacaaacacacacacacacacccctgtacacaaacaaaaatttggtaaatccagttgttgtcatatacccaactcttaaggagacaaagggttgtcttagtttcagaaattgtgtacataaagattcattctgtgttggatagtttataggttttgtttgacagatagcattgtgcacccattataagctgccatgtgagtgctaggaactaaacctgtgttctttgcagggtcagtcagtgctccaaccccagtagcatatttcctttgatagctgaattaatacttgattatatggatgtattcattcactgattgaaggaatagtttgggacgcttatgaataaggatgttttaagcatctgtgtacaggttttattgtggctgtgaatttttctgttcatctgggtcaacacataggagcatgattgatggattggatagtaaaactatataaaaaatggtcaacttgcctttcaaagtcactgtactagtgctatgaaaagacaccatgaccaaggcaactcataaaaagaaatactggggcttgcttatagttccagagggttagttcattatcatcatggcagggaacatggtggcaggcagataaacatgatgctggagaggtagatgagatcctcaggcaacctcgagggatggagagggcaatgggaacagtcaaatactggtcctggcaccccactcctagtggtacacctattccaagaaagacaaatctctgtcctcacctagcagttcatctgccaggaattaagtatgcaaatatgtgaacctctggggggctgttctcattcaaaccaccacacaaaaagtgactaccattttacattcttgcaacaaggacaattgtatttatctcacatctttactggtatttggtgtctgacatgtaagtttggattttagccatgtttaatggccatgctattgttttgattttgaattcctccatgatgaatgttgaatttcatttcatgtatttacttgccatctgcatatcttcagtgagatatctgttcagatactttgcccatttttaatttgggttgtggggccagggagaaggctcagctgataaaggcacttaccaccaagcccaagaacctttgtttgattcctggggcttatatagtggaaggcgagtactgattcccaaaagtaattccttgacttcatatgcacagtgttgtccctccccccgccccaagtaaattgggttgttgtgttttaagagtttgccatgtatttagatacagatacttttttggatacacgtttttgtaaatgttttcattctctgtctttcatagagactttttaagttttaggtaaagtttagcttgctagttttttccatttgtggaccgtgtctttaaggtcatatctaaaatctcattttcaaacaccaaatcacatagagcttttgtactctgttctttttagaagttttatattttttggagacagggcctcagtatgttatcagaggctgatcttgaacttgctatgtaccccaggctagccttgagttttgtcctgccacctcagcttcctgaatgtaggattctcccagagttccctccttacaactaaattttctttcctttttctgttttttttttgacaagtgtttctctatgtgtagtctttgctgttctggaactcactctgtagaccaggcaggactcgaactcagatccatctgtctctgcctgccgagtgctgagataaaggcgtgtagcacatctgctcagccctaaattttcaactttataatatttgcttaaagaattaactgggctggagagatggctcagtggttaagagcactgactgcttctctgaaggtcctgagttcaaatcccagcaaccacacggtggctcacaaccatctgtaatgagatctgatgccctcttctggtgtgtctgaagacagctacagtgtactcacataaaataaaataaaaaaaaataaatcttttttaaaaattaattaactaacttactttgagcagtactagaagtccaaatctaggacattgataggcaagcactctaccatcgatgcatagccttgatctatataaagtacacattttcaaaagtgtgtgcatgcatgttgaagtgtgcatgtataggtgtgcatgcatgtgtgtgtgcatgtaaaggcaagaggacaactgagtgtcagctttggaaatgctgtctacaagctgggaaaggtagctaaatgggtaaagcaagaggactagagttcagatccctaaaatccacataaatgccacatggtatacctgtaagcacagccttggaaagtggtggcagagggtgcctgagcaagctagctagtcagattagtatattgatgagctagctctgggttagactgaaaaactgctttaaaaagaaaaggtggttgtcattaaggaagattcctgacatcaacctggggcctccacgtacatcatgtgcatacacacttcagcacacacacacacacacacacacacacacacacacacacacacgtgatgtccattccctttgagacatgttttctcattgccccctgaagcttactaattgacctggactggctaaccagcaaaccccacagcccttcctgtttctatctccagatcctgtttctaggattatagttctgcactgacatgtttggagatatctacctgcctgcctgcctgcctgcctgcctgcctgcctgtctgtctgtctgtctatctatctatctatctatctatctccaaacataagaaacacacacacagtctcattctgcagtgcttgctcatctggaacttactgtgtagaccaagatagacttgaacccacagaaattcacctgcttctgtctcctgagtgctaaatttaaaagcatgtgtaatacctggcatgtcaagtaggcctgcctgcttccctgtcttccttccttaatgtgggttttgggaatctaactcagatcttcatgcttgtaagacaagtactttactgaccaagataattcccgggcattagttcattaacaataaataaataaataaataaacaaacaaaaaataacaacactgtttccatccttcaccactggatttatagacacttgcaaccttgcagctgctcttggctttttacatgaatgctgggatttgaacacaggcatttatgcttatatagcaagtgctttttacccaccaagccttcttgtgtccttgtcacttgttaaaatttaggcacttgtggcacattgccattgtgttttaatgtataaagttggaaagcatcttactgcttacaattgcatgagtctattggctgtgtttaaaggactgcttctgaggattaattgccatttagtcactcgtgtatgtcaccaggggtcacatagtattgtgcttgtggggtagaaatggctcctttccctggtttatacagaagtttgctttgttatgtttttgtccaaaccttgttccattatgtctagcttccttcagaagcagagtataaatcctgaccagagcttctcttctgcttctggaagtgtttatattagcttcgtaatttcctcagctggctaactttagttgtactatttgaagccacttccattagctagctaaaaatgtctccattggagctaaacattgatttcaaagtaaaaatgaggctttctttaaaattatcaagtgcatctttacaatgctgaaaacatccaggtaatttgaatatcacttagattcccaaataaaactcaggtcttatttatgggttttattataaaacattttcttatggaaaatttcaaacacagagaagttgaaaggattgtaaaatgagtacctgtaggcttagcatctttaaaaaatgtacttatttattcacaattatattaaagtatgtgtatgaatgcagttgtgcatgtagatgatgtttatgtataggtacacccatgcacgcaggtgttgaaggagctagggttataggcagttgtgagctgatgggtgtgggtgctggcgactgaactcaggtcctcttgaaagagcagtgaatactcttacctgcagagctgttacttctctccagcctcgggacttaccctcctgattctgtcattaacattcagttttatttctttggtcacatatttgttgaattctttttgatagttccttgaagatactgacttctttgtggaaaaggataggttggtatttcttagttcactgcacatcttttgtgttgttggttggacttgtgtgggttctctgatgcttgcttattttgtgatcatttattttcagatgaatttctgatagattatgttatgaagacggaaggaaaacaaaattgttggaagaggttttattgtcatggagaacaagttgaaccagctcacttactgtgtggatatcactgtcctaatagctttatcagtggctctgtctttagttctcatagccttcattagctgtatgtggtggcttttcatacagattggggaattgaggtctagcaagactgaatgagttacctaatactaaataaggtcttatctaagacggcatcattggtattcagaccccatgcagtctgactccctagagcccatgctttgagacaaatgtctgcactgctgaaacttccctttttgatggaagttacattttgtatttatttatatttcaggtttgtataagtttgggaccatacttgaacctggtttaatagtgttcttgtgtaaaacagtgtattataccaacattttaatgactagtacattaaaagtagttatttatgagtgagagagagcgtgtatgtgtgtgtgtgtgtgtgtgtgtgtgtgtgtgtgtgtgaatgaattcgggtatatgcatgtgattaccagtgctcttggaggcctgaggtgtgtcgtagcttgttacagttgtgagccacatagagtaggtgttgggaattgaacttgagtcttctccaaaaggagtatacacatactgagctgtctctctatcctatgactaacacttttatgactgagaagccctggaaattcctgaggagggagggccctgtttcaaattagatggcctggagttttttagtgacttcattctttagagaatgaaagaatttctttctttgtattaagtgaaggcacatagagcattccttctgcagttatccagatgaacattagcaaatgtgtttaggatatgacacagaacactagaagttctttcctgtttttttttttttttttctctgtgtgtgtgtactctttttgtaatgcttggggttgaatctagggctcatgcaagctgagtaagtattctgccactgagccgaatccccacccctcatctctcatctgtattttttaatgaagtttttgggatgttagccagttggaagtacattcttgacgatcaggacagggaactgaagctgctcctgttgctgtctggctgtttataaccctctcttaaatttctctggagtctttctgggatttatttatttttgacacagtctcactctcttgctctggctggcctggactcactatataaagcaggctagccttgaacgcacagaagcctctgcttccagatttgctgggatcaaaagtacatggcactgtagccagcttcagggaggacttttatgagtgactcaaggagcagttcatttctgtttacagcttgaagttgtgttttgaaatcaggagtttttaatctttttggagattacatattcttttttgaaaccaatgaaagacatgcactctccagaaatgctctccccagaaaacatatacatgcacataaatacacttttacctacaaattttgtagggtcactaatttccaagactataaacaaagtactccaagatggggtgacatatgctgtgatgtccatactagggagctgtggcagcagaagtgaagtcagggtgtggctgcaaagtcagatcctgtctgggaacgctggggaaagtgttcattcctcccggaggggggtggggggagggcagagccatggggggtagtttttcctgtaataaatatatgtttgctctgctaaaaaaaacaaacaatgctttaaaggaaaaaaagggctctgtagagagactgtctttttttttttttaagagttatttattttatatatgtgggtatactgtcactatctccagacacaccagaagagggcatcggagtccatcacagatggttgtgtgccaccatgtggttgctggaattgaattgaacacaggatctttggtagagcagttagtgctcttaaccgctgagccatccctccagcctgagagactgtctcaaaaacaaaaacaaaaggaaaaacaaaaggaaaatagtaagatttgaggatatattcacaaaacaatcttgttagtgtttaggatattgtatttttgagtctttgagatgttttatgtctcctattttattgaaaaattaaaatgaatatttgttaataagctaaggtccttagggatcaatacatcctgtgatgatttctaaccttgtcagttgagttttctcagaagtattaagatgatgaactcctttgccagctcataagtttaggtttcagtttcttgtccccccagtgtcttgatgcatgatgtcatgcccgctctgagctctaaactgaaccccaggtgccccactatgagctctactctacaccccttctcagtctcatctccttcttactcctctcctttcttgcttggctttttaaagtgagtatcgtagctcatgttggcctggaagcagagatcctcatgtctctgcctccaggattatgtttgaaaagttggaatttcatagtctggtttcttttcagattgtataaattggaatttctatcacaaagacacccttaatttttatgtatagaactgatggttttggttaaatcactacttttaagaatttacttataattagaattttaggttgagaaatgtcaggagttttgaggatcagagaatttttctttttctgagtttttggagacagcgccttgccatgtagcacatgctagtaatcctcctgcgtgctcagcttacagactgagtgcggtacccagccgggtttactgcctacattgctaaaggagaaatgggggggtgaggggaggctggctgaggtctctcctttctgctctgtttatacagatgggtgttttagatacaaggctagtccacggctgaaaactcagcattctcttcaggaagggaagaccctaaaggtttggaacagaactgaaaaaatagtctaactcttaacaggaggataaactttaaatagtaaagtgagtagaggccaggtgtattttaactgtgtctctggtgagtgccagggaaccttgaggccagctgctcagtggttttactgaggcagctcactaggtcagcgttctgggaaggctgtcagtttgttgagtatttgtgggactaggcacctttcttaacaaagttattgttcttctgtatcttacacttctccttgtttcagggtctgtacaagtgaagtgaataggttgatttgtgtataactgtaggtgcgtatttcttggtttggacagattatacagagtttaaagtgaaatgtatggaggagaaaatgtttagcttattcatatatccaaatcatcctatgagattatccaggctgattgggagaacaaaagaagttaggtcaaataatagaatttaaaaaataattttaaaatgtttattttatgtacattggtgttctgactgcatgtgtgtctgtatgagggtgtcagagcccctggaactggagtcacagacaattgtgagctgccatgtgggtgctaggaactgactccaggtcctttggaagagcagccagtgctcctaattgctgagcaatctctctagcccctgaaaataatgcagtttagagaggtaatcttgtccatttagaagccaagagatagaggaaactggtctatatgcaggttaatactttttaactatcaagataataaattcgtataaaggaaggttaatttgaagatatggggaaaatgtatatataatttaagtaactatcttgggggcacacctacaatctctacaaaggggagttttttaaaagaaaatctctggggttggagatatgactcagtggttgagaatgtataatgctgttgcagaggacccaagtttggttttccagtacccatcttggatggctcacagtggcctgtaactctagctccaggcctccggcctctgtgtttatgtgcacatacccatatatacacataattaaaaatagtagaaataagtcttaggaaggaaatccccttgaagtgtaggtgaacagactgtagtaaaagtgggagaagtattcaaggcactttgatagtattgtacatatggctggttaaaacaagggaagcagactgttgggatggctaaaatgagctttatttctccccagcatccccatctttcccacatgctttcctgaatcgagcagtgtgtagcattctggactagaggaagggtaggtctctcctgtttgcatttcctctccctgccataagttcacaaacagccttttcactttagactctgaaagataaacagcttttctggaaccagatgaatcttttgattctatggctcatactatgacactggagtggggacaggagggtggagttacaaagtgtttgaacccgtctggtttatgggactgtttttttccctttttccccttaggaacggcgtgaatgttgagggggcgacacacaagcaggtggtggacctgatccgagcaggcgagaaggaattgatcttgacagtgttgtctgtacctcctcatgaggctgataacctagatcccagtgacgactccttgggacaatcattttatgattacacagaaaagcaagcagtgcccatatcggtccccacatacaaacatgtggagcagaatggtgagaagtttgtggtgagtgtcagcccaacttgatcctcaaacatgtagttagcttgtatttccctcagtctcattgtgagtatatttcaggagatcaaataagactgcagccttggccagtttgtcaggaagttaggctcactcagagaagatcttgacactaattgatttattgcagggggtggcctacagtaataagtttctgcataagaacaattttgtttaattttctgacagtttcaagtttgtatttgtgaatattatttttaaccatatgtctctgctagctgtagtctgatttactgttggctctggagctatagagcgagataattttaaaagataccttccaaaatatttgggtaatacagaggtttgtcattttgaagcttgtgcattcctgtactcattcctctccacaccttgttctttcagttcttggtgatgtctgtgtgcatgattaactcctgagttttcccctcgaggccctagtatactttgactgcaattccctgagctgttttgcacatttctattttgtggataagtagaactcatcttgaattttaggtgatatgtgacagcctgtttcccatggtgcttgtcttcaaaccttagctgctgctgtttatttgttctcttggttgcactgtgtacttatttacctttaattgtttcagaaacattgacataaaaagcataaattatttaattctttttagaaatgtagtgggttctgttagatattggcaaatagactacaggtgtctagagctggcctgtagggctggggatctagctcagtgggtagtgtttaactaacatacataaggttctacgtttaacactctataaaataaaaaactgatatgctgattaaagttactgcctctaaaagtagaatttgtcccatgtataggaatgtgctgctaagtgcttgtggaattcttcctaggggcagggggatgctgaacaaaacaagttagctggggataattgcacataggttttgtggcagcatggtctctgtgttcttagagctgtacacaaactttagaaatgagagctgattagttatggaactttttgagaattaacctaggactttggaaacttctgtaagccttgagacaaggaatgaaactactaattattcttttgtaaagggtcagttttattagcaaagtttttgtatgttaactttcatctgcctagatgtccagttttatgatgtttatagtcttttatgtactaccacataaggacagaatactttcagcagccccaagttcccctgttatgttttatagttattttcctttgttaactaaccactgatctgctttctgtctctatatttctctctctctctctctctctcttggaatgccaaacaaacaatgtgtacttgtattagttactgcagcaaaacaccacacagcagtaagctgaggaagggaaggtttgtttgggctcatggttcaagtactcagtgttagggaaggcatgggggctggagtgtttccagttgctgtggttggaagccataggcagtcagtcacatcacgcccacacccaggaagcaggaagagatgaatgcttaacttgctttctccttttaacttttattcagcctgtgaatggcgttgcccgcattcagggtagtcctgccctcctccgtgaactcctttggaaatgaaaggttaccttctgtatcaagtcaagttaacagtaaagattaactacttcagtactgtgtatgtgtgagtgcacacacgtgcttgtgcatgcagagacttgaggtcatcattgagtgtctttccttagttacttttcaactttattattattagctctttacatttttttatttgtgtgttggggttggggtgtggatatttgcgttcatgggtgtgtataggtcagcaaacaacatgtgtgggagttggttctctcctaccatgtaggttccagggattgaactcaggtcatcaggctttgtggcaagccaccttaccaactgagccatcttactgaccctcttctatgttacaagaaactgcagagcttacaagatgtctcattggttaagagtgcttgctgcacaactatgaggacctgagtttagatacccatggaacaagccagatgagtggagacaggatcatcactggaacttgctgactgccagactgtctgagaagtaagagcccttgcctccaagtaacaaggcagaagtgatggaggaagacagtcaatgtcctctgttgtttgtacaccacattacacaggtatgcacgaacacactcatgtattcactgcacacatacaaatccctgccagactaggactggatgtgtaactcagagggagatactatgcttagcgtccatgaagctctggtcaggccctagcaacaaaatcaggtgtacaagagaacattcctgtaatcctagcactcgagctagagacaggggatcagcagttcaagggccttctcagctacacagttacgtttgaggccagtctggtctataggaaaccctgtttgaaaaattcaacagaaaagaaaagaaactgacaagctgctttttaaaagtgcctttgtcatgttttctcatttgcagtagagaattctagttttctataacttcaatatttggtattttaattacacccccatcacccccatagggacttgccatatatccctgggtggcatttaactcatggttttcctgcctcagaccagagatgtcagatcttagagcaattggttatgagcttctggttggaaccaaacttgggttctcttaaccacagagccatccttactacagagtattctggtttttattttgttaagtatttttcttatgtatgtgtgtgtgtctgtgttagtgtatgccaactgtttgtaggtacttgcagaggtgagaagaaggtgttggatccctggggctggagtaatgggagggcatggtcgttggcaagagcagagagtgcgcttgaccactaagccattcctccagccccctggtgggcattcttgtgggtatagtgatatcccacttcagttttaatttatacttatctaataactcattggtaatgaattgatttccgtagattaatagccattcatctgttatcattggtgtggaggttctgttaattttctgttcatgtaacattttggttgtttattattctgttataagaatttattatgtgtactgagtgtaaatcctctcttagatgttttgtattttcctggtctgtggcttggcttttaattttttaaactgttttaaagagtggaagttagaaactttggtgaagttcactttatcaaattttaatgttttagaaaagctgcctgtcttagtcagggtttctattcctgcacaaacctcaggaccaagaagcaagttggggaggaaagggtttatttggcttacacttccatactgctgttcatcaccaaaggaagtcaagactggaactcaagcagatcaggaagcaggagctgatgcagaggccatggagggatgttctttactggcttgcttcccctggcttgctcagcctgctctcttatagaacccaagactaccagctcagagatggtcccactcacaaggggcctttccccttgatcactaattgagaaaatgcctgacagttgtatctcatggaggcatttcctcaactgaagctcctttctctatgataactccagctgtgtcaagttgacacaaaactagccagtacactgcctaagcccagaatgtcaacccttccacccccagctctcttcagggacttaccatatagcctagtctggccttggcctcatgatgctcctgccttagacttctgaaagctgaggctgcagttatgttctaccgtaccttactttatttttctgtttttttttttataaatgttttatagttactttaacaatttttgtaatgttattgataaatctatggattcacacaataatgtataaatcattactataatcatataagttatatagtttactgttatttagagtatttgcagattgtaccacagcagtcgattctagtgtcttcattactttgatacagtatatagcctataacatcatctcctaaacctttcatcttcttccagctctaggttatactagtgtgctttctgtcctataagtttatatatattgaatatgtcatataaatatgtcatataggatttttgagtgtgacttctttcatttagcatctcttcaaggcttacctgtgttatattatgaatctgtattttattttaacttccattagttttccattgcatagtgaatttattagtcaaggttttctgaatgaatagaactgataaaattttttaaaaagatttatttatttatttatttattatatataagtacactgtagctgtcttcagacacaccagaagagggcatcagatctcattacagatggttttgagctaccatgtggttgctgggaattgaacccaggacctctgaaagcagtcagtgctctttagttgaatcatctctccagcccagaatgtgtgtgtgtgtgtgtgtgtgtgtgtgtgtgtgtgtgtttgttagtgttggggttttattgctgtgaatagttaccatgaccaaggcaactcttaacaaaggagaacatttaactgaggctggcttacagtttcagaggtttagtctattatcttcatggtgggacacatggtagagtctaggtagacatggtgttggagatggagctaggagttctacatcttgattcgaaggtaacaggagattgtgtacaacgctgggcatggcttgagcacatttaaaatctcagagtctaccttcacttcctttagcaaggccacaactactccaataaggtcacacctcctaatagtgccacttcttatgggccaggtattcaaacacatgagtatggttgccatacctgttcagaacacacacacacaaacacacacacactcgaggctattatctctttagtcccacccagtttggtgcaggaaccctggaggactttattagaatcctgaagtaattggcagcaagaagttaggtgaacttaccaacaagagtgctagcaggcaaaaggcaaagcttttgtctgtgtccttttatgtaggctactgaaggtgtggtacagatttagggtggtttaaaaatctgattgacagctgggcagtgatggtgcatagcctggactactgagtgagtttcaggacagccagggctatgcagagaaaccctgtctctaaaaatagggtgggggtgggggtggcggtaagactaagtctgagtctagtcaaaaataagcctttcagagtaacaaatgaatggtcagatcttgactctcaaagatcaaacaacaacaaaacccattgttataatttattctagtcattactgtatatgtacttaaaaatatgtagctgggtatagtggctcacgtctgtgcttggattagaggcataggtaattccatctggctgaaatatatatttttaaaatattaattggcacagacactttatatatttgtagagtacaatatgacacaatacctgtgtataatgtgtaatgatcagtatagagtggttgaatatatttgcctacttcctgatcttagaggaacaatttcaccttttccccattgtgtctgatataggctgtgggttgtggttagtcctcactgtgatgagatacaatctcagtatactttgctgaaggcagtttggttttttttttttttttttttttttcctggaggaatgctgaacgtcagcaaatcctttttctgaatgtattgagacgatggtgatttttatccttcattatttgatgtgatatatttattgatttgcatatgttataccaatttttcatcaaatttagctttttaatattttgttgaagttttacatgcttgttcattaaaggtattgcttttaggtttttttgttttttttgttttgtttttttgagacagggtttctctgtgtagccctggctgtcctggcactcactttgtagaccaggctggcctcgaactcagaaatccgcctgcctctgcctcccgagtgctgggattaaaggcgtgcgccaccacgcccggctgcttttagtttttgtgatttggttgtactggctctggtgtgtgtgtgtgtgggggggggggggtcatatgcatacctagaaagttatggaagtcagagaacaacttgtagaagttagttctcttctaccaagtgagtcacatgcattgactgaggtcgttaaccttgtcagcacccattgaggcatcttcttgccttagaattttctttaattgtatgtatttgtacagtttctaaagttttttttttttttaaagatttatttattttatatatgtgagtacactgtttctgtcttcagactcaccagaagagggcactggatcccattacagatggttgtgagtcaccatgtggttgctgggaattgaactcaggacctcttgaagagcaatcagtgctcttaaccgctgagcccctaaagttcttgttcatgtgatttaaaaaatattttgacaggttcatgcttataaacaatacaatgtatcttgatcataatgtactccaaatctactttcccacttcccaaaagcactctaacattccttcacctttatgtcatctttttatttattgtttttttttgttgttgttgttggttggttggttacctactgagttggtgcttcttgttggaatgtcattgaccttgtgcaggcagctataactgttgaaagttgatgaatgtagtagccatgtcgtgcccagaaggcagcacttcacagctcccgtctccattctttggctcttacactcttcatcctcttgacacagtttcttgagtcttgagttgaagagaaattgatacaagtgttttatttaggacttagtactggatagttgcttatcctcagctcttgaccagttaccagtctgcattaactgctgctcatttccatagccgcttctctggccaggattaaaggacgcattgatctgtgtacaaaagcagaattaattagaaaaccatttgacaatgtgtccgtttagcaagaccacaatcataggttccccctcgacggtttatagtcttctatagccgtgggctgttggccagattgatgaaccaggtgtggagtgtggagcaagcctcaacccacttcaaaagtgatcgctagttacacttctgtatgctgaagtgccgagtaggcacatcttgcctggtatgtcaggattgtagcatgcagggttccttgttggttagtaccactgatgagttttcttccccagcagcctgcagagcacctctggcactttgaaagctagccaatagggaggatgttttcaatcagtttcagcttgatttctccgcgttccacaaccgaagcgtgtgtgtctgcagcaatagagtttgatcatctagttttgatgggtaagcaagagcaatgcaacagcctgtgttttgaggacctttgaggcttccctgaccaataacttacagagagacgtttcatgcctcacactgagatgtaataactcgtgtctttttaaatagctgggcagtggcgttgtgagcctttaatcccagcacttgggaggcagaggtaggtggatcttggagctcaggggcagcctggtctacagcctgagttccgggacagccaaggctacacagagaaatcctgtctcaacaaaaaacaacaaaaaagcccaaagccaaaaaactaaaacaaaataagcctctcccgctactccccaatcatacttacaaagtactggtttttttgcactggtttctgatttcttgtgagtgtgtatttgtgtgtatctgtgtgtgtgtgtgtgtgtgtgtgtgtgtgtgtgtgtgagagagacagacagacagacagacagagacagagagacagagacagagagagattagaaaagacacaggttatgattataacctttgactttgttaaaacttgatttatacccacacattcagtcagttccacaggattctatttgatgatgaaacaaatgtgtattctgtaactcttaaagttgtataaatgttttttgggtgcttttagtccttacaataggttagtcttgacttttttgttgttgatattttggaggggtttgggtgatgaaggtgttgtgtcaagtttctaactatttattgtattagagtctttcccattagttataataaagtttgctttataactttgggatatacatatatttgcaatccttatttctttttgttgaatttgtccctttgtcattatatattgataacttttattttattatatatatttttgtttttttttgttttttgttttacttaaaatctgttttaactactattgcttgcttttagtttttgtttgcttgattcacattttttccatttattacttttggtctttgcctttacttagtgacgtgagcgtcctacaactggcttagtattagtcctgtttttatctagtcagtatcttttaggggggatttaatctggtcactttcaagattattgataagtaaaaacatgttgttgtcatatgatattttttctggtaattttgtatattttttgaaacatttatttattttatgtgtgtgagtgcactgccattctccttggacacaccaaaggaaggcatcagatcccattacagatggttgtgagccaccatgaggttgctgggatttaaactcaggacctctggaagagcagtcagtgctcttaaccactgagccgtcggaataaccttttttgttcatttttgtggtttgattctttttgtgtattaataaggcttaattattttctcttcttttgtatatgtgttctactagtgagcttcaagttctcacgatgatcattaccgtttgattttttttcctagtagaggaaatggtggtgatgaattgcttcagttttttacttctcttgaaaaaacttcttttttttttcttcttctttttcttttttctttttgatggaaagctttattgggtatattaggttgatagtttttttctttcaggactttaaatgtactgtccctttctcctctggcttataaagtttctactgagaatctgatcttagtataatgattttctcatatataatttgacttttattttaaagatgtatatggggttggggattgtttggttcttttcatcgttgtcttatagtgtcagaggtggtccagtccgtgggggcagggaaggcatggtggcaagagcaggaggccaacatttcgtgaacagtttggaagaggagttgtgcgtgcacgcgtgcgtgtgcatgtgtatgtgtgtgtgtgtgttttgaaacagggtttctctgtgtaaccctggctgtcctagaactctatctatataccaggctggcctcaaactcagaggatcctcctgcctctgcctcctatgtgctgggattaaaggtgtgagccaccactgcctggctgtttttccttttttgaggcagtgtttcatgtagcttgggctggtctcattgtgtggctgacaatgatgccgagtccctgtcctcctactccatctccagagtattggggttcatcggcaagcttcaatactcctggctcatttctcggattcccttttgttgtcttcttttgacatttgaccatagatgcctctgagaagatcttacattgcttaaatctaataacctgaattctccaagatttgaaaaattttcattagctcttcattgaatagcctttcctccttcctttttttttccttccttccttcctttctttttttttaaattttatgtgcatgagtgtttagcctatatagatgtatgtatactacgtggtacctggtacccaaagagtctagaagagggtgccagatgccctgcagtccattctctccccacaccacaggttcatgtggccagtgctttttacccacagaactgtcttgtcatctctgtatcaatttcacaggatggttttcattaagaaaatgaacattttttttcttgcaatgtatcccacactgttacttggatagggttcattggcattgattaggggcgagtgctttaaatgtagtgtctgtgtagcttcttccagtaatcaactttggtgatgtctgaatgttttagtggtgcataagttgtatgattatagtaccagccagaatgcagctcttttgggcaggttgtttaggcatagagtgtgcctatcattttctctgggttgcatggaggtggctttaccacggagggcctgtaggatacaggtgcggtggagctggtgcagcaacagaggtgtgttagcacatttttaaaggacagtgtcaatgtagggctatgttggtaagtttagataagtatgcacatccatagcatggcatgtagtagagcagaaaatacatcagcgtctagttctacatgggtaccaagtggtaccagtgggcccagatggggcacctgtctgttcaagggctgcatagataactttgcagggcttttatggccagcttgcatatctgcttcctgatgtagaggaaaaatgggtatctagagcttatggcaaggtgaataaagccctggagaggttcataggtctggatccatcaggctgcctagggcaggtatttatactttataaggccagggtgtagaagtctcaggctgagaggaggaactgggtagggatggataagtacagtgtagttacagtccaatgagtacagtgtagttacagtccaatggacagtgataatagggattgggctgctccccaaaccgggcccagggcctgtgctggctgcagtctgtttaatagcaaatgtttcaggtatccatgggcctcctggttatctttttcttgtcatatagagaccctcttggctcacggttgatcgtgagagagaaaaggatgaggactgtagttccttccgtttattcattttagttctgttgtgggaaatattaaaaaagccaacccattcctgtgctcgttccggcaactctgccccagcagcctggccggccacaccctgatggcaatgggcaacctgttatatcttgaggagactctctggcctggagatcccgaaatgtatgtacccagctccctaagttcccagtggctaccacaccagtcccatgcttcaaaacccccacagcctttgtggtatacatctggcaaaaccacactttgccactatacctttctctcttgaacccagcagagctgccaagtgaaggaaaacacaacacaaacttagttcagaaacgatagaaactcagtctctggatgcagcaactaaaaatcttaattttgaatgccttgttaaagctaaatcctccggtggcaaatccactattgaaactgggagatactcttaattacatcttatcctcatagtatccctgtctaaaaggacctaactctctcctcttcctccctccctccctccctccctccctcctaccctaaagtcccacctgctcatccagtgactggctcctttattcgttaggagattggttcacaagaacagcaccaggcccgtccacaacatagttcccgttattcattttatttattcattttttattattttttggagatatggtctcactttagccacaactggcctggatgttggtatgtagaccaggctgagtgttgggattaaatgcatgtgccactcataccctataccttaaaatgtaaacatataatttttatttgtatgtatatgagtacccacagaggccagaagagggcattgaatcctctaaacctgtagttacaggcagttgtgagctgccgccatgaatcctgggacccaaactgtggtcctacaagagcagcaagtgctcttaatcatctctccattccccagctgccttctttctaagaccactgtgtacctctgggctgcccattgtctctgtcacataccacttcactcaagtcggcttgtccagctgcttcctggggcaggagggagtagctgtgcttccaactctccaccgaaatacgtgtttttttctttgatttggtactttgttgtggagagagatattttgggtcccacttattagccatcttgctcacagcaccaaggttcttttatctttttttttaaaagcagctagccattttgttttagcaacttatttggaaaagaatatgttttccctcactgaagtatcttagcattattgttgaaaaacagctgataaataagtgattctttttctgaacttgtttctgtctgtttactgtttatatctggacatttcaattcttacatcattttggggttgtcttcaactgagtggctttcccttgagaatggcccatatcacaactctttatattaatttttgcttgtatcctggatattgtgactgttacactgtgtagactctggattctctaatcttcttctgaagagtactggtgattttactttatttgtatcgtcttcaatctcagtttacttctcacagcattggttgtgtatgtgtgtgtgtgtgtatgcctttatgcatgtatgtgtgtttacatgatgcatgtatatgtgtgtttcatgtgtatcatgtttatatatttcatgtctgggtgggtgtatggatacatgtgtggtatgtatgtacatttgcatgtctgtgggctggtgggtatgtttgcatgtgtagaggtcggaggttgacattgatgtcttcctggttcgtgctctgtcttatatattgagactactagaacccagaactcttctccaatttagcttgtctagctagctgactcaccttagggatcttctccttccctctttgagggactagtattacacgttgggatccagactctggtcttcatgtttgcacagcaagcactttatccaccaagccccttctgctgtgctttgagatggtttcacgtagcccaaactaacctcaagcttatttcaaagcaagaacaactcctgatcctcttgtctctgtttctcaagtgctgggattacaagtgtgtatcaccatgtctggtggaataaatattggttaggttaattaaccatatacatgtcataaaaatatcttcctcaaccttgtatctgacagggtttgacttacctgctttgcccattgagtcatccccagcctcagctgtactttttgtgtctgcacacagcattcaaaaagagattagttcagatttcatgtatttttttttgttgttaaagatttatttatttattatatgtaagtacactgtagctgtcttcagacactccagaagagggagtcagatctcattacggatggttgtgagccacgtgtggttgctgggatttgaactcaggaccttcagaagagcagtcagtgctcttaatcgctgagccatctctccagcccatgtatgtttattcaaagaatagatcctcaactccagctcttcctctaggcatctttattacctattcctatggcagccacagttgcttatgattcttttcctgtttaagctgaggagatgttagattttcttttggaggtttttgttgttaagagattgggatggggggggggtgtctcaatatgtagtcctttgctagccccaaactcttggctcaagtgatcctcctgcctcagcctctcaaacaattgagacagcaggttcatgccatctgtctcgcttctctcagagttgtaattgctcaagttgtgtgtttcgattacttacatccattgcagtgaaaagtcccctaaaaatagttaaccccgtgttttagggtttctgttgctgggataaaacaccatgaccaaaagtaagttgatgaggtcagggtttatttcagtttacaacctttaggtcacaatctatcactgaaggaagaagttggggcaggaactcagatatagggacatggaggagtgctcctgatggcttgcccagcctaatttctgtgtcaactcagagacttctgctcagggttgacaccatccacggtgagctaggttttcccacatcaatcattaattggggaaatgcccacagacttgcctaaggccagttttacagaggcatttctcaagagtgcctcttcccagacatgtctaggtttatgtcgattttaataaactagtcaggatagttgaccccatgttaatttaatacacaaacatatcatttcccaagactatatcctttccttcctccctctcctcttcatcctcttcttcctcccccttttgttgtttatttgaggcaaggtttcactgtgtagccataactgtcctggaacttgatctgtagaccaggctgaccttgaactcacagagatctgcctgcctctgcatcctgagtgctgggattaaaggcgtgcgccaccactgcccactgccgggcttcaccattcttttgattcatcctgaagatctcatattaatatcagcattacaatctgaaacattgcaacttttaatagctccataatctttaatatttcagtttctttaaagcatccagtttctctgaaatatcatagtctctaaaatattcaaaatcttcctcaaatttctaactctccctttctgtaaagtcaaaaataagttacatacttttgtgcttaacgatggaggaactggggtaggggatttagctcaatggtaaagcacttgtctagcagccacaaggccctgggtttagtcctcagctctgagaaaaaaaaaaaaaaaaaagaaaagaaaaagaaaaaagatggatgaagcagggcacagttagaatcaaatcattaaactcaacactcatggcttttctatcccaaagttccaaagtccttccataatctcccccaaaacatggtcagatctgtcacagtaataccccatgacctagtaccaattctgacttacttaacatttctattgctgtggtaaacaccatagccaaatgcaacttttccaggaaagggtttattttatcttataccttatagtctatcacccaggcaggaactgaagcagaggtcctggactgcctgctgagggctggcaggagagatgcttcagtgaatcccaaggacctggattcaacttctcacactcacatagcagcttacagctgtttgtaactccaattccacagttatacatgcagacaaaaaccaatgcacataaaataaaaagaaataaatcatttttaaaaagaaaagaatattccccacggggttgtctacaggccatcctattggggccattttctcaatgtagagtctctttattcaaatgtctctagcttgtgtaaagttgacaataaacatgtagaacaccctgtgcagctctgtgcctgatgctttgactctcctctactctgcagcctgagagctatatagaacactgttcaaaatactcaggtttgttggtgtgtgctttgttgagagtttttatcagtaggaacattgatttacaatgagtttatgtaatacctgaagtagcaccttgagttttatccatttttttatgtattaaaaagctattattgatggactggctcctgtagcattatgaaatctttatccctggtggtagtactctctgttctaaaatgcttctttggctacttcaactttattttgattattgttttcattatttttactatgctcttgccattatgctgtctatataattaaagtagtgtgttgggggatttccttctttcccttcctccctccctccnnnnnnnnnnnnnnnnnnnnccctccctccctccctccctccctcccttttttttttttttttttttttaaaaaaaaaaagaaaaagtcctattaggtaactctggctgccctggaagactatgtagactaagctgaactcacagaaatctatctgcctccctaagtgctggggttaaaggtgtgtgccaacataccaggctttaaagtatgctttttatagatagcttttaactgggtttcttcatgtaacttggtaatgttagtctttatttggagtgttaaattattaacagtgtaattattgctataatcagttactccaccatcttactcatttgttctctaggtcttgacttttttttttttttcccatttcaacttttgtctttaaaaggaatgagttatgtacgggagggggtttgaatgctttatagacagaaaaaaaactgccctagaaccaacttattcatcatcatcatcatcttcttcatccttgtcttctttcctcctcttcctcttctacctaattctcttcatcctcctcctcatcttcatcttccttctttttcttgctcttttcagcctggtaggtcttggctatctttattttttatttttttttaacacttctgcctccttttgagtaaataagataattgtctctactattgttttactaggcgtaatttattgttttaatttcttagtattcggaatatagtatacatcttaatttatgaacttctaactttcaaatatttttatttatttatttattttatttgtatgaggacactgtagctgtcttcagacacaccagaagagggcattagatcccattacagatggttgtgagctaccatgtggtttctgggaattgaactcaggatctctgaaagagcagtcagtgctctttagctgagccatctctccagcccccaaatattttattttatgagtatttgtcatacctccatcctttgtattattgttattattcatttacttttatgttacaattctgttacactgttaaataataccttgtggggaggttggctggggtcaaactcagagcctgtgcaagccaggtcaggtcatcactgggctctacctccagccttggctaccttggttctcagattaggtgtgtgcactgagccaggctccatttttttttcccccgagacagggtttctctgtatagctctggctgtcctggaactcactttgtagagcagcctggcctcaaactcagaaatccgcctgcctctgtcttccaagtgctgggattaaaggcctgcgctaccatgctcagctcaggctccaattttttttttttttttttaagatttatttatttattatgtgagtgcactgtagctgtcttcagacactccagaagagtgcatcaggtttccttacggatggttgtgagccaccatgtggttgctgggatttgaactcgggacctttggaagagtagtcagcgctcttaaccactgagccatctctccagcccaggctccaattttttaaaaagatattttattaattactatttttggtgtgtgtgtgggggggggggatgtggggagcatgttcacactgctgtatgcttgtggaggccagaagacaactttctggagcaggttcttgccttctactgtgggctgtgaggatcaaactcaggctggcaggctgactcagcaagtgctttatacctgctgagtcacttcactggcccaaagccaattactttttgttgctgtttatttttctagacagggtctcattatatagctctgactgtcctagaactcattatgtagaataggcttgcctcaaactcacggagattcactggcttctgccttccaagtgcaccgctgcgcctggctcttcccagttaattctaaaaagactgaaaatagtaagaaaaaggaaaaaaaagatcaatttaacctcatactattttctggtgtggttcattactttgtataaatctaattttcataaggtatcacattccctttgcccatagagctttagttatcatttcttttatgcacatctgttatagacaatgtgtctgtcctcttcagtttttgctggtctgaaaagtttaagaacagaagcttatgtatcccagatgtcttccaaggatgaccttggcctcctgaccctcctgcctgaagctcttgagtgttgggattacaatacaggagtgtactcttggtttatgtgatactagagatcaatccagagactcacagggctagaatctctagctactaaaactgaactaaagctctagttactgttggaaaaagtttggagagacagagtgactgcgagcctgtaatcctagctcatgggaggctgaggcaagaaaatgattgtaaatttaagatcagcatagactacatagggaattctaggccagcctgggctgtagtgtgagaccccatctcaaaaaaaaaaaaaaaaaaagaatgaaaaaaaaaaaagctaggagagttttggttgctaacacttgggaggcaatgcaggtcaatttgagtttgggaccaaactatgtacaagttccaagctagtggctggcctcagactcatagagaactacctgtctctgcctccaagtgtccagtgctagcattaaaggtgtgtatctcccagctgaaagatacttttataggatacagaactatgtatagtttaatgtttttcttaattttttttttaaattataagaatgccacaccagcgttgggcgtgatgatgcacgcctttaatcccagcattctggaggcagaggcaggcggatttctgagtttgaggacagcctggtctacaaagtgagtttcaggacagccagggctacacagagaaaccctatctagaaaaaacaaaagaaaaagaaagaaagaaagaaagaaagaaagaaagaaagagaggaagaaagccagccagccagccagccacatcatgggctggtgagactggctcaaggggtaaatgtgctcactgccaaacctgacacctgagtacaatacacagtttccacagggtagaagaagagaactgaatcctgaatgttgtcctttgaacctccctgcacatggctgcacatgtgtgtgcgcacacaaaccacacacacatatggctgcacatgtgtgctcacacacaaaccacacacacaacgtagacttttggtttacatagtttgtgatgagaagtttgctccgtttattttttggtcttttttatataatattttaactccctctggctgtcttcaaggtttttttcttaatctttgatttatgtaagtcttaagatggtttttctcagtatttatcctgtttagggaagctgatttagtatcttttgttaatttcttttaaaagattttttttaaagatttattttatgtgtatgggtgttttgcctgcatgtatgtgtgtcacatgcatacctgttgttcttggagaccacaggagggtgtagaatcccttggaactggagttaccaagtcaccatgtggctgatgagaactgtacctgggtcttctggaatatcggtcagtgctcttaactgttgagatgtttctcctgcctcctcatgtcctcccgagattccggtttcttgtttgttagactggtattgggctgaagcttttggatggcctagtactattctcttctcttgttctatcctgtgctctcttgtcttcttatcttattggtggtgggcttcagttccttttgggtggctgctattgctgttgagagtggcagctggggaggcagctcaggggttctcagtgttcttccattgctacctgagtgtttatacaacagacaagttctctttttttgtttcatttatttatatttacttacttcctgttatttgtttgtttattgtggatgtgtatggaggtctgaagacatctcaggagattttccactatctgggttttttttttttttaagatttacttattttatttatatgagtacagtgtacttgtctttagacacaccagaagagggcatcagatcctattacagatggttgtgagccaccatgtggttgctgggaattgaactcaggacttcttgaagagcagtcagtgctcttaatggctgagccatctctccagccccaccatatgggttttgaggtgtgtgtgtactagacagggtagtaactttgtatgtagctcaggatgtagctctggtttcctggaactcactgtgtcagccaaggtgccctcgaattcacagagacctacctgcctctgcccccagagtgctgagattaaatgcgtgcaccaacatacctggcattgtatagctttttaaaaaacacaataaattataaagtgttggggttcaaaccaagggccttgagtatgttggacaagtggtctatgagtgaggtacatccccagctagaatagctcttattctaggagtaagatttatttgtttgtttgtttgtttttcaagacaggatttctctgtttaacagtcctggctgtcctggaactcaattgtagacaaggctggcctcaaactcaagagatctgcctgcctcagccttctgagtgctggaattaaaggcatgcaccaccactaccaccctagaactaatttagtctctttcctagaacaggccttttgtgttctcttctaaaagccacaaaattcagggaagtctggtttttgtttttgtttgtttgtttttgttttttttttcctggttggaggaaagttgaattgttctaaacccagtgtgaactctgagagttgttcatttaccttaccccctggtgagagttctttccttgggttgctgttcagttagaattgaaggtgacctggagcctgcctgtgtttagcaccctcttgtggtgcttagccctacaaatttagctgctttggcctacttggttcatgtggcctccctgagccattctttagaagttacccaggcagagatctacctaggagttatagggctcatctttcttgtttccttgtcttagtgatcagttaatagctgcccattgtctcatgtctggaagagttgtttgtgttttatgtccagtttcctattatttatagtaagaggttgactatagaccacttgaggacatccagcttaggtgtcctataaagcattatgtagtatttagggaaaataaaaaataatttaactgttattgacttcaaaagaaatatgacaagttaaaaaagaagaaaatgagaaaaaaatgtcggtggaattccatattatagaaaaaatttacagttctcagtagtaaatattgtcaagaagtttttagatctttttctggttttattaagacagagtttgtgtgtagaccacactggccttccttgtttatagtgatcctcctgccttcacttcttgactgcatgcattaccacactctacttatgctttgtgtccatgggtaaaaaaaaagtctcctttgcacacaaaagtgttctttatgaagaagagtgataaattatattcttaaaattcagagccttttgcagtgcttgatggaattgttagcaaggaagaaagggttgtaatctgagctaggtatagtggcccagccctagagaggtgggaatgggagaatcaggagttgaaggccagctgcagctacacagtgagttctatgcgagactgtcgtaagacagacacctaaaaactaaataattaaagaataaaaccaggtattcgaaagacccttaaataaagtaaaaacaatgaaaatgagagaagatattcacactgtgaacatgtgaaaaacatatgtcagccacaacaacaaaaggctgggcatggtggcacattgcacattgcatctgggaggcatgagctagaggatcttaagtttgaagctagcctgtgctatacattgagaccttgtctcaaaaacaaacaaaaattctggtagaaaaaccacatagagctggaagtggtagcttgttcttttgactctagcaggaaaatcacttgagctcagaagtttggggtcaactgggcaacatagtgagacagacaaatgtctcaagacaaaacagacaactacgggactcaacaagtccgtgaaaaatgcacacaaattcaatgtaatagtaggtgaaccacaacaattggtatttcacaaaaaaagtggctgggcctggtggagtgcacctttagttctagcactcggaaggcagaggcaggcagatcaaggccagtgtggtctacgaagtgagtttctggacagccagggctacacagagaaaccctgtctcagaaaaattaaaacaaaaaacaaaaacaaaacaaaaagggannnnnnnnnnnnnnnnnnnnnnnnnnnnnnnnnnnnnnnnnnnnnnnnnnnnnnnnnnnnnnnnnnnnnnnnnnnnnnnnnnnnnnnnnnnnnnnnnnnnnnnnnnnnnnnnnnnnnnnnnnnnnnnnnnnnnnnnnnnnnnnntagaccagggtggtgtgagacttagagattaaacacatacgcctccaggcccagttgactgtggacttttaaaagttagaatgttttagattgtgatgttgatattaatatggggtcttggagatgaagttatttattagtgtgacatgctgataaggggccaactgtcctgactagtaactttggaaaaataaattagaactatgcagaagccttttcacattcattccatcggcagaaatgcatttcttctcacacgtcctaggctggccttgaatttgctgtctagctgcagatgattcctgaatggtgagattatgggtatgccccaccacgcctgtttatgtggtcctggggatcaaattcagggttcctgcatgctaggcaagcactctaccgattatacttcctccccagaccctaaaaagatttttttccttaggagtataggttgtaacaaatcttacagcttggctggacattgtttcgtgaggctaaaatgtacttatctttaaatcctcagtccagttttcatctctgaatatacaacaggagacatgcatagaaacgtttatagcagcattgttcacattgctagcttaattcagaaataacccaaatgccaacaatgagagaagaaataaaacaaaatgaccatagggttgatgagatggccaagcaagtacaggccacctagccagaaaacctgacttttcctgggacccacacaatagaaagagttgattcccccaagttgttcccagaccacctttgaaatgactgtagagctaggtagtgtgagctacacgtatgtcagccaagtcatgctgttctatagtaaatcctaacttttcttttccttccttagcttgcttgttcactcattgcattcattgcaatggttctgagaaacttttgcctttctggaaaacctagtaattgcctttgaaggtatttagatattaaagaaactggtaaaatgagatcatacctcctcaaaaagagtagttttcttgtacatagaacttttgccatgtttattaaaatggctgtgaacattttttgtgtagtgcatagaaatagacctagccactatgcacctggctttagatgactgtgaattctttgttcctgtctcaccaggtatacaatgtttacatggctgggaggcagctgtgttctaagcggtaccgggagtttgccatactgcaccaaaacctgaagagagaatttgccaactttacatttcctcgacttccaggaaagtggccattctcattatcagaacaacaattggatgcccggcgtcgtgggttggaagaatatctagaaaagggtaagcgatgcttcgtttctcagcaggtaaaggcacttgccaccaaagctaatgacctgaggtagaagaaaagcaactcacacaggctgtcctatcaccaccgtttatttgcaatgatgggtttgtgccctacccaaacgggtgaataaataaatgtaagttttaaaaatgttcaaaagggctgggcggtagtggtgcacacctttaatctcagcacttgggaggcagaggcaggtggatttctgagttcaaggccagcctagtctacagagtgagttccaggacagccagggctacacagaaataccctgtctcgaaaaactaaaaaaaaaaaaaaaaaaaaaaaaagttcagaaggtaagctagtccattaaactttactatgctgaatgggtgtagattctaattcctaaattgcatagctgtgtttcctaaacatcagtagtgcaaggaagtcatgttcctgataagaagtgttgaatgatctgggccctgaaggcaaggctgaaatgttctctatggtgatagtaccctgctttgctagcttgcagagaacctcataacagaaaaatgaagttgttggtggcccttcatggtcttttatttatagggttgtatttacctataaatacattactatggtgcattgatgattcttggttcattggggtgtcctgtatagaaattctttattccttctacagctgttcctgtataggtttatctgttgacaatctaaagtctccttattctcaatagggagaattaataaagcttccaaatgataatttagggttgtatggatgtagtactgtgatatttgtttctctagaaaggtatagaaatgacacagatctgaaaacatgtaatcttgtggttgtgaaaagacacttgcctggctgtattatagctatatagcttgctaacggtgtgtcttaattacatttctattgctttgaagagacactataaccaagttatattattttaaatgcttataaaagaaagcatttaattgggggcttgctacagtttgagagggtgagtctatgaccatcatgatggcagggatacagtggcaggcaggccagcaactggacagggagggctctggagcccatagttgagagcttacatctcgtccgcaagagagactggatctggtgtaagttgtagaaatccccaaacccaccctcagtgtcacacttctttcaacaaggccacataccccagtccccaccagacagtttcaacaactgggaatgaaacattcaaacacatgagcctatgggaaccattctcactcagatcaccacactatgtaatagggttttttttttagaatattagtttaaaagaataactgtaaagactaattgtcagaattcaattaaaacaaacaacccaacctactttggcagtgaactttcttcctgaaaagctgcttcctgaaagtagtggaacccctgtttttaccttttcctaaagtaaactggccccttgaatacgctataaggatgttaggtagagcactttaaaaatgcagtaacattgtcaatgtaacttaccatccttggggtggagagctaccctagattaattagataactagttacttagttacctgcctccctcctcttcatttgttcttactctccctgtgtcttgctctctgtgtccctctgtcttctgtctgtctatatctttatatttccttttattgtactgttctataccatatttagatgaattttgccaggccttaagattcatatcctaaggatacacatattaggttatagttgcctgctgctaatttaaattgttctgtgttcactcccaccctcacatcttgagatgtgtctccgtatagaccttggctgtcctgggactcagcttgtagaccaggttggcctcgaccttacagagattacctgtctctgcctcctgagtgtggcgattaaaagcatgagccaccactgcaaggctttgtctactttttttatacaaggttttgctgtatagcccaggttagtctagaagtcactctgaagatcaagctgaccttgaacttgcagcaaactttctgcttcagtttctgaagtactaaaattgcagataggtatgaacttgctttgccctgatgatttaaatggaagctttttgatatattctttatattcctggtttagggcctgatactatctttgttttctacagtgtgttcaatccgagtcattggtgagagtgacatcatgcaggaattcctgtctgagtctgatgaggtaggtgatcactcccttccctgatcatttcttgctgagctcattttgggaaaaaatatagataatgtttgtgagatgaattacaatcaactctgtgaatgagtggatttctcccgtttcctttccgtgcgtatctaccctttaatacctagaaccaggttcaccttctctgttttttgttttaatgatttttgttttagttatgctataaaataataaccttcattctggtattttcaatcacatatgtatgtgcagatgcacatgtcaccatattttgcccatgttccctccccatgttgttcttgtcacttccctctggccatcttctctgctccaaggactccctcctgctttggtctttcatttatatttatgcattcaagtctagagtctgcacaggagagaaaaatgggatgcaatctttgtttccttctgtattaactctcttttgttccctttcgtgttctgtacatgtgttaaaattgaatttcaagtatgagagagcttgctgtcttccctttgagtctggctgatttggattgtggtgatctctagctccgcccgttttccttgtgcgccttctgttctcctctcagctggagctagagacactcgctcctcttcagtgtgctgatcctctgtgtgtctacctgtcagtctcccttttgcttgctggttttgaagttattttaaaggtaatttttttcatctggtgacaagcagtggttattctggacctgcacgttggtaaattgtatttcttgagattcaagtctctctctgtgtttctgaggtactgttatgattatttctacattgtctgacagaccctgatcatcagcaaacatggtgacttactctatctataatgctgtaaaattatgtacaagtgacacagtggctggctgatctcagagcccctgaggctttgggtttaggagtctctttttatggatatgtggcaggactaattgacagttcattgccataattccactgctgtgagaaaaggctggagtcctctgctctctctcttccctcttctcccttccgttctccttcccctttctctcctctcttcttccttcctcctcttccctcccctctccttttcttctttcccctctcctttcttctcccctcctcttctccacctctttgcttttctgtctctaaataaaagcatggctcatcttctccattcacagctaagcttcttttttttaaaaagatttattttatgtttatgagtacactgtagctgtacagatggttgtgagccttcatatggttgttgggaattgaatttaggacttttgctcgctctggtcaactccgttcgctcagtcccctgactgctctggcccaaagatgtatttattataagtacactgtagctgacttcagacataccagaagagggtgtcagatctcattacagatggttgtgagccaccatgtgattgctgggatttgaactcaggaccttcggaagagcaggcagtgttcttacccactgagccatctctccagcccacgctaagcttcttaaaggatgttctattttactgccatttccctacttaaaagtttgaaacttttccacagtttttaggattcagtttgaactcttacagtggcactcattaggcccatcatgacctggtctctcttcatctctctctaatctcattccctaccattgtttgatacatctttagtccatacattcatacatgccaacaaaaggttctgccaatgtgccacatctccaaatctacgaaatacattttcatcatttattatttgttatatgtatattctgtacagtcagtacagtgcattacaacatggtagacaacttgggaaacagttggttcctttcttccaccatgtgggttttggggaccaaactcatcaaggacatcaagtttagtgcagtgcctttatcagctgagccaatctactggccttctcattggccatggagtactgttgatttccttaatccattctgtccttctctagcatttatggcctctttcagggaacttccctcacttcattccgtgctgtcctttccttcactgatcctttacagcatgtcaaaggtcactcctctctgacctgcagtctgggcctctgtacttttcagcagtctttatcagctccccttgcaatcccttatgccctgctctgtttgtcttgggaatggaatctattctttgttactttgacttttctcattcattgtaatgcagtggcagcttctaatctgccattttcctggtttacttctttgaagtctttcctgatgactcaagttatcaacttttcgtctagaaagaacttctacagttagtataactcagtcatcattttattgccatctcatttttaatttttattcatataatcagtttgtcactttatatttttagcttacaagagtgtgtgagctaccagtaggtaagagctaaatattgattatctttatattcccagtgccttacttaccacagcatcacgcatggtggaggtgcttaataagtattaactggctagaaggatgagtatgtaatactgttatccagcaattattctttatgtatatatcttgctttcccagactagattataggtttcttgtagataagggtataaagtatagtagtaccctctctttatccatggttttactttctacagtttgttacctgttgtcagccatggtctcaacatataaaatacaatattttagaagtaaatattatgtaaacttcaaattgtatggtattctgagaaccacaataaagctttatgtctattccatgctgtcccatttgggacctgaatggtctgtccaatatgtctcctctgtatctgctacctatctggtagtcacctaggagtttggccagtcatcagattgcctgcactggcatcgcttcctggctgtattcaaataactctcaacccttcaaagcaagagtggttttcttagcaacacatagacccaagagagccatagagtacttgccttgcaacaataagaaaaagaattctgataagattgctaaggtctgagaggatgtctcttctgtcaatgaaattatgggcaagaaaaaataaatttatgctggttttgctgaagcaccttaaactgtaaaagttacagccacagtacatgacaactgcttagtgcaggtggggacagcatgcattaagtgtttcaatactaaccatgtttcctggcatctcctgtggatcttagaacttaacccctgtgagtaaggaggaagctatcataatgcttagtgtgcttttaagcaaagagtagaatgtttttaatggtcaatgagaatgaatttattcctaggtgattatttttcagtaataaaaattagaagatcaaaatctattagaagttgggtatggtggttcattcctataatcccagcattctagagaccaagggaggaagatggatgtccttcagttcatggtgtgtaccttggctgcaaggcaaaactgtgtctcaaaaaccaaaacaaaacaaaaacaaaaaagacaaaaaataaactattagaaacatatgttgaggctacaaagggttcagctgtttaggaacatttgctgctcatgcagaggacctgggttcagctcccagcaagtaaatctgcccaaggtcttcctgacctctgtaagtactgggcacacacatgcacacacaaacacacatgtaggcagcacccaaacacataaaataaacctaaaaaattaaaaaatgaaatatgtgttattctcaaaagcaatgagaattgtgggggtgtttgtttgttgtgtgggtttgtggtgtgcgcgtgtgtggttctagagccctaaacattctaggcaagtgttctcacactgagcaatgtccccaactctgtaagtttttatttttatttgtttgtttgtttgtttgtttgtttttggtgttttgagacagggtttctctgtatagccctggctgtcctggaactcactttgtagagcagaactcagaaatccgcctgcctctgcctcccgagtgctgggattaaaggcatgcgccaccacacctggcttaagtgtttatttttaattaaatagagtaagaattgtatagtcttagctagaatattggtaatgacacaatttacatctcaaagtctattgcacattttgaagatggtctgattatatcaaggttcagaaaggacatcagcatgtgcctttagcccatgtaagctgccgacttattcaaccagtgttgagacatctcctgtctcctgtttcttactcctttgtaagttctaaatggagtgacaagagtgaactgaaatctcatctgggcttcacctagactgtttcacctaggcaggattctattttgaagtggcaacgtatctgttcatcttagaggataacttctacaacctaaagccagctttatgagttgtaaatatataaacttttaagacttaattttttctcaatttaatagaatttactttctgtctcatgttaaatattatttagctagcatgtagcaaggagaatgaagatttactacaaattctttctcttcctttagaattacaatggtgtgtctgatgtagaactgagagtagcactaccggatggaacaacggttactgtcagagttaagaagaacagtactacagaccaagtgtaccaggtaaagccaacttacattggatgatgcgaaactaagaaacaaattaaatgagttagtacatacaaaatgtgcagagtacacttattaattcatgttactactatgaagttaactttgtccttcttaaaagaaaggtgtatgagaactgagtatatggcatgtgcttgtaatctcagtgcctaggaggctaaggcaagaattctgcaagtactagaatattcaggagtataaaacaaaaccttgtattttttttaaaaagtgcagtaaataccccagagtgcaatggttataattaactgttcttcctcttttgttgttgttgttattaaaaaaaaaatacaactttttttaaaaaagtgtgtttgtgtgtgcatttgtggaagctgggggtcacattgatgtcttcctaaacattgattgtcctctatcactttctggcttactcttgagacagaatctctagactggtggtcagcacactccagcagtccccctggtttcaccccagtagtgctggggttacgatcttgagtgcatataggtttgtgctcacctttttattttcgttgctggtggggcggggagcaagtttcaaactcagattctcatgtttgctagcaagtgttctcacccactaagccatctttctagtcccttataaaagaataaaacctttgtgtgtggccgtgtgtgtatatatgtttgtgttacatgtatatgtgcctgtggacctccacaggtgtacctgtatgttcagaagtacatgcatgtatgcgtgctgtggaagccagaggttgacactaggtgtcttcctagattgcttccccaccttacagactaaggcaaggacttttgctaaactggagcttggtgatttggctagtgtttctggccaatttgagctaggaactccttgtctctgcctcctgggggcttggattacaggtagtccttacagctcccagcatttatgtgggcactagagatctgaactgtgtttctcacatttgcactgcaagtgtttttcccacaaagctatttttccagccctgtaaaatactttttcaaacatatataaaatcagaatagaatcaaatcataaatttccctatatacttattcttatgatgtgagctatggaacccggggacatgggcatgctgcgaaagtgctctactccccatcccttcattggtcatacttagtaacagtcaagatcttgccacacatacatcatgtatcctcttttcctttccctctaaggtttttgttttttaagcaagcaccatggtagacctgtatatccaacaccagtatcaaatcttaaaaagagcattacttcgtttaacttcatagaaattttcagttatcaaaatgatttttagagttgatttgttaaatctggatctaaacaggtcctccatgcagttttgtttcatttactataagcagtctcctttccctgctttgtgtggatgctttgtgtgctgggtcactctgagttaccttcttgttttcttgtaggtcgcttatcatgtccttctagttccctgcattttctatgaatagaaacttgctctagaggctttattatatccaggttctgtttttaatacaaaatagaaatacttcataacaaggctgtaacaaaatataatatgtcgtttctcaggggacaccgcacagtctgtagttgtgatatatgattcattagtagtttggtggtggctacctgatctcttcactacagagggtctgtacatcgataattgtggccttattcaacagtttgtaaaagctgcaaagtgctggatttcagttctcactccctcttattttttttttccttacacagctataattctgtaagtaactttccctagaaaaataacaaattaaagaaaagctgtttgtgggagagaaaggataaatatttaattatttcctttattggcagcttttagggtaaagaattgatgccttagttgattctagtgttgtccattgcaacgattgttagtattttatttttagttacaggtaaatttctaattaaatgtgatttaatcaatagaatgtgattatctctttgatgctcaaatggtttcatctttggtcaaaggaagttccttcatgtctgtttctgtatacttctgatgtgatccattagcttatataggcattttagaataacagtgtatcttgagcttttctttaaacatttcctgccctatatctagaatagcccttcatcaattagtcttggttcctttgtgagaaatgatatttgagatcagatctacatgtcatccagttgctgcttacagacctttgatatgaacttgatcaagactttcagggtaacagatggatttctgttatcagtgcttatacaaagtgctcctttgtagtaaatgagaaaaatctacccttcatttgatcatctacagtatacagtggcaattgacataggtacgattccagccatgtttgaaattttatagtagtggagtaattacaaaaagtatgtttttatagttttcagatgttctattctctacttctttcagtgtttctttagaaagacctagggcattttgttgtctagttttttatatgtatgtgtacctatcaatatgtatataaatgcatgcactttactggaaaggtcagagtatcattgggtacattgggtaccatgaaactggagttcagtgcaggtgctaggaattaagctaatgagagcagtgagctctatctgctgggccttctctgcagcctagacctaggctgctttaatacttccccttctctcatctcattcttgtgtcttgtggctagaaaccattttgtaagtcctgagagtattccagttttcatccagtgcagtatagaatagtgatttaaaatacttataatttccggttcctatattcatctgatattgtatatcagatgaattgaggctggatatgggaacagacacaggaagaagtgatacagtcatatttggttcagtcttccaatgatttttcctatctagtgaatgcattgcttatattagtagtgcttttaaaaaattgattttgttacgaaaatctgctttgtgcttcttttctttttgttaagtgtatgaaatttcaattttgatttatttgcacatgaagtccttagtttccagagagcaataattggttcttgtttaatatgctgcttatcaaccacttgagtctaggagttgaaggtcggtagctaacattgtgagattctatctctaagataaacacaaatcaaaggttgaggggtctggagaggtggcttagcagccacagtgctggctgatcttcagaggacctgggtttgatttccagtactcacatggcatacagagccagacacacacacacacacacacacacattcaaaaattgaatatttgaaaaaaatgttgttttatgattgtcttatcaagtatatttctttaagtgatataaaagacctttgtcggggctgaagtgataactcagttctaagagatcctttgtctggtctctgtgggtatccaaatatatacagcatcattcacaccaacacacacatacacattagtaaaaatatatttaaaaactacctttgtagaattaattcatatttgagaaaggaaatttgacactaaggaggaactattattaacttgtatcaaagagataggtgctcacgtagagagaggacagctatatttgggtttcttctcctgtgtgcatatgtgcaccttaaggatacctgtgggccatggtagtttttatgaagctaggatgtagtgtctccttttccccttctcctgcatgtacctgcctccatagcattgtctgatcttacttttcctgaaataattgtgtcctgtttaaacttcaggctattgcagcaaaggttggcatggacagtacaacagtgaattactttgccttatttgaagtgatcaatcattcctttggtaagtgccaatagctgttactatattttgtttgttttagtctagtattcttgaacaaaaactgctgaaaggagagccaacttactaatactgccttcagcaagcagacttggcagatcttataaaggatttctgatcaatattcatccatttcttcttttgtcagtatatagcgactttgaatccatggaagcagccatcttccgattatttttcttcccattatttttcttcccaactctcagtagcctaatacacagatataaattgtgttgtaaagaattggtaatgaccttatccttcccaagctttctgtaaaggagaaaaatcgagtctgtcttttgcagtgttgtgaagccaagtaagcctcaagaacgatttgaagagctagtgtagaaattggaaggtgtaagctaggcatggtggcacattgtaatcccagctcacagtggagccaggctgctcagaagttactcagtagacacctggagtgtgacagctgccttaggatttgggggcgattggctgagaagtatcttttaattctgtatgaataaatgcagtacactgagaatggccataggagagtccaaatggcccatagctgggtaagagaagaggctcctctgaagatgtttggtggaccaaacatgcatgttaatgtaacaggtcatacatgaaacattttaactgaacttggagtaggcactctctctgcagtcatgttatctaaaggaccagttatctaagcaacagactgcactcatttgttttactggctagattcatagttagaaagagtggatttagctgggcatttggttgttttctgctcctgaggtagagttacttgatgaatttgagctggtgctctaattaatgacaacctaccattattggtctgctgtgtatagtttctattagggaaactcctatacatcactccactcagcattctttgttttgtcttcttcagtacgtaagctggcacctaatgaatttcctcataaactctacgtccagaactatacatcagctgtgccaggcacttgcctgaccattcgcaagtggctctttacaacagaagaagaagtcctcttaaatgacaatgaccttgctgttacgtacttctttcatcaggtgggtgaataagtcttcctgctaaaagctaggttcctttcttgtatatacttagtagttagacagttcagtgtgaatccttgggtccaagtagtacttagaatatggttcatcctgtttcaggagtcataaatgctagagctgtgccagagttttgaaaaagttcacgtttttaatcaacaaaatgagcctatggttatgtatatgttcagaatttctaaagcaatactatactatgtgagtctgggaaaagcagaatgtctggtttttacttcattcttatatcacaatcaatgcagagacgcctgtgatgtcaaggggtataggaatttgtctccaccagcaagtgtgtgattcttcggtggaaccactctgacacatcattaagtgttatgcaattctgacactatctgactggaaatatcaaatcccacagatcaagggctaaattcctcaaactgcccccattttagacttggtttcaagtcctctgaaactggtaagctgtttgctgcagatcgaatttctatgaacacacacacacacagctggtttaaataatttgcttacactgctcacagagctcaggaaatttgatacttatgagatattttaatgaacatgaataagcaagaaatgcagtaatgtatagtgagcccaaaaaggtctaaagcataggagcttccaccgtggaagagttgggagtacactccactcctgcaggtggatgaattctcatgttcgctgtcttgcaaactggccatggtaagtggtccaggagcttcatcttttgggttttggggtgtgtgtgtgtgtatgtctgtttgcctgtctttgtgtgtgtgtgtgtgttatatgtatgtggcacatgcatttaaatatgccagtgtgcatgccaatatatgcgttcgctgaggccagagcagaacatcaagtgccttccttagtcatcctctgtttgtcttgagataggatctttcactgaactaaaagctcaccttttaggctatgttgaaagccagtgatctctctggatctgcctgcctcctccccatgatgcttgaattacaggcatgcataggccagcctttatttatttatttatttttaacatgggtagtgaagattcaaactagcatgcttgtagaacaagcacttccacttactgagtcatcttccttcattttgatgtgtgtgtgtgtgtgtgtgtgtgtgtgtgtgtgagtgttagtgttaacagggacttaatacatggacatgactgtaatataagcaaccatattaaaatgtgactggacaaacaaggtttggtttaatgctgttagatttgatggtgatacccaggttgacctttctgaacagcattccttttcatagtcctgacctaaggtttccttcataaatggggatcttgtcataagagggttttgtttcatttttgtatttatttatgtgaagagtggtaatgtgggtgaacataaatgcctatctgtgtggaggccagaagttaacatttggtgttccttaggaattatcctctttgaggtagggtctctcgctaggcttgggaaacatcatttatgctagtctggctatctagcataccccagagatcctgctgtcactgcctacccagtactgaggttatagtgtttgccttacgtacttataccatactgaaaccctctggacccactgtgcattggactttagccaaaactttctattaatcacctgacctctgtaagcccctactttaactggaaggccacgatacttcttggggtctttaagaatcagtgtcaattcagaaccagtatccaattgaccctggaaagtttgatttctcccagattataactctctaggtccccctggggaagacctagggaaagactaacagtaactaaggttcttttttttcaaaggattctaggtctgcaaactggctcaattctggtaattgggtcacaggctgagatttccccttaccaccttccaatatatcctttcttacttttttttttgtttgtttgtttgtttgtttgtttgttttttgagacagggtttctctgtatagccctggctgtcctggaactcactctgtagaccaggctggcctcgaactcagaaatccgcctgcctctgcctcccgagtgctgggatcaaaggcgtgcgccaccaccgccgcctggccctttcttacatttgtctgagagtttttctggttatacaaatcaacagaaatgctgtaggcgaaatgtaaatgagctaaatacctaataaaaaaatggggaaaaaaaaaagaaatgctgtaggcttcttatctatttcacacttgtaaacaccaccacagtaccaaaagggtcctttaaggtcattccaatataaaaatcactttgccattgctgaccattataggttagaccattatggtagctatgcttgccttgcctttcatgacttggtgctgccatctgtcccctgctcccccagggcccattgaaacccatcccattgtattcatccagctgagtactagcatctccaaccctaaggtctggcacaagggaagggcgacaacaaaacccttcaaaagtaccagtgcgagctgggcgtggtggcacacgccattaatcttagcacttgggaggcagaggcaagcagatttctgaattcgaggccaacctggtctacagagtgagttccaggacagccagggctatacagagaaaccctgtctcgaaaaaacaaaaaaaaaaaaacaaaacaaaacaaaaacaaaaaaacaaaaaaagtgccagtgcccctctcaccattttgtgctgtataggattactgatgggtttgtcttctgggccttctcattatacaggattagatacacagtgtacccactctagcactgcaattttcctgagccttaaaatcctcataaactctgagccaagaatcttcagtgtcttttctttaggccatcttttggcaaatgcttcagccagccagtcagacttttgatacacctttgaactgcatgagcttccatattaaacctagagtctccacttagtatgtataaactcagcctgattgacccagttttatgtttcttctaccttacttaacacccttaaaatccatttcaattcatagtcttaagattcctgtttgaatgcattagcaaactcattaagccctttagtgatatggtgtactccttcatgaccacacctttgatctcccagcctagccttaggtctagttatgggactagaggcaactattggtggttcctgagagacatcaggattggcttgcctggtgtctccttcagagaaaatcacagctgcttcagcatacaatgaacaattaattcctcttggcaaaggtggagagggcaatacttcaggggttaagggtccatcctctgctaagggtccatcctctgctaaggttacttcctcatatgcgttaaaccccccgaggatctgagggttcaaagttctcagctttgggtcctcccacaaatcttcatcctaagtgagaagatcccattcctgccaatcagtgtttttacacactggtgccctctcgggctgggacttgagtagactactgtaagttagccagccttaaaatgacgcttgggtttgattatctgccgcttgagctcagtggctgctgaaaagaagattctcatccagggcacacttaaaaacctttagaccagtgggtctcatctttcctaatgctccgaccctttagtataattctcagccataaaattattccactgctacctcataactgtaattttggtactgttgtaatgtagattatctgtgttttcacagcccacaggttgagaaccactgctttagacagtttatgtgaacctagaactggctacatttttcattgagctcatgcttttccattgtcagtttatcaagagctcctaggagaaagtagccagcactgttattttctttattaatccataaattgtcaaaagtatacagtcattagattccttgtggccatcacatgtttctagctttcagtgttcttcacctaccaggggtgtttttagtaactgagtgtcagtgaattgtaaagccttcaccagaagcttcaaaaattcatccctatctgggtgacggtggcatacacttttaatcccaacactcagaagcagaggcaggtggatctcttagtttgaggccagccagggctacacaaagaaactgattcgaaaaaccaaacaaacaaaagacagaaagaaaagtcatccttctaattctgtctctcaagaactactcctggctccacactctgtactagttagggttcttcagagatacaaaatcattgtgtacatgcaagcatgtacctgcttgtgtgtgtctattagactaccttacaggctgtctcattagtcccactggttcagcaatggctgccacctgatagaaagtttatgaatacagtagctgttcagtacatgcaagtgtgcgccactgttgggttttagttgattccatatgtcaagttgacaatcaagattagccatcacactggtactcagtgcgtagtcctggcattgacctctgtatctacttacattacagatgtgccatcatgcctggctcagaatcatgtatcctgctctggatttattttcctttcttatgttgagctctgtgtggaaattttgtcttttctgatctggcaaattgtttgaatgattaaattgatagcttctaacctattgttctctttttgaactcaggttctcatatgaagtttctttgttctgtctttcatatcagttccttgtggttattcttatcctccccccgccccgcacagtctcatgtaaaacaggctggtcttaaactttccatgtaattgaggatgaccatgaaaccctgaccctcctactgtcagctcttaagtgctaggagcgtgtcgtggaggagtgttaagctagcttaccttgttgtgcagcaggtctttagaacccttaaagatgctgagattacatgcacattaaacaacagtgccttgcttccctccctaccatccctgtacaaacactattgccgtaacttacctcctatagtggaattctatagctgactaacattatgttgctcctaccacttggctgaatagtgctactgtgaacatgtgcagatgttcatttgaaatccccttttttcccaatatgcttagaattgaggttgctgaatcctgctggtaattctatctccaatttgtgtgtggtgtgtgcttgtgttcatgtgtgtatggactgtgtgcacccatgcttgtgtgcatggaaggctagagtctgaagtcgaacatcttcctctatcactaccactgtccctttgttttgagactgggtctgtcattgaacttggaggtcaacaatgtggctacattggctgtccagcaagctcctggggatccaggctcagtccatatgttgttttcagagcaagcatttgaagaactattgttattgttgtttgtggttatattttatatttctactaatagtattcaagtctcagatgatttcttttttttttgtttatgtgttttgtgaaatagtattaaatttttcctttattagttttagttactttgtaccctgttttaatgatggggaatctaatacatttcattcttctaagatgtcataaattataagatgcaccatttttttttttaagaaagaaaatttgccaggtaaaagctagcacattgctcgctgtgagatacatcccagtcttagagattatgaagtaatgtgtctcttagaattggtgagatattacctaatgatggtaatgagtcttttcactgaaagttaataaggtaaaaattcttggtagtttattttagagttctagctaaatctgacagattatacatgagctaatgctgctccatccttaaactcatgagactgtaaaaggaaacttgtaaggaaaagaggacagggcagaagatgagactgttagcagttttttaaaacaattgaatgaatctagaggagtttgggtgtttgatttttgtgaaagatttgatgacaaaattggtattatagtcatgtgattgtggtggcatattcctttgatctcagcactcaggaggcagaggcctctctgagttcaaggccaacttgggcagccagggctacacagagaaacaaaaaacaaacagaaaaggttattgtttacagttaatcgacaagaattggatatttgcagatggaaagttacaaataggagcatgaagaataataaacctcacagacgatatctttaaattgttaaaggaagccagtaaaggaggggtttgaacattgtttgcatacttacaaagtactattgattaaatattctagaaatattttctatgtgtatgtgtgtgtgattttgtgaatttatgtgtatcatgtgtataggtacctgtggaggccagaggatgtcaaatcctctggaaccagagttacaggtagttgtgagttgctaagaactcaacctgagtcctctaaaagaacaataagtaatctgacctgctaagccatccctccagccactgattaaactttatttatttatctatcttttttttttaattgagaagttaggagaagagtttccatgcaagcctgctgaggtgtggcatatgatgtaatcccagcactctgggggctgaagcaagagaacaataagttcacagccaacctggactaccatagcaatacctaaaaaaaaagtaaaaatgtattgggatagggctagatatgaggctgagtggtagagtgcttgcctagtgttcatgaggcctctgggttcaatccccagtctaggaggaagaaattatcagtaagcataacaggtagaattttgtaaggatgatcataaaaactttcattgcaagagataatttcataaaactttatcactacaaaaattgttaatttctgtctttttttgtagtcatctttatgtgtggctgtctgccaaactgagatgatttaggtgactttgaagtggactttggcaggagatagagctaggccctgatctagttcttgcctttaatcttgaactcagtctcttttctaggactccagaaaaccaggtgtggtgcacacacgcctgtattcacagaactcaagtctgagtcagaaggatcgtgtggtcctgagcagtctagtctgcgttggtcacaccaaataggcctgagtaaggaaccatctataaagaaatagtcagaaggttaaaacagtgggaaatcatttgtaccttaatgttacaacatctatgatcttactccattccttcctcatcatgatccgtgtgtgtgtgagtgtgtgtgtgtgtgtgtgtgtgtgtgtgtgtgtgtatatggatttagacagatagagagatagataggatgagcatacttactttagccacacacttaagctcattgctttaagtcagaaaggtttcatttaaattcagcagatctatttcctgttccctgtcttcatctgagagtttctcactcacctgcctagggaggtctgtcttaggcttctctggtaactatggttacagctgctcctgttatagctgcacgttgcacactttttgccgtacgtacactctgtcttaccagacagagtgttaattttaaaagataacatgtgctctccttgctcttttggtggttatcacatggttaacgtgctctccacagagatttctcatgtgccaccatccttcagtgctagttattctagtaaaggcacctgtggtgacagttcactgtggtgatggtaatggtggtccaggtgaacacaagccctcctaaaaatgcatgtgagtaacttttctttccctgtctctgctttgtgataggctgttgatgatgtaaagaaaggttacattaaagcagaagagaaatcttaccagttacagaagctccatgaacaaaggaagatggtcatggtaagtctgtgtctccattactgcttaaatgtcttgttttgtctgattttgaaaggtaccacagcctggtcggaggcttgataaattgagaggtggaacataccgactttgatgtaaaatccttgtgtttccccattattacataaaaaaatttagattatacataggcatatagtttttagtaagttaatttttagtaatttataaattttagtaataatcaaataatatttgtttgaaaatgtggtgtaaacaaagctggaggtagtatccatagtcctagtactctggaggtggaaacaggaaggaaaggctgcccttggctgtgtagtgaacttaagaccagaccaacaacccaacaacagtgaccataaaacacactgtgggctggagacttgcttggtggttaagagcactgttgatattcccagcacccacgtggatgctctcaactgtctgtaatttcagtctcagggaatctgatgcctctcttctggactcggcaccagtcacatacatggtttacatacgtacatacaggcgaaacagtcaatgcacataaaataaaattttttaaaaaccctttaaaaacattataatctataagaactagtatttagatttttttgtttgtttgttttttaaagttttagtatttctttatcctagaacaggtctcagccaggtcagcctggagcttggtatgtagcccaggctggcctcaaactctctgtgttgcctaggctggccttgaacttgacttaaatatcctataccagtctctcaagtagtaaggtaacaagaataagccaccacattcagttaggtctttaacattaatattgagtttagttgtgaggtagcaaaaccattgcttttaccccttgatcgttcctgtttgtgtagacagttattctcagcagtgctttgtatcacatgatttcctagacttaggtttgattttagctgctactagtgtcacgtggctacttaaactagatttaaaattattaaaatttattcctttggttatcctggccacgttttaagtactaaatagccatgtgaggccagtggctgccatgtgacagtgcaggtgtaggtttccagacttgcaggaagttctgtcagacagtgctgcctagcatggtcttcaaatgttttaaagtaagttgttactttgtaccagccataagtacaatggtggacagtgtaaaaaaagtatgactagtaaaataataataataatactgataaagaatatttaaaagatttcagtcataagcatttacaaatttctctcttgacagatgacatatagtaaaattttttgcattgtttcatgtgtataatgagtatactggtaatcacttggatacactacttgtattgtttttttactttctttatacttatctattttaaattaatttaattgggccagatatggtggaatatacctataatctcagcctacaggaagccaaggcaagaggatcattatttaagaccagactgagctatccaacaagcttgagtttgagatcaacctggacatatgatgtgaccctgtctcaacatcagacactcctcaccatgtgcatgcacattaagttagaaggtgaatagggtcagcgctgaccttagcccaggcatgactttacgtctcggaaggatagtcagtcactttaccacttacatgattaaaaaaatctccttcccgtagaaagtcaccagaaatcagggatttgttttatcactacatacgagcagactgaagtagaaaatcaaaaatcttttgagtataattaaatattggcagaattttggcttagagagtttttctctgaaatagtatctgaaagcacaagctacatccgttctttaagataacagcactgggactaagggtgatggtgatgccaacaagttcctatgagtgagggagctccaagccagccagggctacttcatgaggtcttgtttcaaaagacaaacaaaaacaaaaacccaggccttagagcctggagagatggctcagtggttaacagtgctggtggctcttggagagaggaccaaggttcaggtctcatcactcacatgagctcacaactatgtgagtgatctgaagccttcttctggccttcacagcaccaggcacacaaagatacatgcaggcaaacatgcatgtacatacaataaaaataaatatataaaaagcatacttgagattgtgaaacctgaagagtttcagaaccaagcctatgacttattaactattgaacatttataaaatgtcctttactatacttttcctctctacttatctaagtaatataagacaatacacagaataattaattgtgtggccaccttttttttagataggatctcttagccaaaactagttttgaacatcttcccacttccatctcccaggtcctagtatgacagatgtgtaccatcatttctagctttaaatctttggtttttacacacatgttgtaaatatgttagaaaataaaaattcaccttttccaattttgaatttatgtaaattttcaatgtttcttttcaagcttggtacaaattcagcaatatagcaattgtctacttaaaactgagaaataataccagcctgagagtttccaaagacctaggtcccaattaagatttcatctggcttctcatcaaggactagggtgccctcagtccccactcaggttatttttataacttaggccagtaaggactctcttgaagatttttttctttcagggtgatatcttgattccaaggacaagaagagaaagttcattatgtgctggttctgttctagaatgcatgtgaagtgttagcctcattttacaaagaagtggaccaaatacctgacaagaagcaacttaagggaagaagagtttaccgtggcttagtagtttgaggggatacagttcatcgtggtggcaagagtgggagatggctgatccaggcctgtgccaactcacctagctcttctagtgaagctccaccttctgatagttccacagccttccaaaagaagtgtcagcccgttggaaaccaagtgttcaaacataggagcctgtttgagacatttccccttcaaaaccacagtatctgggataatgtggtttctggtcagagcagattagagctctagtgggattagagctccagtgcttgtcccctgaatcaagggagagcaggtttctgttccctccacatggcagtggaaaggcccaggagtaataactttcttgataccacagagcattcaggatatacagtggtccacatctcttctgatcgctttttctaatctttgtctttatctgaatgttgcttttaaacaaatctatatggaaggttgggtacaaatgggtaaaaccgtgttatgctggtgctcaagaggcagaaacggagaccacaagtttaaggctagcctgatctacttagcctgatccaggccatcttactgagctacataataagatcctaccttccccccacccccaacccccaaacaaatctgtgtagtaaaaggccctcttaggaatatggcagatatgtttgtcagaacagcagaagtgtgtcccaaacaagataattctcagtacatttcttttatgcttgtcatttttttgttaaataacttgagcagaagtaatcttcaggttgtgtgacacccacctacattacagatttttaagtaccacgagttgtcagtgtttctaattggattggaatggattggatgttagaggacagggttcaaggcattcttttccctttaccattttattgtaagtttttcaaatgcacagagaagtaggaagtgcagaaggccccaggtaccatctctacacagtgctgcagtccttacctttctaatcttgcaggctttgtttgcctctatcatatcttgtttttttgtttgtttgtttgtttgtttgtttaatttccttccttctgtgatgctaaaggttgaacccagggcttcacaagtttggcaagtattctttcactgagctaacttcccagtccttatcctggaagttattattttttaaattatgtatgtgttttcctgcttgtctgtatgtgtaccatgttcatgtagtgcccagagaatccagaagagggcatcagagctcctggagctggagttatagactgagagctccccagtatgggtgctgggagccagactctgatcatctgaaagtgtagcaagtgttcttaaatgctgggctatctctccagcccctactctggaatttttaaaagtaatttccagatctgtcatttcacagccattcttcttgtccaccaaatgggtgtaccatcactccccgggtctcaagctcttcttcagagagaacatgatgagccttttggctaatgataagaaagcttttaaaagattttaactatcaccaggtggtggaggaggtggtgaaggtggtggcacactcctttaatcccagcacttaggaggcagagacaggtgggtctctgtaagtttaaggccagcctggtctataaagcaagttctaggacaaccagggctacagagaggaaccctgtctccaaaacaacaacaaaaaaaatgtaaaactatcatttattattaatcatctaattgtgtgtcaaattctgtgctaagtattttatatttgccgcgaataaataatattatataaatgccatcattctttcctgtttatagagtacaacacttgtgtaaggttgtattgctagtgtcttagtcagggtttctattcctgcacaaacatcatgaccaagaagcagttgggaggaaagggtttattcagcttacatttccacattgctgttcatcactgaaagaagtcaggactggaactcaagcaggtcagagagcaggagctgatgcagaggccatggagggatgctctttactggcttgcttcccctggcttgctcagcctgctctcttatagaaccaagactaccagcccagagatgacaccacccacaaggggcctttcccccttgatcattaaatgagaaaaggccttacagctggatctcatggaggcatttcctcaactgaagctcctctctctgtgataactccagctgtgtcaagttgacacaaaactagccagtacagctaaggaatagtgcagtttggaattgagtgcaaggtggcctgagtgcagccaggtgatgcttacatcactgctctctgggcttaggtctgtcccaggccttgttgaagagtttttgcatgttccattgcatctgccttttgccacacttacctgtgtgtggcagggtttgttcttctactcgtagccatggagcaggagtaaattgtaccatgtctactggtacaggaagggcaataaaaagggaagagatagtatagcatggtggcgagagagtgagaaaataagagcgaggctttgaattatgacagctcttctgaacttaccccgctctgctcttgccacccttctgtgctttcctctcttgtaagttgttattttactgaagaaaaaaatatgaaggggtcagggtgtgaccccgctcctgtagagctgcaaccccaacagcagtggttgaagtgtgattcaccagtagcagagccacagattgccatgtgtcttgtctttcttgtcgtgtcttttctttctttctttctttctttctttctttctttctttttttttttctggtgtcattccttctgtcttggtaagagagatagcaactctcttgttctcaatttggatgcctacccatctatggttgtcaccgaaggtgctacttttctgcacacagcagcagcgattttgaagcctgtgtcttgtttctgaggcagcctttgaaaggactccagctcagagaccatgaatctttttattcccttccatatctctttgctgctgtttttatgctctatccaagtgtcttctattctttgctcaacttgggcttatgggttagagagcagctgaagcagcagaggagtgggacaaagccgagtgaccttcagtgtttgaagcgtcactgggttcatcttgtgagggccgcatatatgacttgatatgagtctacatggtctttaaggaggcacattgtcagggggctggaaagatggctcagtggttaagagcactgtctgttcttctcatggtctagagttcaaatcccagcaaccacatggtggctcacaaccatccataatggaatcttctggtgtgcaggcatatatatatatatacatacatacatacatacacacacacacacacacacacacacacataaattgagcacatatatgtatagaataaataagtaaaatctttaaaaaaaaaaaaggaggcacattgtcttcttttcatccatgttgctctgataaaacactctgactagcagcttaaggaaaaagggtttaattttcaatttagttcaccgtttccaggatatggtccaccactgcagagaagtcaagttagcaggaatttgaagcagctgcttactgtaccctcaggagcaaagagaaatgagttggtgtgtacatgtacgcctgtgttcacttgccttttttatacagacccagacccagggaattgtgccactcagatttaggttgcattttccaatcatttatcaatcataatcaaccagtcaatcaatcatcaatcagataacctccacagactgtccataggcaaacccagtctagacagttccacacttgccctcctttctcagttgattctagagtgtgtcgagttgacaattaaaaagagctaccacacatatctactgagactcgggataaccaggtcacttaggaattagttggtggtggaaagaagaaagcctaggttctgattctaattgtgccaattctgacaagtgacctagataggtttatcccactctggattcttaaaaatgagtaggtttggttttttttttagtttatcttaattttaacatgttatgattgtgaggtatggagtggttttatcttcatcattaaaatcagggtaattttgagtatagaagagatgggagaagctattatgaaggtaggctagatttccatcctttaagtacagtgaaagcagaggaccacactggctgtcgttgtgttagtgctcttgaccacagtgtctcttctgtcacatcacttctgtaccgtcttaaagagaactcagtgttagaattatgaaggaaaatctgagaatgggatgaaggagtatcacagagcctgtcccaactctgggacaagtgtgagatgagaagccaggtctcaggtgactgggtcaagtgctcttgtccgtctcagtaactgcactgggcatcagcatcgttgaatcatggttctccctttcatttgtttgttcagtacctcaacatgctaaggacctgcgagggctacaatgaaatcatcttccctcactgtgcctgtgactcgaggaggaagggacatgttatcacagccatcagcatcacgcactttaaacttcatgcatgcactgaagaagggcagctggaggtaagagttccgtctgggactgggcgggagctctgtcaacggacactcggatactttctgtgttttagttccttgtggagcaaatgaaatgaaaactattgatgataataatcagtgagcccacattgatccttattgtactaggtccaaattatgcattttaatttttgtatgtgtatatggtgtgtgtgtgtgtgtgtgtgtgtatacttgtgcccatgccatggtgcatgtgtggaggttataggacaactctgtgcagtcattttctctttgttcacctttgtgtgggttctggggctcaaactcaggtcaacttggccagcaagcatttacccactgagtcactccagcagcctaagtttctgttgtcacagcctttccctgatgccatcagagtccctttgcctcagctacccagtattctcatacttaaactgtagaccttactctggtgttcttggctgtctagaaccaggtaatagcgtttgaatgggatgagatgcagcgatgggacacagatgaagaaggaatggccttctgttttgaatatgcgcgaggagagaagaagcctcgatgggttaaaatcttcacaccatatgtgagtgggagatgggaggcatgggaaaagtagattgggttttgaactttggaagtaaatcctagtgggaactaaagggaagggcacaagaacctggagctcacggaagcaacaaagtcagcgcagaggatttcctctccattgcctcaccgtagttggtgtgtgctgctgattgtttaagactgggtctcactagctagccttggctggcctggaatttgctaatgtagaccaggctagctttgaactcaaatccccctgccttccgagtgttgggattaaagacgagtgccactgtacccttgtatgctcttctccatagtgtgtctattagcctctgaccacaaacctttattcctttgttgatgaccataagagcacagatgaaccactttgacattttgtctatctgggattgtggaattcacaccctgtgcagtgtgtcgtagtcagcactaggaggagctagagaacattagatggtcatgcctgtggtttgtggttcctggcaggattttctgtcctgggtgggtttggaagatgggatgatagacttgaagttcaaaggcatgaccttgtgcctggtcttggggagtcagtgagtattgctacctttttttttccagttcaattacatgcatgaatgctttgagagggtgttctgcgagctcaagtggagaaaagaggtaattctaaagagttcttgaattaatttattcctcttcttgtctacaattcataggaccatgaccaaataccaggaccctcacctccatttctgtctttctaggaatattagttagagactgattatcccatgtgagccaggacattctcccagcgaggctggcctctggatggtgaatgggctatgcaaaaaagccctgcttctccccttgtgtagagggtgaacactggctgcaggctctcctatctctcatgacttcatggaccctcttctgcctgtttgtttgatttttgttgttgttgctgctgctgctgttgttgtttgtttgatttttaatcaataactctccatgctgttcctgacccaggagagcacctgtccagagttttagccatttgactggataagtcacagtagtgtctttcttcactaaccaagaaaataaatgtgggggaaattttttgctactgttgtttataggtgtcagtgctggagcagaatttagaaaactctgtctaaatacttggttacttactctgaaagaaaaatcagaaaatgaagaagtatagtcagtcacttggaagttggtgttcttgctctagtagaaagaacactgggctctggaagtcatctgggatttctcctgcttcttttgtctgtgattttgggcatagcaaccacctttttagatctgaattatctcttttgtaaaagagaaagactgagccaggtggtaaatattcagagtcctctgtgatgtgagcggctgtgttgggttgggattgttgaatccggttgtcagcgcgtgtgctgctcccatcgtgtcggagggttgtctccagatcggaggccctgctgctcctcagtaactcttttttttttttttttcctttcagaatattttccagatggcgaggtcacagcagagggatgtggccacctagcctttcctcatccctttatcttctctttgccctcagcctcttagccttttcgtctcccatgtcagacagtaaccattaacacaaaaaaagaaaaaaaggaaaaaaaaagtcactatgtcccaaagtcctaagctaaatattattaataacttcctgagaatttcccgtctctggaactgagctggtagagagcaggttgatagtgccagaagtccactgagatcagacacacaagcccagccaacacgccaaagtcatctttgtcgtttgacccgggcctcataccaacagactctccttgtactatatttttaaaactggaactatgaactccatccatttgcactgttcaagcatatatatgtatgtatgtatgtaaaaattatatatacacaaattagctgcacgtatatacatatatatatttctttttaaatttcatattgatggcagtaccttttttagcttgtgtttttacacacctttcacagaattcatgacctctctcttgctctctttattttgaaacaaactttaaaaaggaaaaaaaaatacagggaaaatacctctcctcatgaaggactcgaaaagtttacaacctgcttgggttttcttcccttttttgtattgagtacagtttctggctgttggtttgccatagagtctgaggatcgaggagtgtagtgtctttatcttcaagagggtgctgaggaggagaaaggccgtttctcaagagcagttgaggctgcagggagtctaaagacctagagtctcgattccaagtcattttccaagccatggtccatcgatcgacgttgagtccgtcctccatctccttcctgtttctttagggtcttttattatgctcccttttaactgacccaaaacagttcagggtaatctgaggaagctgttatagtaggaaactttttcttctgcaacaggggttgtatcaggactaaccctgacatcagaggttggacagatggaggaaagggaggatggaagctgtgcctcagatttataagggccttacctcttccattcctgtccagtaaccatctattttacatcctctgtgagttctttaaacagctgtacgtggaaggagtgtcttgggtaaacttagagtctgggttgctgccaaccaaatcagagccctgttcatgacagctgagggcccaagaagtgggagtatggtcaattttagttcaccaccaccatttacttcaaaggagactgaagagaaatctcttaaagagttctttacctggagctggggctggtcccgaggctgaggctggggccgggagtgtttgcctagcctgcataaagccctcaattccatccccagcaccacataaaatttgggtgttggggtattgtagcacacacctgtaatctcagcacgtgggaggggaatgcaggaaactcagaattttcaagtccacctctgctaactaatgagttcaaggctatcctggatcacatatctcaaaagtagaagagttccttacctgcccctgcacttagacctcctaggacctaaaagcaacatttgggacagaggccaggctggcactagagtaatagtctcaaaccttgagtgtaaagaactctgaggttaggtacaactaaaacacgtctttgaaactctttatctacttttccttcgatattgaagcctccacaggcttcgtctttggctttatgtagctgaaaggcagccagaattggatgtagttggcagtgttggatttggtttaaagtttctttcatgccttggttttgcagagcattcattatgaggctacttttctgtctccattattctggcagccacttgtcgcaggaaggtgtaaacacaccttttaggatagtctttccctcccctgtccaaacccgtgggaccacaaagtacaaaatatagtagtgtttaaagttgaaaagggcaatacctgatttggaggctttaatcaggatcaactctccctcttggctttactaatgagtctgagtaccttaagagggggcgagttgatttcctctccaagatgctctggaggccagctgtgttcaaactgtaaaaagagcaacattgcagctaattccctcaggaagagagccttccagaatagggacagggctttggaagtcctgaagagtcagccccactgtgttggggttaacagaatctgtaggaacaccctgctttaggtagtcttcctaccagaacacccagctgcagcagggagctgggaagaagcagctcccagggtctcccagtggagctgcagtcctggaagaggaggtcacggtggcctagaggcccacagaggcccacagggatcaagttcttttgcatgaagcagtgttagatgtaactactccctcccccaaacccctacccttcctttctctaatcccttctatgtttcttagacctggcttctgcccaggaaggcatctacaggttttttgggcagtttgtctctggggaagggacttcccctcccagcttcactccagcagaatcttcctggtctccaactgttctttcctccacgaggagtttctgttctctgatactaaaactcaagagatctttacggagcaggaaactacttagtccctgagaagccaggtgctctaggaagctttgcttgggcagtgctttgagcttgccgctctttgtacttttattccggtcttcgtctctctgccttccccttgcccttgcggaggcctcagctcagcacagctacagtcagtgttcagggcagttcccaggccttgacagagctctcagggaggaacaaggtaaatgctctagcatcctcttgcctggcccatttaattttatcctttagttacctgggccagtagctttgaattatcccttcattgctccaaacccgatgcctgaagcagcaaaatagggcactgataagagggagcacctctctcatctcagagtttccagcttaagggccagctcctagaaagcagtcttcttaaagggacctacatgcatttgagtttagctgaagtctccaggaatggaggtcctttctgccctcctttccattctgctggcttcagcacactgctgctccttcaccagttggatgggttgctttaacttctttttggaggagcagcagtgtggctgaatacttagcgccagcgggagggagaacgcttctttagtcctccgtcttggattcttcttcctctaaccctcagcatatctgccagggctcctttccctggatagcagcagcttctttctcagcagtaactgagggtgcatggaaatcgggctctggggaggagcgacaccagagggactgatcctggtaggagcacttggttagctgctgaccatgggtgccaacttgttattatgcccccttgtaagctgctgagctgggcttcagtttttcccaggccatgcacacttataatttatttgagagaaactaattgtattttcactgcagtatcttgtacttttatttgtgatttacaaaatgtgaagagaaagtgcagagacccactggctccagtgtttctccaaccctgctctagagctaaccactctaagattgtttggtaatgttacttagtgtaattaattgtaacatattcttttaaataaattgatttattgatgaaacaattctttggtttcctagactacaaatcctttgggttatgtgggaagaagtaaagaggggcctttgacagttgagttggagcagctagtctgaaaatgagaggggccgtctaactgcttttcccagctaacccggggaaacagagtcaggggaggaaggaaggagctgctctttccccatggctccctcggaaatcccacctgcttcctcacttctcagttgttgcgctctcctttgcaaagtcttgtgactattcacaagactccttcaccagccaagcacaggcaaaacctggcagagcttttgggacatggtatgtcccacctgacccccagaatatgtgtatctcatttataagtaactagggaaatattttatctctcccctaatgagtgcctaaacaataccatgtagtctgggggttgtgatcttcctctgatcatgtgcctgagaataaaagtggccttgctgtccttggtcttacacagagaacccaggtaccaggccacctccttactcagaagagagtctgctctccaaaaagcccagcattgtagtgggtcagacatttccattttgtgtgaatcatcatttcatttcttggtattttcatagccctttaccacatgctttggtccttagttgaccctaagaacaaggaccaccaagtttgacacattttgtttggatttgggtcaagacatttttcacagtctcattcacctagtacttggaatctaataaatactgatcactagatatgtttaaaaaaaaactctttaataaagaaccataaaaagggtagaattatagaggctgaagtaacagcattagtaaatctatgggacactgcctgtgaaatcgcagatacaggaatgctcacagcctcacaggggagacaggcccatgaaacacaaggtttcagtgctctagggatatcataaaagacccaggtatgatggtatatgcgtataaccccagtacaggacacaggaggtttaggagttcagggccggcttcagctacatagcaagttcagggccagcctgggccacataagaccctgttctcaaaagcatggggaagggcaagatggtccagtaggtaaagatgcttgctgccaaggctgacaacctgagttagaatcctaggccccacatggtggaaagagaaaactgatttcacacaagttatcctctgcacacatgtgagttgtattgcacgcacatatacattaaatataataaatcgtaagatttacagatgataaagggaaatcttaaagtgctatgtaatgtaaatgatttaacacgagcaagatttcatcaagcaggtatcgagcagtattggccattatgtacaagaccactgcagcatgcagagtgaagaagcgtggggtaagaaaaaaccagacttgtccagagcacagtgaatagttctgtgtcagcggaatatagggcatgttcaagaatgcaggaggaggtaaggattctcccagtcccttgtttttatagtgtgtgtgttcgaatatgtgtgtcacagtaaacgtaggttaaagaacaatttgtgggagttgattctccttccagcatgtggaagagggaatgaattaggagactggtataattattatgttaagaagcagacacagtaataactgaaaggaagaaatagacataaggagaaattatagaaacagaatcttgtgatttaacgacaccgaatttacgtgaaatgggtgaagggctcccaagctctgtgtgactagagaatcaaactattttaggagttgagccaggccaggtggatgtgctataatgccagcattcaggatgtaattgtaggataaccaggaatccaagatcatgtgtgactatgtagcaggtttgaagcccgactgggctgcatgggattctatttcaaaaaataaagtggaagagggcagtacttacaaggcagagaggcaagtagagtccaagccagcctgatctacagagttccaggacaaccagggctacacagaaaaaccctgtctcgaaatgccaaaaatcaaagaaaaccaaataaagtatcctagagagatgcctattggttaggagctctgtccgatcttgcagaggacccaggttcagttcccaccacccacacagcagctcacaggcacctccaactcaagctccggggatccaacctccttgctggtttctttgggcatcaggcaaataaatatgcagcccccaaatatacatgtagacactcacacataaacatcttaaagctggccatggtggcacaagcctttaatcccaacaggtagggagcagagatagtggtatctttaagtttgaggttagggtggtctgcagagttagttccaggacagccagggctacacagagaaacttggtcttgaaatatcaaaaataaataaatcttaaccaaaaaagaaaagcaaaaagccccaagactttggagggaacatgttttagtattcgactactcagatttacacacagtggaaaatccagtatagatagctaggagtcactttttaaaaaaacgtgggggtatttttgccttcttgcacaggtatgtgcaccacatgcatgcctagtgcagtggagcccctggaactggagttacagtattgagctgctgtgtggtggtaggaattgaagcagccagtgcttttaactgctgagccaccttctgctccaggagtcatttctttttagagattttttttttatgtgtgtgcatatatatgagttggaatcctctggtactagagttagagttgtgtcctctgcaagcatggtaaacgcttttaactgataaaccatctctccagccccactggtcatttcatcattgtttactaactagctcctagtgttgagtacctatttagagtactagcagtgaacaaggcagttgtcattcagatttggccgtgagtgggtatatgtggtagtgtttactaataggaaaactaagagaaaaggtagcaacttgttcttcctgagcagatgaaaggacccagtccacggagggaggagatcttgcatttggcaagaggaagctgactctgggagaagtacagtgaaccctgtgtaggtgcacagctgccatcccagaacatgggaagtggggacaggaagaacgggagttcaagtccattccagaaattgtcctccaactgccaccgcacgtgccggacatgctcattgccacacatgcatgtgtgtgtgcacattaaatgaggctgagaccggtggtggttgtgcacgcctttaatcccaaacactccagagacaggtggatctgagtttgaggccagcctagtctatagagagtccctgaactgctagaactatgcagagaaaccctgtctagaaaaacctaaataaattaataagtaataaaacaaagggtgaaaagtgagaaagctttcctaagaaccagaatgtgaggccagggctgtccaaatgctcatatttagagatcattgaagcttggccatgaagggattcttggatcacagatactcaaagaagtgagtggtatggatccacacatcctcacagtgttatgtgtatttcccagcactaaaaatacagaaaaggaagagtattgaacccgtccagggtcttccctgccgcggtctcgtcagctgtaggttcccttgggtttggtcctgtctcttccattaacatgacactctttttccctcagcaagttataaggagcatacaatagaggcagtccctgaggagttaccacatctgcataagagcccaaagacaccaggagttaggaggcacagtcattctgggagagtctttttgagctaaaactcaccatatttgttctgacctacaaactgttgaaatagctctggggaaagtttacaaacactaaccaccagctgctattggccttacacttgctgcttctcgttgtgctgccaaatgcatgcacacacaacttgtcactaagatttcaggctctttgttactggctaaacatcctgcctggagccttactgtcaggcttttaagcttcattgttgttccaaggttacagcttgactggatggagagcatgtccagagaagttgagctgagatgggctccctaaatggctggcaccatcccatggacccacactgaatgaagaaagatacagactctgctctagagctataaacaagccacttttcataagaacagcgaggagtacggacttcaccccattcctgacccttaccacattaatatttgtttctccccaaagccacacgcaaaaagagaatctccatatagtgtttcttgtgtgcctgcctgcctgatttctgtctgtcccaggctggcctcaaactcctgaaccctttgcctcaatcccccaagtgctggaattgcagccatgtgctgccatgctctgacttcctgtgaactattagaggctgtgctaagaagagaagagtgaggggcagtggggtgagctgtgaggtttgacccatggctgcaggttctcttttgcccttttatttacccctttccttcctcttcttacttccttgatttctttctcatttttctgtattggtgtagagagagtcatgtacacccttgccaagtgttttgccactgagctacatccccaggctgcagtcctattttcactgaacaactctgaccagaggccagatcataactggagggggcaagtttctaaggcttggtggagaggagctacctacaagcaggtgggtggtgctataccacatgatcgctgtgggccaacagcagttcttaggaaagaaattgactttcagaccttctgctggatggatcactacaacggcctgtttgatactctggagttagacaaatgttcagcttccgtgtttttctcttttctgtcattgtgaccctgggaaaaggagttagccttcaaaatatccaattccctgcctacaaaattatatcctgccccacagggttgtggagagtaaggacagcagtagtattaaagccagctcccagtgtccctgaaactacaagaccccagccttagaggggtgtggctggacacagggagaggcctcctgaccagtgcttgcctctgcactcacctgcatatcctttcccctgggcttgatgtggaagaacattctagaattaagccccaaagatgagcaggtaggatcatgaagttatgggcaagatctgaacacagagaagacttggccttccacgaaagttttgccaaactatagtctctccctccctcccccttccccagtgtgagcaccctactctcaaccttctacgactcatggttgatgctttcaaatgttttttctttatttagacagaaaagaccaactctttaaaagtaaaactcaataaataagttaagagtagagaactgtcagaaattgattcccccttcttatcctttaccctccccaccccaccccatgtttttttccctagaacctcttcctaaagaaaatgatcaggtaataaacccctttagccctccccatacccttcccccaaatacccaattacccccaaagcaaagggagaaatcaagagaggaaaaaaagaaaaaaacaaaatccaagggcagcattgtctaaactcccagaaagagagatggcagcgtctggctgggtgggctgattaaagccctggtggtcatggtatttacatggaggggccagcagagactgtaaacatatttagggactcagggagaggtcttttcctcatgaaaggagggtctctgtgactgactggcagagaggcagccctcaggcccccccacacacacacacacaccctccttggagggggctcttggggaaggcagtgagttttagggctgagagcccggggtttggagatctcctacctctagctgagggtggggagaaacgtgggagccagcttctgagaaggcagggcttctgagaaggccctgccgtggggagaggcaagggggagggtgcttgggaaagaggagagtgtcctgctgcccttccgagcctgcacagctactgcaggccactgaggggaggcaagggccagcagtgggcacagaggctcatccaggagccttagcagaaggcagatgcccctgaaccttcaagcctattccttgcttcctcacaaaggccaaaagggcactggggaggaaataggctcttgaagccagggaagcaaaaccatggcccttcagagaggcaagatggtgggagtgagccaggtcctgggccctcggaccatgaagcagctcttgccccagagtccaatcaaggcctggggcagatgtgcagagaaggccagggccagtcataggaagagggtatactgaagtgccccttcctctggtatctccagacctgtgaaggaaggaaatataggtgaagcacagggaaggtttccagtactggtcacaggttctgggtaaggttggggtggcagggagtgatggcacctatgatggggcctcctgagaaaggcaggccatcagaaaggccttgtcccagcagacccatctgctcacctccccatccctccagctatgagggcatagagcaaggatagagaaacagggcaggaggcatggaacagtacagaaactgaagctattgggaagaagtaggtcaaaatgactggaagacagctagatggagagaagggcgaagaaatgagacagacaggcaggcagaagtaactagaagggaggcgctgggggtgcatggacaagacagacacccggcgaggggagcatccgcagagactgggatgactcagaggggcttagggatggagtctcatgggtgacaccactcccagcccttagcgttctcattcctttttggaaaggaacataggaagcaaaagaacaatgcacagaccacagaccacagtcaccaaccactgttgaccacgcacatcccgcgagctgccccggccctgagcctgggctgggggctgtttccctccatagcccctccccagataacaaacaattggctccaaagacaacacgctcgttccatgcaacttacaggggcccggagcaggggtccgggatgggggcttcagccgacaatggacacggaccctgggctggggacccccagggtggggggagttaagcagccaggattggggggaaaggggagaaacagaaatgtgggtattgttcttgggttgtgatttttcaggtttggtccaagggagattaaacaaagttaggaagggctaccggtctgtgccccaaggtcagatggcagcctacaatgggctggggactcctcagtatgattctacttcctcctccaaaccaagccacacccactcccatctgtctggtgttctgccccaaggtccactgccctgggaaaaccacctgcagttcagggcaatgggaactgctgtgtctctgcctctctggagatcaggtttcaaaatcaagttgctctgtgaccctccagttctccaaaccagtctcctggcccccaaaacctacaatactaattccatccaacccaaaagaaaaccagaaagagaaagacacagacacatggacgctgaccagacaaacaagaccaaatactgtggaaaactctaggagcagacacaggtgtagacttgtctcctctggggtggttgtgtgtgtgtgtgtgtgtgtgtgtgtgtgtgtgtgtgtgtgtgtgtgtgtgtgtgtgtgttgtacatatgcacacacatgtctatgtgggtaggagacacaactgactgaacaataatagctgggtagtggcccaaatcccttttcctcgtgtccagcatcagggtggggtgggtggtagtgaaggggtagggcattcacttaaggggtctggctgcagtgtgtggatccggacattgaggtcacagaacaggagcagcacccacctgaagcccttagtagggcctgtttgcatccttaggccgctttagctggactttgaggcgcttcatgccaatctggaaaccgttcatagcctggatggcagcctgggcactggccggattgtcgaaactcacaaagcctgaggtgagaagggcatgaggcctggcccagccctccatcactgtcctgcctgccacagggcccacttgtgtggtttcccaccctacttcttccgggcatctctaataccatgaaacctgcctggcacatagtaggcattcagaaatcgtttgttgatgatagatttaatgagtgaatccagtccagccattcacacaaactaggatgtactttccagtattctttgaagagtggccccttcctcagcctgagagctctcaaaaacattctttttggaagtcccataggtgatttttgaaacaagggactgtaggacgcttccaaagacaggaaaacaacagaaagaaacctatgtccttttgaaatctagtatttccacactacatgaaaggaggttgggttccgtgtgtgtgtgtgtgtgtgtgtgtgtgtgtgtgtgtgagaaggtgagagagagagagagagagagagagagagagagagagaggaggatagaatctaggacctcatgccactaaatgcactctgatctctgaactacaatctctagccccaaggctgactcttaaggaagatgaagctgtgacttttctaggcttgagtggaaactatgggatggtgggtgtggcagagatggttcttttttggccttggatacacaggctttcaaatacagagttcgttgaggccctaaatgccttcagatgtgacgaactcagtcctaagagtccatactctgtcttttggatcatcatattcttaccaaaacatttgctctgattggtggcccggtcaacaaagactttggctgagatgacatgaccaaaagggacaaacatctggaggatctctgagtctgtgaactcctggggcaggtggtagatgaagatgttgcagccatcagggcctgggtggcagcagagacagaaggggtagctcagagactgggaagtgcagactgcattggcagagatgagggtgacagcggccaccagtcctggccccagcagtgtgggccagggctccccactccttcagtcctcacacacaagcccagagcctgggaaagagccatcgggagtacccaagcccacacatgggcgttcttatccctgcaggttctcagctatcaggaccctgccctaggctggcaccttcccgttgctgctgctgttgctgttgctgctgctgctgctgctgctgttgctgaggtggtggtgggggctgctgggcgaccagggctggaggctgcgggaacgcaggtgcaaccaggctgtaggctgcggggtacgctgctgaggtggtgaagacagagaaagctaatgggttcccctgactcggcacaaccaacctagtctcccccctcagcccaaaccagtggaatccacaggcctagaggacgtcagggatgaggcttcctcagacaagtcctgagtgtgtgccactctcacaagcacagcttctcaggaaggcctgagggtgtggttggcagagaatggagaagctcagactatagttcctagatgggtttccctatgcgagtccgcccacctgggcagggcctgggctagagagcctcacctgtgtagtgctgcattcctgcataggcctgctggagagggtccacgggggctgccgggctctgggctgcagagagcatcacaagccatgagtgggcctgggacattatgggaaccccgccagcacttctctcagcagacagagcctcatctggggggtggggtgagatgagaagggaaatgcatgtggcagtaggcaagtcccgagactgacatgccactttagtcaccatgccaagtaagcctcagctgccctagccaagaacccaaagaatgcctgagctcaggagccatgcctttaattccatgctcagggaagagctagg

SEQ ID NO: 1430 - DNA, 5030 bp, Mus musculus
atgggactgtttttttccctttttccccttaggaacggcgtgaatgttgagggggcgacacacaagcaggtggtggacctgatccgagcaggcgagaaggaattgatcttgacagtgttgtctgtacctcctcatgaggctgataacctagatcccagtgacgactccttgggacaatcattttatgattacacagaaaagcaagcagtgcccatatcggtccccacatacaaacatgtggagcagaatggtgagaagtttgtggtatacaatgtttacatggctgggaggcagctgtgttctaagcggtaccgggagtttgccatactgcaccaaaacctgaagagagaatttgccaactttacatttcctcgacttccaggaaagtggccattctcattatcagaacaacaattggatgcccggcgtcgtgggttggaagaatatctagaaaaggtgtgttcaatccgagtcattggtgagagtgacatcatgcaggaattcctgtctgagtctgatgagaattacaatggtgtgtctgatgtagaactgagagtagcactaccggatggaacaacggttactgtcagagttaagaagaacagtactacagaccaagtgtaccaggctattgcagcaaaggttggcatggacagtacaacagtgaattactttgccttatttgaagtgatcaatcattcctttgtacgtaagctggcacctaatgaatttcctcataaactctacgtccagaactatacatcagctgtgccaggcacttgcctgaccattcgcaagtggctctttacaacagaagaagaagtcctcttaaatgacaatgaccttgctgttacgtacttctttcatcaggctgttgatgatgtaaagaaaggttacattaaagcagaagagaaatcttaccagttacagaagctccatgaacaaaggaagatggtcatgtacctcaacatgctaaggacctgcgagggctacaatgaaatcatcttccctcactgtgcctgtgactcgaggaggaagggacatgttatcacagccatcagcatcacgcactttaaacttcatgcatgcactgaagaagggcagctggagaaccaggtaatagcgtttgaatgggatgagatgcagcgatgggacacagatgaagaaggaatggccttctgttttgaatatgcgcgaggagagaagaagcctcgatgggttaaaatcttcacaccatatttcaattacatgcatgaatgctttgagagggtgttctgcgagctcaagtggagaaaagagaatattttccagatggcgaggtcacagcagagggatgtggccacctagcctttcctcatccctttatcttctctttgccctcagcctcttagccttttcgtctcccatgtcagacagtaaccattaacacaaaaaaagaaaaaaaggaaaaaaaaagtcactatgtcccaaagtcctaagctaaatattattaataacttcctgagaatttcccgtctctggaactgagctggtagagagcaggttgatagtgccagaagtccactgagatcagacacacaagcccagccaacacgccaaagtcatctttgtcgtttgacccgggcctcataccaacagactctccttgtactatatttttaaaactggaactatgaactccatccatttgcactgttcaagcatatatatgtatgtatgtatgtaaaaattatatatacacaaattagctgcacgtatatacatatatatatttctttttaaatttcatattgatggcagtaccttttttagcttgtgtttttacacacctttcacagaattcatgacctctctcttgctctctttattttgaaacaaactttaaaaaggaaaaaaaaatacagggaaaatacctctcctcatgaaggactcgaaaagtttacaacctgcttgggttttcttcccttttttgtattgagtacagtttctggctgttggtttgccatagagtctgaggatcgaggagtgtagtgtctttatcttcaagagggtgctgaggaggagaaaggccgtttctcaagagcagttgaggctgcagggagtctaaagacctagagtctcgattccaagtcattttccaagccatggtccatcgatcgacgttgagtccgtcctccatctccttcctgtttctttagggtcttttattatgctcccttttaactgacccaaaacagttcagggtaatctgaggaagctgttatagtaggaaactttttcttctgcaacaggggttgtatcaggactaaccctgacatcagaggttggacagatggaggaaagggaggatggaagctgtgcctcagatttataagggccttacctcttccattcctgtccagtaaccatctattttacatcctctgtgagttctttaaacagctgtacgtggaaggagtgtcttgggtaaacttagagtctgggttgctgccaaccaaatcagagccctgttcatgacagctgagggcccaagaagtgggagtatggtcaattttagttcaccaccaccatttacttcaaaggagactgaagagaaatctcttaaagagttctttacctggagctggggctggtcccgaggctgaggctggggccgggagtgtttgcctagcctgcataaagccctcaattccatccccagcaccacataaaatttgggtgttggggtattgtagcacacacctgtaatctcagcacgtgggaggggaatgcaggaaactcagaattttcaagtccacctctgctaactaatgagttcaaggctatcctggatcacatatctcaaaagtagaagagttccttacctgcccctgcacttagacctcctaggacctaaaagcaacatttgggacagaggccaggctggcactagagtaatagtctcaaaccttgagtgtaaagaactctgaggttaggtacaactaaaacacgtctttgaaactctttatctacttttccttcgatattgaagcctccacaggcttcgtctttggctttatgtagctgaaaggcagccagaattggatgtagttggcagtgttggatttggtttaaagtttctttcatgccttggttttgcagagcattcattatgaggctacttttctgtctccattattctggcagccacttgtcgcaggaaggtgtaaacacaccttttaggatagtctttccctcccctgtccaaacccgtgggaccacaaagtacaaaatatagtagtgtttaaagttgaaaagggcaatacctgatttggaggctttaatcaggatcaactctccctcttggctttactaatgagtctgagtaccttaagagggggcgagttgatttcctctccaagatgctctggaggccagctgtgttcaaactgtaaaaagagcaacattgcagctaattccctcaggaagagagccttccagaatagggacagggctttggaagtcctgaagagtcagccccactgtgttggggttaacagaatctgtaggaacaccctgctttaggtagtcttcctaccagaacacccagctgcagcagggagctgggaagaagcagctcccagggtctcccagtggagctgcagtcctggaagaggaggtcacggtggcctagaggcccacagaggcccacagggatcaagttcttttgcatgaagcagtgttagatgtaactactccctcccccaaacccctacccttcctttctctaatcccttctatgtttcttagacctggcttctgcccaggaaggcatctacaggttttttgggcagtttgtctctggggaagggacttcccctcccagcttcactccagcagaatcttcctggtctccaactgttctttcctccacgaggagtttctgttctctgatactaaaactcaagagatctttacggagcaggaaactacttagtccctgagaagccaggtgctctaggaagctttgcttgggcagtgctttgagcttgccgctctttgtacttttattccggtcttcgtctctctgccttccccttgcccttgcggaggcctcagctcagcacagctacagtcagtgttcagggcagttcccaggccttgacagagctctcagggaggaacaaggtaaatgctctagcatcctcttgcctggcccatttaattttatcctttagttacctgggccagtagctttgaattatcccttcattgctccaaacccgatgcctgaagcagcaaaatagggcactgataagagggagcacctctctcatctcagagtttccagcttaagggccagctcctagaaagcagtcttcttaaagggacctacatgcatttgagtttagctgaagtctccaggaatggaggtcctttctgccctcctttccattctgctggcttcagcacactgctgctccttcaccagttggatgggttgctttaacttctttttggaggagcagcagtgtggctgaatacttagcgccagcgggagggagaacgcttctttagtcctccgtcttggattcttcttcctctaaccctcagcatatctgccagggctcctttccctggatagcagcagcttctttctcagcagtaactgagggtgcatggaaatcgggctctggggaggagcgacaccagagggactgatcctggtaggagcacttggttagctgctgaccatgggtgccaacttgttattatgcccccttgtaagctgctgagctgggcttcagtttttcccaggccatgcacacttataatttatttgagagaaactaattgtattttcactgcagtatcttgtacttttatttgtgatttacaaaatgtgaagagaaagtgcagagacccactggctccagtgtttctccaaccctgctctagagctaaccactctaagattgtttggtaatgttacttagtgtaattaattgtaacatattcttttaaataaattgatttattgatgaaacaat

SEQ ID NO: 1431 - protein, 442 aa, Mus musculus
MGLFFSLFPLRNGVNVEGATHKQVVDLIRAGEKELILTVLSVPFADNLDPSDDSLGQSFYDYTEKQAVPISVPTYKHVEQNGEKFVVYNVYMAGRQLCSKRYREFAILHQNLKREFANFTFPRLPGKWPFSLSEQQLDARRRGLEEYLEKVCSIRVIGESDIMQEFLSESDENYNGVSDVELRVPDGTTVTVRVKKNSTTDQVYQAIAAKVGMDSTTVNYFALFEVINHSFVRKLAPNEFPHKLYVQNYTSAVPGTCLTIRKWLFTTEEEVLLNDNDLAVTYFFHQAVDDVKKGYIKAEEKSYQLQKLHEQRKMVMYLNMLRTCEGYNEIIFPHCACDSRRKGHVITAISITHFKLHACTEEGQLENQVIAFEWDEMQRWDTDEEGMAFCFEYREKKPRWVKIFTPYFNYMHECFERVFCELKWRKENIFQMARSQQRDVAT

SEQ ID NO: 1432 - DNA, 1738 bp, Mus musculus
atcatgcaggaattcctgtctgagtctgatgagaattacaatggtgtgtctgatgtagaactgagagtagcactaccggatggaacaacggttactgtcagagttaagaagaacagtactacagaccaagtgtaccaggctattgcagcaaaggttggcatggacagtacaacagtgaattactttgccttatttgaagtgatcaatcattcctttgtacgtaagctggcacctaatgaatttcctcataaactctacgtccagaactatacatcagctgtgccaggcacttgcctgaccattcgcaagtggctctttacaacagaagaagaagtcctcttaaatgacaatgaccttgctgttacgtacttctttcatcaggctgttgatgatgtaaagaaaggttacattaaagcagaagagaaatcttaccagttacagaagctccatgaacaaaggaagatggtcatgtacctcaacatgctaaggacctgcgagggctacaatgaaatcatcttccctcactgtgcctgtgactcgaggaggaagggacatgttatcacagccatcagcatcacgcactttaaacttcatgcatgcactgaagaagggcagctggagaaccaggtaatagcgtttgaatgggatgagatgcagcgatgggacacagatgaagaaggaatggccttctgttttgaatatgcgcgaggagagaagaagcctcgatgggttaaaatcttcacaccatatttcaattacatgcatgaatgctttgagagggtgttctgcgagctcaagtggagaaaagaggaatattagttagagactgattatcccatgtgagccaggacattctcccagcgaggctggcctctggatggtgaatgggctatgcaaaaaagccctgcttctccccttgtgtagagggtgaacactggctgcaggctctcctatctctcatgacttcatggaccctcttctgcctgtttgtttgatttttgttgttgttgctgctgctgctgttgttgtttgtttgatttttaatcaataactctccatgctgttcctgacccaggagagcacctgtccagagttttagccatttgactggataagtcacagtagtgtctttcttcactaaccaagaaaataaatgtgggggaaattttttgctactgttgtttataggtgtcagtgctggagcagaatttagaaaactctgtctaaatacttggttacttactctgaaagaaaaatcagaaaatgaagaagtatagtcagtcacttggaagttggtgttcttgctctagtagaaagaacactgggctctggaagtcatctgggatttctcctgcttcttttgtctgtgattttgggcatagcaaccacctttttagatctgaattatctcttttgtaaaagagaaagactgagccaggtggtaaatattcagagtcctctgtgatgtgagcggctgtgttgggttgggattgttgaatccggttgtcagcgcgtgtgctgctcccatcgtgtcggagggttgtctccagatcggaggccctgctgctcctcagtaactcttttttttttttttttcctttcagaatattttccagatggcgaggtcacagcagagggatgtggccacctagcctttcctcatccctttatcttctctttgccctcagcctcttagccttttcgtctcccatgtcagacagtaaccattaacacaaaa

SEQ ID NO: 1433 - protein, 267 aa, Mus musculus
MQEFLSESDENYNGVSDVELRVPDGTTVTVRVKKNSTTDQVYQAIAAKVGMDSTTVNYFALFEVINHSFVRKLAPNEFPHKLYVQNYTSAVPGTCLTIRKWLFTTEEEVLLNDNDLAVTYFFHQAVDDVKKGYIKAEEKSYQLQKLHEQRKMVMYLNMLRTCEGYNEIIFPHCACDSRRKGHVITAISITHFKLHACTEEGQLENQVIAFEWDEMQRWDTDEEGMAFCFEYREKKPRWVKIFTPYFNYMHECFERVFCELKWRKEEY

SEQ ID NO: 1434 - DNA, 5303 bp, Mus musculus
atggcggacgaggacggggaaggtattcacccctcagccccgcaccggaatggaggcggcggcggggggtctgggctccactgcgccgggaacggtggcgggggaggcggcggcccgcgggtcgtgcgcattgtcaagtccgaatccggctacggcttcaacgtgcggggccaagtgagcgagggcgggcaactgcggagcatcaacggggagctgtacgcgccgctgcagcatgtgagcgccgtgctgcccgggggggcggccgaccgggccggggtgcgcaaaggggaccgcatcctggaggtgaacggcgtgaatgttgagggggcgacacacaagcaggtggtggacctgatccgagcaggcgagaaggaattgatcttgacagtgttgtctgtacctcctcatgaggctgataacctagatcccagtgacgactccttgggacaatcattttatgattacacagaaaagcaagcagtgcccatatcggtccccacatacaaacatgtggagcagaatggtgagaagtttgtggtatacaatgtttacatggctgggaggcagctgtgttctaagcggtaccgggagtttgccatactgcaccaaaacctgaagagagaatttgccaactttacatttcctcgacttccaggaaagtggccattctcattatcagaacaacaattggatgcccggcgtcgtgggttggaagaatatctagaaaaggtgtgttcaatccgagtcattggtgagagtgacatcatgcaggaattcctgtctgagtctgatgagaattacaatggtgtgtctgatgtagaactgagagtagcactaccggatggaacaacggttactgtcagagttaagaagaacagtactacagaccaagtgtaccaggctattgcagcaaaggttggcatggacagtacaacagtgaattactttgccttatttgaagtgatcaatcattcctttgtacgtaagctggcacctaatgaatttcctcataaactctacgtccagaactatacatcagctgtgccaggcacttgcctgaccattcgcaagtggctctttacaacagaagaagaagtcctcttaaatgacaatgaccttgctgttacgtacttctttcatcaggctgttgatgatgtaaagaaaggttacattaaagcagaagagaaatcttaccagttacagaagctccatgaacaaaggaagatggtcatgtacctcaacatgctaaggacctgcgagggctacaatgaaatcatcttccctcactgtgcctgtgactcgaggaggaagggacatgttatcacagccatcagcatcacgcactttaaacttcatgcatgcactgaagaagggcagctggagaaccaggtaatagcgtttgaatgggatgagatgcagcgatgggacacagatgaagaaggaatggccttctgttttgaatatgcgcgaggagagaagaagcctcgatgggttaaaatcttcacaccatatttcaattacatgcatgaatgctttgagagggtgttctgcgagctcaagtggagaaaagagaatattttccagatggcgaggtcacagcagagggatgtggccacctagcctttcctcatccctttatcttctctttgccctcagcctcttagccttttcgtctcccatgtcagacagtaaccattaacacaaaaaaagaaaaaaaggaaaaaaaaagtcactatgtcccaaagtcctaagctaaatattattaataacttcctgagaatttcccgtctctggaactgagctggtagagagcaggttgatagtgccagaagtccactgagatcagacacacaagcccagccaacacgccaaagtcatctttgtcgtttgacccgggcctcataccaacagactctccttgtactatatttttaaaactggaactatgaactccatccatttgcactgttcaagcatatatatgtatgtatgtatgtaaaaattatatatacacaaattagctgcacgtatatacatatatatatttctttttaaatttcatattgatggcagtaccttttttagcttgtgtttttacacacctttcacagaattcatgacctctctcttgctctctttattttgaaacaaactttaaaaaggaaaaaaaaatacagggaaaatacctctcctcatgaaggactcgaaaagtttacaacctgcttgggttttcttcccttttttgtattgagtacagtttctggctgttggtttgccatagagtctgaggatcgaggagtgtagtgtctttatcttcaagagggtgctgaggaggagaaaggccgtttctcaagagcagttgaggctgcagggagtctaaagacctagagtctcgattccaagtcattttccaagccatggtccatcgatcgacgttgagtccgtcctccatctccttcctgtttctttagggtcttttattatgctcccttttaactgacccaaaacagttcagggtaatctgaggaagctgttatagtaggaaactttttcttctgcaacaggggttgtatcaggactaaccctgacatcagaggttggacagatggaggaaagggaggatggaagctgtgcctcagatttataagggccttacctcttccattcctgtccagtaaccatctattttacatcctctgtgagttctttaaacagctgtacgtggaaggagtgtcttgggtaaacttagagtctgggttgctgccaaccaaatcagagccctgttcatgacagctgagggcccaagaagtgggagtatggtcaattttagttcaccaccaccatttacttcaaaggagactgaagagaaatctcttaaagagttctttacctggagctggggctggtcccgaggctgaggctggggccgggagtgtttgcctagcctgcataaagccctcaattccatccccagcaccacataaaatttgggtgttggggtattgtagcacacacctgtaatctcagcacgtgggaggggaatgcaggaaactcagaattttcaagtccacctctgctaactaatgagttcaaggctatcctggatcacatatctcaaaagtagaagagttccttacctgcccctgcacttagacctcctaggacctaaaagcaacatttgggacagaggccaggctggcactagagtaatagtctcaaaccttgagtgtaaagaactctgaggttaggtacaactaaaacacgtctttgaaactctttatctacttttccttcgatattgaagcctccacaggcttcgtctttggctttatgtagctgaaaggcagccagaattggatgtagttggcagtgttggatttggtttaaagtttctttcatgccttggttttgcagagcattcattatgaggctacttttctgtctccattattctggcagccacttgtcgcaggaaggtgtaaacacaccttttaggatagtctttccctcccctgtccaaacccgtgggaccacaaagtacaaaatatagtagtgtttaaagttgaaaagggcaatacctgatttggaggctttaatcaggatcaactctccctcttggctttactaatgagtctgagtaccttaagagggggcgagttgatttcctctccaagatgctctggaggccagctgtgttcaaactgtaaaaagagcaacattgcagctaattccctcaggaagagagccttccagaatagggacagggctttggaagtcctgaagagtcagccccactgtgttggggttaacagaatctgtaggaacaccctgctttaggtagtcttcctaccagaacacccagctgcagcagggagctgggaagaagcagctcccagggtctcccagtggagctgcagtcctggaagaggaggtcacggtggcctagaggcccacagaggcccacagggatcaagttcttttgcatgaagcagtgttagatgtaactactccctcccccaaacccctacccttcctttctctaatcccttctatgtttcttagacctggcttctgcccaggaaggcatctacaggttttttgggcagtttgtctctggggaagggacttcccctcccagcttcactccagcagaatcttcctggtctccaactgttctttcctccacgaggagtttctgttctctgatactaaaactcaagagatctttacggagcaggaaactacttagtccctgagaagccaggtgctctaggaagctttgcttgggcagtgctttgagcttgccgctctttgtacttttattccggtcttcgtctctctgccttccccttgcccttgcggaggcctcagctcagcacagctacagtcagtgttcagggcagttcccaggccttgacagagctctcagggaggaacaaggtaaatgctctagcatcctcttgcctggcccatttaattttatcctttagttacctgggccagtagctttgaattatcccttcattgctccaaacccgatgcctgaagcagcaaaatagggcactgataagagggagcacctctctcatctcagagtttccagcttaagggccagctcctagaaagcagtcttcttaaagggacctacatgcatttgagtttagctgaagtctccaggaatggaggtcctttctgccctcctttccattctgctggcttcagcacactgctgctccttcaccagttggatgggttgctttaacttctttttggaggagcagcagtgtggctgaatacttagcgccagcgggagggagaacgcttctttagtcctccgtcttggattcttcttcctctaaccctcagcatatctgccagggctcctttccctggatagcagcagcttctttctcagcagtaactgagggtgcatggaaatcgggctctggggaggagcgacaccagagggactgatcctggtaggagcacttggttagctgctgaccatgggtgccaacttgttattatgcccccttgtaagctgctgagctgggcttcagtttttcccaggccatgcacacttataatttatttgagagaaactaattgtattttcactgcagtatcttgtacttttatttgtgatttacaaaatgtgaagagaaagtgcagagacccactggctccagtgtttctccaaccctgctctagagctaaccactctaagattgtttggtaatgttacttagtgtaattaattgtaacatattcttttaaataaattgatttattgatgaaacaat

SEQ ID NO: 1435 - protein, 531 aa, Mus musculus
MADEDGEGIHPSAPHRNGGGGGGSGLHCAGNGGGGGGGPRVVRIVKSESGYGFNVRGQVSEGGQLRSINGELYAPLQHVSAVLPGGAADRAGVRKGDRIVNGVNVEGATHKQVVDLIRAGEKELILTVLSVPFADNLDPSDDSLGQSFYDYTEKQAVPISVPTYKHVEQNGEKFVVYNVYMAGRQLCSKRYREFAILHQNLKREFANFTFPRLPGKWPFSLSEQQLDARRRGLEEYLEKVCSIRVIGESDIMQEFLSESDENYNGVSDVELRVPDGTTVTVRVKKNSTTDQVYQAIAAKVGMDSTTVNYFALFEVINHSFVRKLAPNEFPHKLYVQNYTSAVPGTCLTIRKWLFTTEEEVLLNDNDLAVTYFFHQAVDDVKKGYIKAEEKSYQLQKLHEQRKMVMYLNMLRTCEGYNEIIFPHCACDSRRKGHVITAISITHFKLHACTEEGQLENQVIAFEWDEMQRWDTDEEGMAFCFEYREKKPRWVKIFTPYFNYMHECFERVFCELKWRKENIFQMARSQQRDVAT

SEQ ID NO: 1436 - DNA, 102884 bp, Homo sapiens
caaaattagcagggcgtgctggtatgtgcatgtggtcccagctactggggaggctgaggtgggaggatcacttgagctcaggaggttgaggctgcagtgagccaagatctcaccactccactccagcctgggtgacagaaacaaactctgtctcaaaaaaaaaaaaaaaaaaattaaccaactctggaactctctacctttaatcctgacatttatgtgggaccataaatttctttattatttacacttttgaattttctatgcttgtagccaaaagcattctaaggacgtattaaagatgaaagctaaacaggaaccaaagcagaggacccaagtctcacacattttcccactggataatgccaacaatgcagaaacctcattggtctatttgttatgaggtctcctgatctattgtattatttctgtagtgttggtcctgggaggtaatttctaggaaaagggacccttggaaaattgagtttgattttaagaaaaaaaagtgggggaagtactggaaaagagggagaaacacagttaatagagtgacaattgcctagatagttgctgctggaaggatagtgaaaaatgataatgatatttgggagtggcctttgaagcatgacagtctgatgtagtgagagggcatgacagaaaaaaaagccagccagtgtggctgtaagagccagggaacttttctttttttttctctttgagatggagtttccctctcgttgtccaggctggagtgcaatggtgcaatcttggcttatcgcaacctctgcctcctgagttcaagcgattctcctgcctcagcctcctgagtagctgggattacaggcatgcgccactacgcctggctaattttgtatttttagtagagatggggtttctccatgttagtcaggctggtctcgaactcctgacctcaggtgatctgcccgcctcggcatcccaaagtactgggattacaggcgtgagccaccgcgctcagccaaagccagggaacttttcttcccaatgggaaacccagtgaacctcagagaggtgatgttatggcaaagtggaagacaggggcatgatatgaaggtgaccagggaaagggaacactacagctatagaatgctgatagagagccaacagaatgataattacaagctaagctgacataaattctccctcaagttaaacctgtgctgattgtattagctattgtttagcatctacccagcaagctttcttcttaggcacatgacctgggcatgggatccaggtttggataatcatagttcttctagaaactttatttatttacttattcacttatttaaagacagtgtctcggccaggcatggtggctcatgcctgtaatcccagtactttgggaggccgaggtgggcggatcacttgaggttaggagttcgagaccagcctggccaacatggtgaaaccctgtctctactaaaaatacaaaaattaattgggcatggtggtacacgcctgtaatcccagctatttgggaggctgaggcaggagaatagcttgaacctcagaggcagaggttgcagtgaggcgagaccatgccactgcactccagcttgggtgacagagtgagactccatctcaaaaaaaaaataaataaataaataaaataaataaaatagccgggtgcggtggctcacgactgtaatcccagcactttgggaggctgaggcgggaggatcacgaggtcaggagatcgagatcatcctggttaacacagtgaaacccctctctactaaaaatacaaaagaaaaaaaaaattgccaggtgtggtggcgggcgcctgtagtcccagctactcaggaggctgaggcaggagaatggcatgaacccgggatgagccgagatcgtgccactgcactccagcctgggcgacagagcgagactccatctcaaaataaataaataaataaaataaaataaaataaaataacacaaaataaagtcagagtcttgttgtgtcatccaggctggagtgcagtggtgggatcatagctcactgcagcctccaactcctgggctcaagggatcctcccatcccagccttctgtgtagctaagactacaggcatgtgccactatgcctggctaattttaaaattgttttgtagagacagggtcttgctatgtttcccagactggtcttgaactcctaggctcaaaagatcctcctgaaacatcctcccaaagtgctaggattacaggcatgagccactacacctggctgtgtggtttgttatgtagctacaattaactggaatactcaatgtcctccttagctatgtgaagcaatacgtattctttgcttaagttagtttgaattgagtttttgtcacttgcaactaatcttgacaattacttgcaaggaatcttgactaataaactctctagtctctaggtattattcactccttgtgagtcagttactcagattgccaaaaaagtaatttttcatgtggtgttcatggaaaaagtatagaaaggtagtgaagaggaaagaagagagaattagggtaagggccttaaacaaggaccccctttttgttctctttaacccatgaacccatggataatggatgtgtcattgccgttttttttttttttttttttttttgaggcaaggtctccctctgtagcccagcctgaaacgcagtagtgcaatcatagctccctgtaacctcgacctcctgggctcaagtgatcctcccgcctcagttttttgagcagctgggactacaggcatgcaccaccacacccagccaacttttaaaattctgtggcaagatgcggtcttgctatgttggccagactggtcttgaactcaagtgatacttcccgtcttggacccacaaagtgctgggattacaggtgtgagccactgtgtccagttcattgcctcttttaaactatttaatttttctccttagggttgagttctggccactgatttgctgagtgacctttgacaaatcgctgtaccttgctgggtatgttgctttttctgaagggtagtggtagagggagatatttctttatcagaaaaaatgagcaaatggggctagatgtgatatttgttagaattataaataaaagcagccgggcgtagtagctcatgcctgtaatcccagcactttgggaggtggagatgggtggatcacttgaggtcaggagttcactggccaacacagtgaaaccccatctctactaaaaatacaaaaattaggctggtatggtggtgcacgcctataatcccagctactcgggaagctgaggcaggagattggcttgatcccgggaggtggaggttgcagtgagccgagatctcgccaccactgcacttcatcctgggcgacaaagtgagactctgtctcaaaaaaaaaaaaaaaaaaaaaggtgatgtgctaagcattctgctaggcattttctacatatcgctgatttgatccccaccatggccgtattagccactttttgtcctttcctagacttgtattctagaaacacttgttcagctccttctctgtgcttcttattctcatacactgtcagggcacaagtcatgtatgaccagttccttgtcttcaagaagcttatattcagattggaaaagtaaagttaaactagatattaaattgttatggtctaaactgtgcactccagcctgggtgacagagtgagactctgtttatttctttttatttttttggggggtacagagtctcaggctggagtgcagtggcacgatcttggctcactgcaacctctgcctcccaggttcaagcaattctcctgcctcagcctcccgagttgctaggattataagtggtagctaggattacagctaccatgccaccacgcctcgctaatttttgtatttttggtagagacggggtttcatcatgttggctgggctggtcttgaactccggacctcaggtgatgtgcctgcctcggcctcccaaagtgctgggattacaggcatgagccaccatgcccggcaactctgtttaaaaaaaaaaaaaaaaaaaaattaaacggagtggtactgacctaaatgcagtaagagttacattaaattacccattgctgtgtaacacagtaccacaaagttagcagcttaaagcaacaagtatatactatctcacagtttctattggtgttaggagtctgggctgggcttaactgggtccttggctcacggcatcacaagactgctttcaaggtgccagctgggctgtgtttctttgtggagcccaggatcctcttctaagttcatgtggttgctgggagaatttcttgagggtgtaggactgaggaccccagtttcttggtgtcagcccagagccacactgagcacctagagagggccctgcagttcctactgtgtggccctctccacaggcacttcacaacatggcagcttgcttcctcaaggctggcacaagtctcctgctctagtctgctaagaagtgttatataatgtcatataatcatgggagtgacacatcctcacctttgccatattctattgcctagaagcaagtcacaggttctacccacactcaagaggaagggattacacaagagcatgactcactgagggggatcacctgaaggtatatttgcctcaggaatttagaaaagagggatgtcagagtgaactggagtccccaggggaggctttatggaaggacttcagccaggtcttaaaggaagagtagaatttagttcagcaaagggaaataaagaggcagaacatctaggaccaaagaactccatgagcaaaagtatggaggtgggattctcacctaagtaattcctacacaaaaaggtaacagaaacctgacgaccttgcagatcacaaggggtaggaggaactttttcttattgaaccaaagggaagctgggtaggggaaggagaatgtcctggcttagtgtcagaaaatttgggttcaaggttcaggtctggtattaactagcagtgtgactgggacctgctggttatctgagcctagcttcttgtgaccatttcgattgactttgttattgtgagaacgagacaagctcttggatgcaaagtgctctgtaaatggtccagatcctatttctgaaagcagcatcattgactcccactctctctgggtcccccagccccctggctcctctttcactggatgctctccctctttcagtctcctaaatggggtgaccatgggagcagattctccacgttctggacttggcactcttctcatctgactgcacagtatgttttggggttctcatctaccaccacccagggctgatggctcccaaatctaagttctggcccagactcctttccccaggtccacactcatgtgttcaaccagttgttggacaattcctctgggctttcccaaaggccccaaattaaactaatcttcttcttgtttaaatcaaacaaatttaaacaaattaaattaattttccctgcaaacctcttccgcttcctttttatgccatgtcttggggaatcacatcaccatgtcaggaatcttatgtcattccttcctcccctacctttgcacctgagatcctagtggtcaccaagtcccttctctcctgtgcatccccctccttgtattcccaccactactgccctagttggcacctcattaattcccactggaatcactgcaaatgcttcataactgatctttctatctgacttcattctccacacatcctgcagcatgaactttttgaagcacagatttgtgaatgcctgtgctctgcttaaaagcaatcagaggcccctcactaataaggaatgaaattcaaactcctgggcatgatatttgattttttttttttttgagacagagtcttgctctgttgcccaggctggagtgcagtggcgcaatctcggctcactgcaagctctgcctcctaggttcacgccattctcctgcctcagcctcccgagtagctgggactacgggtgcccgccaccatgcccggctaatttttttattttttattttttgtatttttagtagagaaggggtttcaccatgttagccaggatggtctcgatctcctgacctcgtgatccgcccacctcggcctcccaaagtgccgggattacaggcgtgagccacagcgcccggccgatattcgatattttaagccctcctggatctgactcttgcccacctcccctgtccacttcctgtctcctctgctccagtcctactgaactgtgtggtctcacactgtactgtgttctttcaaatctctgtgtgtttgaatatgctgtttcctttgtcagaaatgcccttccaccactatccttctctgccgcaattgctaactcttctcatctgtaatcacttagctcagctctcccatttcgtgagtcatcttccctaactcctccctctggatacgtggaagtccctccgatgtgcaatcctagcagcttgtgcaggactctcctcacagctctcatcatgctctattgcaatggttttttgttttctctcctgctagattgtgaattctcaccagcagtaatggtgtcttattttcttttgttattttaatgctctgatcatcttttcttccaacctgatcctttctaaatatttttaaatttattttttgaataggcaacactcatgtgactgaaaattcagaagttacataaaggtataaagtgaaaagtctctctcctacccctgtccccgcctctgacaccctagctatccagtctccctccccagcagcaatcagtgttatcaatttcttgtgaatacttctaaagatataaaaatatatatggttcccttttattttattattatctttttagatggagtcttgctctgtcgccaggctggagtgcagtggcgtgatcttggctcactgcaacctccacctcccaggttcaagcgattctcctgcctcagccttctgatgaatacaggcacctgccattatgcccggctaatttttgtatttgttttgttttgtttgtttttgagacagagtcttgctctgttgcccaggctggagtgcagtggcacaatctcagctcactgcaacctccacctcccgggttcaagtgattcttctgcctcagcctcccgagtagctgggactacaggtgtgcaccaccacacccggctaatttttgtatttttagtggagacggggtttcgccatgttagccaggctggtctcaaactcctgacctcaggtgatccacccacctcggcctcccaaagtgttgggattacaggcgtgagccaccgtgcctggcccatggttcccgttttatatacaaatagtatcatgttgtatagattgtgctgcactttgttttcaccaaatcatatatagtattgatgatatgatcattccatataagtgcatacagagcttccttattctgtgtttacattgattcaattttccattgtggatacattatgatttaacaaataaacattaggttgttttcagtcttttgtgaatacaaacaatgctgcaatgacttaacttcataaaaacatcacttcacacatgtgcaagtgtaacagtagaatgaactcctggaagtggaatcgccttcagtttgaggaatatgtgtatttgtaagtttgaccatgtcctgttgcctttcggggacattcagtatatttttatctaattcagagtaggcattcagtatatttttatctaataaaccaatgaaaaaataactcttttaggggaggctcccttctttttcctttctctgatgccttgctttccccatccagtgctcagttcaaaccaaattattcatattcaatccaaatgccactattattttggagcaaaactcttatatcaactttattgtgtaactagtcaagatccttcttcattagcttggttgtaaaataaggtcatattaatttttatgttctaattataatgactttgagtcctcatcccatattttgtgagatctcatctttgttttttggagacaggatctcactctgatggtcaggctggagtacagtggtgtgatctcagctctctgcagccttgacctcctaggctgaagcgatcctcccacctaaacctcctaagtagctgggactacaggtatgtgccatcatgcccagctgctttttttttttttttagatatagtctcgctcagccaccagctaattttttattttttgttgagatggggtctcactatgttgcccagtttggtcttgaactcctgggctcaaggaatcctcccacctcggtctcccaaagtgctggtattacaggcatgagccaccacacccagcctttaaaaatttggggggactcttttgtaataacagttagcttaaaacacaaacacattgtacagatgtacaaaatattttctttctttatatctttattccataagctttttttctatttaaggcaatttttaattttatgttttaaacttttttttttggttaaaaactaagacttaaacacaaacatagcctatgcctacaccagatctggatcatcaatttcactgtcttccacctccatctcttgtctcactggaaggtcttcatgggtaataacatgcacagagctgtcatctgatggtaacaataactggggccaggcacagtggctcacacctgtaatcccagcactttgggaggctgaggtggttggatcacctgaggtcaggagttcgagaccagcttggccaacatggtgaaaccctgtctctactaaaaataccaaaaaattagccaggcatggtggcgcatgcgtttaatcgcaagggatttgggaggctgaggcaggagaatcacttgaacctgggaggcagaggttgcggtgagccgatatcgtgccattgcattccagcctgggcgataagagcgaaactccatcttaaaaaaaaaaaaaacaaaaaaacaaaacaaaacaaaaaaacacaatacttggaatacgtggaaaaaaatcacaatacttagaatacctagaataccttctgaaggacctgcctgaggctgctttacagttaacttaaaaaaaaaagtagaaggagtacactctaaaatagtgataaaaactacagtgaattcataaactagtaacatagttcttaccattatcaagtattatgtactgtacataatcatatgtgctatactttcacatgactggcagtgcaggtttgttaacaccagcatcactccaaacatgtgagtaatgcttgtgctatgaccttatggtggctactgtgccactaggtgatagacatttttcagctccattatcatcttagggggcctccctcgtgtttgcagtccattgtagaccaaaatgtccttatgtggcacatgactgtagttgcaatacaggacaagaaagttgcacaataactgggccttagttcctgatacttagtagctggatgactttgagcactctaaggttgtttcctaataacgtaaaatagggaagctaatcgtgatccggttgcctcacaggttgttgggccctggtcaacatataagttactgtgccaaaaaatgagttgatataatttaagactgtgttgaatcacaaacgttaagttattctaacattattgttttttagaggttatgaaatgaaaggggggggggcgaaaaacttggtccgcatcaagaactgaatcattttaccacgctgggtgctgggttatactctccccacccagcagatcaaactcctaacccagcatgaaagataaactacaactcccggcaggccttgcttccgaactgcgtcttataacctcggctcaggcccaggcccagaccgctccccgcccccgccacccataaactacatctcccaggaggccccacggtgcccgattgtccgcttttcgcccgccccctgcctcctcttcaccccgcgccagcagctcggtggccgagtcggtcccgcggccggcggatcgggcgcgcgcgtcgggggtcgtccggctgccaggcagggcgagcacgcgccgggaggccttggaggcgtagggggcgggggtacggctcgcctgctcgcaagatggcggacgaggacggggaagggattcatccctcagcccctcacaggaacggaggtggcggcggcggcggggggtctgggctccactgcgccgggaacggcggcgggggaggcggcggcccgcgggtcgtgcgcatcgtcaagtccgagtccggctacggcttcaacgtgcggggccaagtgagcgagggcgggcaactgcggagcatcaacggggagctgtacgcgccgctgcagcatgtgagcgccgtgctgcccgggggggcggccgatcgggccggggtgcgcaagggggaccgcatcctggaggtgtgagtatcggggctacccgccgccccatcctccccgcgcccctcctgcccctgcactcctcgctacccttgtcacccccaggccgcacctcccccgagctccgagccggcctccggacccccgcccctcaggcctccgcagccgggcccctccttgtgggctgccctcccaccacccgccccggggcttctgcgacgccggtctcccaccccgtcgtctccagctgatgcccttgcgcccccagtgctcctccctgtgccccgattactctgggctcttctccgcccctttgccttcccgtttggcgtgctgcattctgctcctcactccccctcgtcttgctcagaaggaacctcatctgctccttactgacggcgtttcgttttctgatccagccagtaccgtgtcccccccaagttctcatcttcagcatcgcagtttcgttctccaccactcccctccgcccccgtggactgccccttctgccctccagaccaagtaggcaggacctctggtctgctcctacttttcctccggaaacaccatccctccccgctcgtctcctttttctttccttagttaccctctcctcatggttacgctgcccctaaatttttccatcccaccgtgtgcccctttcctcccctcctttttgtatttctactccaagagtttaccttgctttctgacccttgcatgcctttggggtggggggcgtgggatttgacaccgtagtttctcttctcggttggccccgtatcacaccctaatttggaatctagcgtctccatcagcacacccctctgagagcatcccttccctggcctcctgccttcactcctgctctatactcatgcctcctcctagtcaggtttatggtagaccccttgtaactcctcctccttcaaaactacttcaagccctttttgggtctttgaccgctttgcttttttagggcatgcccgtctctgctgcctcttctactctatcctcctgtgatcccacacttgactttgtcctagtctttccctcccctaggctgcttttcctttcttctgttttttaaggcgccttctgctgctgcagcccaccctctctcccctgctgcagtccctcccccttcatacgcctcccccaccacatccctccatgctcttgcgggatgctgccttgtcttgcaatctctgtgcacaccgcctccattaccctaatctaggtgttacatttgcctttttgtacttcgtattgaaattcggatagtgattgccggttgacttgcaggtggtgtgtgctcgcgttgtctccgttctcctcagcagtcttcagtgctgtgtttctgcttactgaatctatgttgtgcattccttttttacacttttactctctccctccatatttcgatttgcccacttgaaatcgttctcattttttataaattttattttaattgtaatttccgcaaccttctgttgcctcttgtaaaacagtaggtttgcaaaagggatagttttttgaaaatctgccttatagagaaatccattccttcttactcatctcgtgccatctacccttatccttgacattcttaactccatggtgtccactcattctgtttcctcacctcttccacctcaagaaatggttggttttaacctgggagagttgattgaaaaaaaaaaaaagaaatagttgctcacctaggccagtgtttggagacagtatacctttcctctgtcctttctgtaaatagatgctttcttgtttcattaatgtcctacatactgtttcctagtattcctagtattgtctgacaatatattctttttttttccttgagatggagttttgatcgtcacccaggctggagtgcagtggcgcgatctcggctcactgcaacctccgcctcccgggttcaagcgattctcctgcctcagcctcctgagtagctgggattacaggcatgtgtcatcatgaccagctaattttgtatttttagtagagacgggtttcaccatgttggccaggctggtctgaaactcctgacctcaggtgatccgcccgcctcggcctcccaaagtgctgggattacaataatgactttcagatttcttatacttgggcacctaattattttctttctagataactcaaaatttgtggctgatgttttcttccaatagaaggtctcagaattgtcactttcctttccctttggaagttaattttggactcagcttcttatttttaaatttaaaactaaagcatttataattataaatttatgatgaagttctacattatttactcttcacaggatctaaaggaactaaaccaaaaagaataattctgtaggagactatagttaatatgatctatctttgcagatacacgcacacatcccaacatacatagttagtggcttcttgcctttattgtggcttctgcccaagagcctaggtataaactgtaaaggagacctcagataatcccctaggaaaggtagaaggacttgccttaggctcaggttccagactaggaagctgggaaatctttgccttctagagaaaaaacattactttttggcacatcctttgtggtaagtagagaactttgtcacttttagtgggcaggggaaaagaatactctgcctagaagacctctctggaaggttgtgataatcagaaatcttcctggcattggtttctcactcttccaactatctgtattttgatttccaaattctctgaaccttctttggtactataggggaagtaatgataattacagcccaaagccaagctagtggtacattctgtgagaccccaactatacagtgtctttctcttttctttttttttttcttcctttcttcgatagtctgcgccttctctttagggtttcaagtgagaggggaaatcagcaaccaaatagatgtggttcttgagggatatctgtgcccgctacttgtctcgatcttggttaggttgatgctaattttcctaaagcattttttaggcaatactccttagagcttttgtctgtcctccaagttcttaaagtttacctctgttgtcccaggaaagctttgcatgttgctgaagagccaggtggggtcagaattagggataggtggattatcattgtgtggatatagtttgtatcaagtcataggtgaatgtatggaccttgataattgctatttaagacttttccctattttagattcttctattgtgtttacaaattgtttttgtaacaattttcgtatttttcagttgtttggacaactgacagaggtgtgaaagaacagagtaactttgaaatttaagggcatacaaacttggacacaagtaagagcttcagtttctttgtgtttcttttaaagtcggcttaccaaggctctgtcctaatctttagtcctgaaactaaattggagcccatatggttcagtttgccttttctcctttcaaaactgtctagattctaacagggcttggtactgcagtatgaacaagccctctgggctctaaattttactgcagatggaaagtttttttgactagcaaagctggtttccaccttgtaatttttcccagtgtaacatatactgagtgttttccctttgatgtgtatgtacctggaggctaatgagtaaagaatgctttcaacaaacagaaccaaaataaatatgtctttgcactaattatatagtatgtgaagtaacatttgacttcaggttaattttcttaaggttaaagtagttccaaggactcttgattgatttctcgagagacgctgctggaaggttttagtgtgtggtggatatggatgtaaaactgtctgtatttttgaaggattagtttaagcatggaccactaagattggcttgcaagcattcaaaatcatgatatatttatgctagtcagtatatatgctttcctctttgatagccaccagataatagactcatcaactttccctcattaaagtcataagataaaataaaactgtgtatatcaatttgttttttgaaagtcagttttttaacttcattttatgtgagagtttgaaaatgaattaaagaggctggtgccacaagaagtatttttatgagttaagtgtgagtcatgtaacacagactaggtaccgtctcaaaagccgctttctcaattgcaactgaattctatttgactgatattttctaggtagattttggtaatgtttgaaataatgaaatcatggttattgatcaaaggaaatttgtttggcagcggttctcaggctttagggtacatgagaagcacttgggtgtgcttatctaaagtacagattctcaggctcaccttttaagggttatgattcagtagatctttcatagggcctagaaatctttatttttttactcctttgccaggtgtgggtaatgcaacccacatactcagttacatgcccagggtgatgcagtaggttgtaggccttggattctcagttcattttatcttcatgattatattgagagtaatgagctaaggttataccaacaaatagtgaattgttaggctctcgaattccaacctaagtggaaaatcagttaaatactaactgttctatctgatcgtctatactttatttattggatcttgctaagctcttgaaataaagatggatggttaagaggtagcacaagttaatattaatagttataataatcattttactgctttgcagcgtgtatagtgtgttatagtttgtagttttatttatttatttatttatttatttagagacagcgtttcactcttgttgcccaggctggagtgcagtggtgcgatctcggctcactgcaacctccgcctcccgggttcaagcaattcccctgcctcagcttcccaagcagctgggattacaggcatgtgccaccacgcccatctaatttttgtatttttagtagagacggggtttctccatgttggtcaggccaggctggtctcaaactccccacctcaggtgatcagcccgcctcggcctcccaaagtgctgggattacaggcatgagccactgcgcccagtcagtctgtagtgtttttacatctgatcttcacacagtcctgtgagataggaagattataagctcatcaagggcagggactacatcaaatactatgtatttgttgtatccctagccaaatgtctggtggcccatggaaagtattcttcagtaaatacttgccaaatgaatatatgagtattatccctattttataagacaggaaatggaaactgagtgttgtaccaatgaatggcaaccagaattaaatccagatctttggattctagatcttgaatattttctctttttagagctgttttttttttttttttttttttaaagagataggagtctcactatgttgcccaggctgtacttgaattctgggctcaagtgatcctcccacctcagccttccgagtagctggcactacaggcatgcactaccacacctggctaatttttttgtactttttttttttttttgtagagatggggttgccatgttgcccagtgtggtcttgaacccctggcctcaagtgatctgcccactttggcctcctaaaccgctggcattgcaggcttgagcacctggctgcttaaaattcagttacattcatataaacgtcgatagtggttgaactttggttctactattgtgaaatgtaactattttatatctttatttactcactattacccattgttaaattggatgagagacaggggactaaagcaggcattctttgcctttattattgctatctttaccctgttggttatcagtgaagacagcagaacaatcatttttaaattccttttaatttcacaggtagttgaggttgcaaacaaataaaactaaatttgaaaatagcattaccttcccctcagaaatcacttccacagattgctgtaaccaggaaaatatattttattagtagcataacaatttgtctgggtcttttaacttattgtgaagaacagttctttttccatccaccactgaccagtttttttcagatgagggcctgttaccatgctctcaaagataattatttttctaggtaagtcccattgggaataattcttatgaccttgtagataagcaaagagacttaattgacaagcagacacttaacaatttatgatcactgctcaaaatgctttttgagcataatctttggcaggttcattcattagatgatggcattgctgacaaaaggatattgtggtggtttaggttagagccatttaggttcattcttttcttccacctcagctatacagatgttttctgtgcttcttgggcaatccagtaagagcccatggatgggttggtacagttcagcccacatttggaaaaaaattttaggcagttttaaaatatcttttaaaaaattgcagctcatagtaagagatacattttacattataacctaatatatatgcaaaaaaaaaaaacacctgaaataagcttcacaaaaattatgtttactggccaggcacagtggctcacgcctgtaatcccagcactttgggaagccgaggtgggcggatcacttgagctcaggaattcgaaaccagcctgggcaacatggtgaaacctcatctctgcaaaaaatacaaaagttagccacgtgtggtggcgcatgcctatagtcccagctactcaggaggctgaggtgggaggattgctggagcctgggatgttgaggctgcagtgagccatgatcacatcactgacctcaagcctgggagacagaaaccctgtctcaaaaataaaacaaaactgaacaccagagtgcatgataccagtaaatacagtttttttggtttcttttttcctctcaccttagccttccagaaagctgggaccataggcgtatgccaccatgcccagctaattttttgtattttttgtagagacagggtttcaccatgttgcccaggctggtctgagattcctgggctgaagtgatccgcttgcctcggcttcccaaagtgctgggattacaggtgtgagccaccgtgccgggcccactctggtattttttagtttgttcatattttgagtttctttgttctgtttttttgagtgctggtggtggcctggtacattaatttcacaactcattaggttgtgatccactgtctgaaaaacagtaatttagggcatcacttttcctgatattggcatgctaaatattacttcatactcagtttggttccacaagtaagcacacactgtatataaagaactgcttggcttgtatgagtcacagggtctctgcatccctgcctttgagaagcttacactgcagtagggaaggtaaacaatttgctgtgtgtaaagctaaacgaggtaatagagataaatgaaaagcacaatcgaagtatagaggcaggagtgaatatgcctaagaagactggtggggagacagctcatacaaggcttttaaactggattgaagaacaaataaaacttcagagaaggggcaaggattttataggttgaggaaaactgtgaccaaagaggggaaaatgtgaaaagctcttaggctagcaaggggcttaaagttgctgtttgtctgtagacatttgtgatgatagaaactggaaaggaaggttgcagtaagattttaaaaagatggctttgaatgtaatcccaagaagtttggatttttttctctttatgagctcagaatatagctgtgtgtgcattaatacccaggacttcctgtgaattcagttttatataattatttaccagaagaagttgaataacttttccaaggcgaaagaggaaaatcactattagaattagagtaatttcagagccatctagtctcttggactgtcttgtactatataaagaagggaactaagaacaactaagctctgacacccagaactgggaacagctggtgaggagctggttgcctttaacttgtgtttgtattttatttcacaatcgaatccagcttctcagttatcctttctctttctcttctgttttaaatgactatacttactattgtgtttacaattgataactttcatccttgtgtgctacaagcctgttgtgttctagctctactttcctccaagtctgttcctctgatttgaagatgcttttttttttttttgtgacagagtcttgctctgtcgcctaggctggagagcagtggcacgatctcggctcactgcaacctcagcctcccaggttcaagcaattctcctgccttagcctcctgagtagctgggattacaggtgtgcaccaccatgcccagctgaattgtttgtatttttagtagagaccgggtttcaccatgctggccaggctggtcttgaactcatgacctcgtagtccacccacctcggcctcccaaagtactgggattacaggcataagccactgcacctggccgaagatgcttcttttaatttaaatcttttattttggcatacagcatgttgggagctgagtggactgaagacgggggggaaacttaatgtggtactaaagtttacacttaatacctaccttcaaaatgaaaattcatgtgaagctccttcaaataagtttaagacctggtggtgatcacaaagtgaattgttgctttctttcataatattcgtactccagggttaaattttgtggtatggtattagtcaaatgctaggtagtatgtgtgtagtctcttgtttattatttattgctccctgccaactaaataaggttctcataatagttgaggaaatgtgcctttctgcaaggtattgagttgctgaataaggagttgtatttgagtactcttatgtgtacttcctcagtgaacttccactgatacgaaaacatcttttaagaaatggtctgtttttgcttaagctgtctgaaactttttagattcttgtgtcaaacctcagagcaagaccagaatgataggcctatgttttctacaggcctgatacacaaggaattagcttacttccctctggaaaagtacaggcagtctgcagagagtcagctgctctggtgcatgctctcccagctgctttcaagaggctgattactcttaaagaactttcaataagattattaactaggaaggttgtctcttccacccgcaaataccacagtacttttatatctatgtgttgatctagttttatttatatttatttattatgttttaaaaattgggagattgattaaatgaatatttggagatcttggaaagcatgatggcctctgagaattttggaaactttttctacttattttgctgatcagtttaatcatctagaacgtttgttcctgcctctgtctttacttggaaacagcaatgagttttgttctctctacctgaggttttgtatcaaggaaatgtgacactgaagtttcgtttgtgagttatgtgctagtagattattttagatttccctgtcttacccagttatcttttatattcctcatttggaaaaggtccgactgtacctttcttctctttcaatatgttggaatggactacagacttacagaaattgtagtctgtgtttctcatttccaaaataaattgctcaaatttaatttggattaaaagatggtatttgatcgtcaaagggtcatatcccttcaaaagtatatcttgttactaatttgtaaagactgtctttcataaatgaaggtatttcagctgtttttttcagttgtcatgatagattacactatctgttcacattcatgtacaggaccacttgggattaattgaatatataggaaatgggtggttgagattcagggttcaggttgcggccccagaacaaatttaccagatcacgtgagggataatgtttttaattacattatgtagtaattcagaaatagtagtgtaatagaacttcagaattatcaaaattttttttcctttgatgatttacttgacttgcaaaccaaggttattgataaaacaagtatattttattctttaattaactttcactgtggtcagtataccaagttaaaatcatctgggggtagcatttaaattggccatgttgacaatgattcaaaatgtagcagctctcaaacactgagttggtgttgggaaataatttaggactagttgtgttttggtggtgaacaactgagtgggggatcctcagaaatgtgtaggaggaaaatgagttactttaggaaaatcatcatggctattagcaactttctttcccatttcttttttttaaatttaatttatttttcttgcccagcctggagtgtagtggtgcgatcacagcttactgaagccacaacctcctggactcaagggattctcccatctcagcctcccaagtagctgggaccacatgcatgtactacacctggctagtttttatattatttgtttattttatttacttattttttttgaaacagtcttgccctgtcgcccaggctggagtgcagtggtatgatctcagctcactgcaacctccccctcccaggtccaagtgattatcctgcctcagcctcccaagtagctgggattacaggcacatgccaccatacctgcctaatatatatatatatattttttttgagatggagtctcgctgtcgcccaggctggagtgcagtggcacgattttggcttactgcaattctgcctcccaggttcaagtgattctcctgactcagcctcccgagtagctgggactacaggtgcgggccaccatacttggctaattttttgtatttttagtagagacggggtttcaccttgttagccaggatggtctctatcttctgacctcgtgatccgcccaccttggcctcccaaagtgctgggattacaggcgtgagccaccgcgcccagtattttttaatagagacggggtttcaccatgttggccagtctggtcttctcctgacctcagtgatctgcctgccttggccgcccaaaatgctgagattacaggcatgagccaccactcctaacctaatttttatattttttttgtagagacaaggtcccactttgttgcccagactggtcttgaacttgtggattcaaatgatcctcccgtctcggcctcccaaagtgctgggattataagtatgagccactgcgcctgaccctttcccatttctaacatttattgtcctccagtacaaagaagtaacccattgtcatgtctactctatgataggctagaactatagggttgctctatattgatcaggtttttaaagataaaaatgaaaaaaaaatcctatccagacaaaataaatcagtgttttatatttttggagcatcagaacttactttaagacctcactggtaattctttagcctctcacatgtgataaagacattgtgcttacatttttttaaaatttatttatttatttattttagagacaaggtatcactctttcacccatgctggagtgcagtggcacaatcataactcactgcagctattgatctcctgggctcaagtgatccttctgcctcagcctcctgagtagctgggactatgggtgtgtgccaccatacacagctcatttttaaaaatttttttgtaaagttagggtcttgctatgttccccaggctggtctcaaactcctgggctcaagccgtcctcctgccttggcctcccaaagtgttgggattacaggagtgagccacctcacctggcctaaaattctaaaactagaattttgtattctactaagagtgaaatggacaggtttgtttttattcttggtgacaagtggttacattggcttttcaggtaatgatcagataataaatgagctttttttttctgaatagcttgattttatatatatatatatatatatatgtattttttttttttttgcgatggagtcttgctctgtcgcccaggctggagtgcagtggcgtgatcttggctcattgcaacctccatcttctgggttcaagcaattctctggtctcagcctcccaagtagcagggactataggcacctgccagcacgcccggctaatttctgtatttttaatagagatggggtttcaccatattgatcaggttggtctcgaactcctgacctcaggtgatacacctacctcggcctcccaaaaagctgggattacagacatgagccaccacgcccggccagcttgattatatttttatatttattttttaaatatcttaaatccttagccttattatacttttttctctgaatgacaagtatgattcatttatttggaaataaatctacctgattatatttgtatactgattgccttggagttagaaggtttgaggaatctgtaattctttcttccccagtaataaactcttgttacttctggctggaggtattaaggttgaagaacagatgagtcttatttgtacttcttctgcctcaggcagcattctttgtaaatagaacacccggtcaaaggtaaaaagtcccagtgatggtaagcaacttatttgacaagttatttattcttttttttcctttttgggaagaccagatgccaattaacatacttctcagtttctcagctttgccaggggcaaactttattgttattaatacgcgcttttgcccagtcctaaatttttggacgtaggtgctttaaaaatactggtgtaggccaggcgctgtggctgacgcctgtaatcccagtactttgggaggccgaagcggcagatcagttgaggtcaggggttcgagactagcctggccaacatggtgaaaccccgtcttcattaaaaatacaaaaattagtcaggtgtggtggcatgcacctgtaatcctaactactggggaggctgaggcaggagaattgcttgaaccaaggagatggagattgcagtgagctgagatcatgccactgcactccagcctgggtgacagagcaagactctgtctcaaaaaaaaaaaaagataaataaaaaaatattggtataaaggttgaatctggccaggtgtggtggctcatgcctgtaatctgagcactatgggaggctgaaggggcagatcacttgaggtcatgagttcaagaccagctgatcaacatggtgaaaccccgtctctactataaacacaaaaattagcgggagaatcacttgaaccggggcggtggaagttgcagtgattcgagaccacaccagtgcactctatcctggcaacagagcaagactctgtgtccaaaaaaaaaaaaaaaaagcagggtgtggtggcacacacctgtaatccctgctgctcgggaggctgaggcaggagaattgcttgagcctgggaggcagaggttgtagtgagccgagatcaggccactgcattccagagcttgggcaacagagtgagactgtgtcaccaaaaaaaaaataaaataaaaataaaagattgggccgggcgcaatggcccacacatgtaatcccagctactctggaggctgaagcaggagaatgacatgaacccaggaggtgtcgcttgcagtgagccgagatggcgccactgcactccaccctgggcgacagagcgagactccgtttcaaaaaaataaaaaataaaattaaaaaagattgaatcaatctttccatacttaaaaaaaggtaccaaaggatttgagaagtaaagctctctctataaaaccttggaaatttgttcaatttggtctgtatgtgattaacttttttttttttgtttttccctacatttgccaaagatgagacctaattagaattaaatgaaggtttttttggcttgtttttatttttggacttattttgagccaagacacttttatattgtctctttctaaaaaagaataatttgtcagaattattgcattaaaagaatgttttatgataatggttttaaaaatcaggaagagaatactgttttatcatgagattcaagagatcaagaccatcctggccagcatggagaaacctgtctctactgaaaatgcaaaaaattagctgggtgtggtggcgtgcccctgtagtcccagctacttgggaggctgaggcaggagaatcacttgaacttgggaggcagaggttgcagtgagccaagatcgtgccactgcactccagcctgggcgacagagcaagactccgtctaaataaataaataaataaataaataaatgtaaaatgaagaagagaaaacttaaattgattgaaattttgggaccctataactttgaggttgttgttttctgctcacttgtatttaggcagttgctaaggctggtcagtggttacactaaatcatgactgaagagagacaagatagtttttgttttgttttgttttctaatactgtaaagtgctccaggctcatcttgtatatttcctgctgtagtcctagaatcaaccatttatttaaaggtccctggttcctttattggttttacagaccaagatctgggcattctgggcattagggtgtggtttcttttaggccatttcggctgacagcaaagaaatttgtgtgtgtatattaactcttgtgtatatacatatctataaatacttctctatgtaaccctctgtattatattaaattaaacatgagttctgattcttcatctctactgcattaccacatggattattctagcctcctccccttgctgatcttccgtgaatttccattccacagtgagaaacttggcttttcccatctgccacccatttacttaattgttcaattccaatacacttgtttagcagtatcagaattgttaacgagtaccctcgtggaaaacaactttattgactaaagtacagtacttattggtagtcccttttgcgtttagtcttatggactcttttcctttacagtcacttagatccataacttttcctctactcactttagtaaggtttttaaaaatacctttgaaatacagttaggttctcttgtcacagtctgggattcttccaacctactaactgatttttaaaatatttgcatatattaaggttcacactgttcttggtgttttttgtttttgtttttttaaatagagatggggtttcgccatgatgcccaggctggtctcgaactcctgggctcaaacagtccacccgctttggcttcccaaagtgctaggattacaggtgtaagccactgcgcctggccaaggttcactctttgttctataaagttctatagattttgacatgcattatgtcatatatgcaccattacagtatcgtacagaataatttcactaccctaaaaattccctgtgcttcgctaattcatccttatcttctccacaggcccctggtaaccactgatctttgccttttctggaatgtcatataattggaataatacatatatagtagcctttcagactggcttctttcccttagcaacatggacttaaggttcctgcatgtcttttcatgactgtttttttttttttttttttagatggaatttcactctgtcgcccaggctggagtgcagtggtgcaatcttggctcactgcaacctacacctcctgggttcaagcgattctcctgccgcagcctcttgagtagctgggattacaggcgcccgccaccatgcccagctaatttttgtatttttagtagtgatggggttttaccgtattggccaggctggtgtcaaactcctgacctcaggtgaaacgcccatcttcgcctacctaagtactgggattgcaggcatgagccactgcgtccgaccttttcttggcttaatagctcatttcttcttttagaggcataatactcaactgtatggctcttccacagattgtttattcatctattgaaggacatcttggttacttacagttttttggcaattatgaataaagctgccataaacatttatttacgtgcaggtttttgtgtagatgtaagttttcagctcagttgggtaaatacctgggaatgtgattgctggatcttatggtaagactgtaaaaagctgccaaactgtcttccaaaatgactatcattttgtattcccaccagcagtgaatgaggattgctgttgctccacatcctcaccagcatttggtatttggtattaccaggttttttgattttaggcattctaataggcgtgtagtggtatcttgttttcatttgcagttccctgatgatgaatgatattgagcatcttatatgcttatttgccatctgtatatcttccttggtgaggtatctgtccagatattttgcccatttttaaattgggttgtttgttttcttattgttgagttttaatagctctttgtatattttggatacaagtgttttatcagatgtgtgttttgcaaatattttctcctagtctgttttgttttttcattctcttaacagtgtctcttgcagagcagaagttttcaattttaataaagttcaacttagcaatttttttccttcatggatcatgctttttggtgttgtagctgagatctcattgccaaccccctagattttctcctatgttatcttttagaagttttgtagatttgtatttttgtaatccacttttaggcagcattggctcaaacatttctagattattttgttcttcatgtttacaattttacatgattgctttctagtttgttaaattattgtactacaattttcttacattttcatccccctattgactttttataaaaacaaatttggaaacaacctaaataataatggatatgtttgtgcttagcttttttgtgtttaggcgcttgcttcagcagcccatatagtaaaattagaacgatacagagaagattagcatggcccctgtggaaggatcatacgtaaatttgtgaagtgttccatatatatacacgcacatatatacacatgtatatatacgtatatatacatatatacgtgtatatatacatgtatgcgtatatatatacatatatacacgtatatatacatgtatacgtatatatatgtttgtatatatgtgtgtgtatatatgtgtatatatataatttttttttttttttgagacagagtctcactctgttgaccaggctggagtgcagtggggcaatctcagctcactgcaacctctgcttcctgggttcaagcgattctcctgcctgagcctcctgagggtctacatgtgcgtgccaccatgcccggctaattttttgtatttttggtagagacggggttttaccatgttggccaggctggccttaaactcctgacctcaggtgatctgcctgcctcagcctcccaaagtgctgggattacaggcgtgagccaatgtgcccggccactgttccatatatatatatatttttttgtgaggccagcctgatcaacgtggtgaagccctgtctctactgaaaatacaaaaattagcagggcgtggtggcctgcacctgtaatcccagctactcaggaggctgaggcaggagaatcgcttgaacccgggaggcgaaggttgtagtgagccgagatcgcaccactgcactccagcctgggcgacagagtgagactttgtctcaaaaaaaaaaaaaagaaacttttttgtgtttgggattatttcatttattcttagaagaaatgcttgagagtgttctgcataccattgtaaaatttttgcccttacgaagctcatattttggtcattgccttaggataaattctcagtaatacaattattagttaaaatattatgaccatttttatatctttagatgcatattgccagtgaaattactttctaaaggattttacctatttataaaaccatctcatattctagatgataaaagttgatattaaaaataattaagataataattttttattttaaaagttgttgaccagattttactatttattagaaaatgcaagcattttggaaaactttggccatttactttctcttgttgtgcttttatcatccatcaataaataagatgctctaagatgtgaggggcaaaatattattatttctaaaacaacattccaaatgtctttgatatttagtgatccagaatggaaattttgtttaaatctgttcaagcttcacaactattttggctgcattcattgcttacacatgtctaatcttatatctcaagagtttaagggcaaagtatggtatgattgcttatataattagtcagtaagaatattcttcggccgggcacggtggctcacgcctgtaatcccagcactttgggaggccgaggtgggtggatcacgaggtcaggagatcgagaccatcctggctaacacggtgaaaccccgtctctactaaaaatacaaaaattagctgggtgtggtggcgggcgcctgtagttccagctactcgggaggctgaggcgggagaatggcgtgaacccgggaggcggagctggcagtgagctgagattgtgccactgcactctagcctgggcgacagagtgagactccgtctcaaaaaaaagaatattcttccacttgtttgcctaagtaagatagcaaggaggcagagttagatgaaaaggagacaaactgaaccagtcagatgatttaactgcaaaaattagaaaggacagacccttacattttggtggagtagttccttgtctttacagtgtagtttctagtacagttgtactgaacaactaagcagtgaaccagtgaaaagtcaaaggaagtgtctctcttctcatatgccaggggtcttttttccttcaacttcagagatctcctaatttttaagaagatatgttgtggagaaggtagggagttcatttacaaagctctgtataattgaggagatgatataatagctgtgttaaagttttaaacatagttccagtcaccctaactcaactatttttgtattttacataatgtgccttatgggctaaaatagaaacaatttgtaatcttcgtttttgcatttaacataagaacttctccatgtttgcatatagttttcataaatatttttaagatgtttatagtccatatgtttgatgtacttcagtgtctttaaaggtttctctaatgttggatattatttggctgaacaaattacttttcaaatacttggtcagaagaaaatgctttacaatcttaaatgcttaaattttttttttccttgagacagggtctcctctgtcacccagactggagtgcggtggcgcaatctcagctcactgccacctctgcctcctgggttcaagcaatcctctcaggtagctgggacaatacgtgtgcaccaccaggcccagctaatttttaaaatattttttgtaaaggcggagtcccaccatgttgctcaggctgtcttgaactcctgggctcaagtgatcctcccactgcggcctcccaaagtgttgggattatagttgttagccactgtgcttgacccttaaaaatctaacaagtgaaatctaggcctcctaagaaaaagaatctgaattatgtttgtaatgcactataatggtatttttgcagtgtttgatgaatttaacttttgtcccttacattatggctttgataaacttgagagatgctgctgttatctgacttaactttataatttgttgcggaggttgttttttttttttgagatggagttttgctcttgttgcccaggctggagtgcagtggtgcgatctcggctcactgcaatgtctgccttccagtttcaagtgattctcctgcctcagccttccaagtagctgggattacaggcatgcgccaccacgcccggctaatttttgtatttttagtagagacggggtttcaccatgttggccaggctggtcttgaactcctgaccttgtgatctgctcacctcagcttcccaaagtgctgggattacaggcatgagccaccgcacctggacatgttgctgaggtttttaactatactaggtttgaaatatgtgtcctattgtttataggagattaagacaaaaaagccaaagcagaagtaggggtaaactagctgtgtcttaattttcttttcattacctccatgaaataaccttgtaagacttggaaatagccaaagtttagcttattttccacaagacatgggaggtgaaggaaaaagcatatattttatttaagcagttttatgctgcagatatgtacagattcatctactagatatttaacaaatttattcacaatagcaaaacattcagagtaatctaaaagtagaataggggttatgcttttcacccagatggtggactcctatttcacacttacagatgtggatattatataataatttttatttttattttatttatttttattttttattttttttgagacggagtctggctctgtcgcccaggctggagtgcagtggcacaatctcagctcactgcaagctccacctcccgggttcacgccattctcctgcctcagcctccctagtagctgggactacaggcgcccgccactacgcctggctaatttttttgtatttctagtagagatggggtttcaccgtgttagccaggatggtcttgatctcctgacctcgtgatctgccctcctcagcctcccaaagtgctgggattacaggcttgagccaccgcgctcggccaataaactttactgaggcttaattaacatacagttaaatgcacacatatgaagcatagagtttgagttttggcaaaagtatacatccatttaaccaccaccccagtcaagatacagacagttccatcactttttctttttttcctgacacagagtctcactttgtcacctaggctggagtgcggcggtgagatcttggctcactacagccttgactcccaggtacaagcaatcctcctacctcagtccccaagtagccaggactgcaggcctgctccaggatgcccagctaattttttgtattttttgtagagatggggtttcgccttgttgcccaggctggtctcaaactcctgagctcaagtgatccgccctgcctctgcctcccacagtgctgggattacaggcgtgacacgtaagaaagtttctttgtgcccctttgcattcagtactatcccctcccctccagacaacaagtgatttgatttctaccactaaagaatagttttgtctattccagaacttcaaataaatggagtcaaatgagtcggattcttttctgtctcactttcctcccgccgagtgtatttttgagatttatctatgttgttggggatgagtagtttttcctttttattcctttttccttttattgctgtgatactccactttatgaatatgccacaacttgtttatccatttgctttttgatagacattgggttgtttttagttttgtactattttgaataaagctgcagtggacattcaactacagttgtttgtgtagatgtgtgtgtgtgttttttttttttctcttggataatacctaggagtggaattgctgggtcttgtagtaaatgtatgtttaacattatgagaaactgctagattgtttttattttatgcacttatcagctgtatataagaatggcacttgttccacatctttggcaaaacttggtattgccactctattttagccattcttatagacatgtagccattgtgtaggcatatagccatctacaaaattgaaatgtatgtcttagcacttgcagttataggaatttattatccatttttaatgggctgcctctgagagactaattacttttttattactttcgtgcatgtcacagagggtcaaaatagtattttgcttactatgtagaatggctttttgctgtggtatatatagtgattgggtttgtcatatttccatttatacctagttttcattgtatatagcttccttcacaagtggtatacaaatcctgactagagctttttctcctgcttttggaaatgtttatgttagctttgcagtttccctagctggccaactttggttgaatagaagtcttatttgaagccactcccattagctagcttaaggcctctctctattggggccaaatgttggtcttatgtaaaagtaagtattttattaaaattatcgcgtgtgtctttacaatgccaaagacataaaataaattagatatcatctgtgtaactaaagcaaattttcatcttatttgtggattgttggaatttttggcccccttaattttttccttcattttattatgaaaagtttcaaacctacagaaaaattgagagaattgtacagtgaatacctgtatacctatcacctagattctataattacattttgttgtatttgcttaatcgcatatgtgttagacatttttgatgatgtatttaagctgctgcctttctttataaaagcagtatatattggtagatcctactgggcagtcagtacttttgtgtgataagagaattggtgcttcactgatccagtggtcttgtgaagctggctatctgtgaaccccattgtcattggttgagagcttaattatttattttcaaatgaatttcagctagattatgttacaaagacagaattgaaaggcaagggaaattgctggtagaaaaggtttgtatcatcaaggaggtgaaaatactaccaacttgtttgcccaattgatacaaatactataacacaaatagctaccatttattgagtagttaccatgttctagagcttcctctcattttaattttcacaacaactccattagccgatgatattaaccccattttatggattagaaaattgagatttaatgagataaagtaatttacttaagggctcatccattaaacagcacaattggtattcaaacccaagtctgtttgactcccaaacccatactttgaacctgaagtctgtactgctgaaagtttctccttattgaagaatttatattttgcattaatttatgtcttcagaattatacaaagtattgggccacaccaaatttgagtctggtatagtagccttcttgtaaaaaattatatcatataacatttttatgactgtgaagacctcttaattcttcaggaaggagggccctttttcaaatcagacatcctggggtttttactgaccttatttcattctctgaagaatgaaggaatttcccactttgtagtaagtcatggaatgtatagcattccttctatagttgaaccagataaatattagcaagtctgtttagaatatgacactggaagttttttcctgtctttttttaaaagaggtttttggaattatagtcaatctgaaacttggtcttactaataaagaagtgaaacctaagtgagctcccttgctccctgatggctcttggtataagtctcacttaagtttctctgacgattttcagggtttatttttgtgagtgacccaaggaacggtgtattttgatttgaaaactgaatgggtggaggtgtgtattgaaagcaatagttctgaatctttttggagtttatatactcctttttgaagctgatgaaagctagggaaactccccagaaaaaaacgcataataggcacataaaaagaattttacatacaaattttgtagatccagtgactctcaagtctaccaacagagtgccctagataaaaaattctttaaaggaaaaaaaatcagggaaccgaaaagtaagatttgagcatcagtttttatttttcacaaatgtgcgtttcataaaattgattgcattaacagaaattttgttttggtatttaagattttattttatttcattttttaaaaaacaggatcttcttttgtaacccaggctggagtgcagtggcatgatctagctcactgcagccttgaactcccaggctcaggtgttcttcccagctcagcctcccaagtagctggaactataggcacgtgccaccaggcctggctaatcttttggtatatttcgtatagagacggggtttcaccatgttgcccaggctggtctcaaactcctgaactcaagtgatccatctgccttggcctcctaaagtgctgggattacaggtgtgagccacactgtgcctagcctgtatccaagatattagtattttggccagtctttaaggtgtcagctttttccacttttgtaaaaaaaaaaaaaaaaaaaaaaaggatattcatgagttagctaaggttcctagggatatataagaatgtatggtgatttctaaacttgctttttcattttttttcttataccatcaaatcattttctcagaactagtaaggccaaatacttagataaaatcttttgccagttccttacttaagatttccatttcttctttaatcaaaatctatatacatagtacctctttacttcttaaaccttctgatataaatgtttaggaattgttctacatgttttattacattaatcttcacagcaactctgttaggaacttattgtctccatttacacatgtggaaagcaaggctaagaaaggttaaaaactcagtcaagaccaattctggtactaatagtcaggatcaggatttaaactcctgtaagtagctccaaagcccattttctttccattttaccatgctggtatatgatcagagttgatcacgttttttttgtttttttttttttttttttgagacagagtcttgctctgtccgccaggctggagtgcggagtgcagagtgcagtggcgtgatctgggctcactgcaagctccgcctgccgggttcacgccattctcctgcctcagcctcccaagtagctgggactacaggcgcccaccaccatgcccggctaattttttgtatttttagtagagacagggtttcaccgtgttagccaggaaggtcttgatctcctgaccttgtgatccacccgcctcggcctcccaaagtgctgggattataggcttgagccaccgcgcccggcgcctgatcatgttttttgatcacaggtctgactgaatgaattcaaagcccaagtttccatcagtgaaaggggctctttatttttttctatagctagcttattgtaaaattactgatttttttgtatataagttagacttgtaggatgtgaaatgtcaggagtgctgaatttactggctagattgttaaaccctaaattaaatcccaggaggctagctggggggtctcctgactgttctgtttatataaatggatatttcagataccagactctgacagagacaatttcagtgactgaaaagtttatggaaggcttgttactaaatttagtatcatttttcaggaaggaaaatccctaatggtttggaacaggactgaaaaagaatttaactctaaagggtagataagctttaaatgttaaattgattagaggtcaggtgtgtatttcctacctctcttgggatagccatgggagggaacctccaggcctgctgcccagtggtttttgctgagagagcagctggatcagcattctggaaggtagtttggtttgctgagggagtcttgtgagactcagcatctttcttgacaaaatacttcatctaaaccttgtactttgtttgccttatttcagccttttgtacacagcaaaacaggaaggaaaattagtaggctgaccatataattataggtgtatattttttagtttggactgattacacaggactctaaatgagatagcatagagcaggaaaaaagttgatggaatcccaagaggttaattgaattggaaactagtgtatgtgaagagtaataccatttagctcccaaagtaatgaaacttggcataaaggaaaattaagttgactgatttgagatatggagagaaattggatgtaaatgtaaaggaattatcttcagtcataactttttttgagtctctatttacaaattaagagaatttattttgtgaaggttcttttaacagaattcctttgaggtttaaaaaggacaaagtacaattcaagtggcagggctgtcaaaagccactttgattgaattgtatacatgcttagttagaatgaggaaattggattgtttgactgaaaaagctttgtttcctcctcagcttcagcctctttccatgtgcgttcctgaagctatgtgtgggatattagtatagaggaaggggaggtcttctcacctctttccatttttccccccgccataagttcacaaagtttttcacattagaaactgttaaaacataaacaacttttctggaaccaaattaatcttttgacttcatggttcataccgtgtgacactggagtttgggcaggagggtggagatacaaggtgtttggacccttctggtttatgggattgtctttttccctttttccccttaggaaccacgtgaatgttgagggggcgacacacaagcaggtggtggacctgattcgagcaggcgagaaggaattgatcttgacagtgttatctgtacctcctcatgaggcagataacctagatcccagtgacgactcgttgggacaatcattttatgattacacagaaaagcaagcagtgcccatatcggtccccagatacaaacatgtggagcagaatggtgagaagtttgtggtgagtgtcagcccaactcgatcctcgaacatctagctttgtttcccctagtcttataattatgaaactattatagtggtagataaaaggctgcaacctaggtcagtttgtctaccaggaggatgagttcacacataaataaaagacactgaccctgatttattgcagggggtgaattacagtagtggaaaagagtcctactcagcttgagtataattccattttatttttagatagtttcaagtttgcattctggtttgtcgtaaacgtgtgagtttttgtttagtttcttttttgtttgttcttttgttggttgccgtatctctttgctaatagtatcttatttactgttgattctgtggtgctatagggcaagattaatgtaaaaggatggtgtccttcaagatatttgggtaatagagaggttcacccatttcagaacttagatgtctctactcttctttccacatcatgttctttttcattttctttggagatatccgtgtgaatgattaactgtggtttttcccacgagtttcctgaatgcaattcccatgagctgtttcacacatttctaatctgttgctgttgtagctatgcaggaaagcccatcttgaatttttagtgatgtgtgctagcccctttgctgaatgcctttgttcttcagagcctaattgccactgatagctcagtctacttaatttttcttttggttgcaatatgctttatttgcctttaattatttgtggagtgttgatataatgagaaatgttcattattcttagtagaaaatgcagtgggttctgttagatgctggcaaacagactacaggttttaaagcttaacagttgactaaagttacagtctctaaaactgagatttatcctctgcataggaacgagctactaaacatttatggtaaattctttttagtgaagagataagaaaagcaaggaagctaaaagagttgcagaggatcaaataatgcttggttgcatctgtaattagctgtagataatggcatataggttttatttcagcatggacttctgtagtcttagaaccacacacagaatttagagttttatgcttcctaagtgctaactttgagtcataaggcatgtaagaagttgaaatcaaggtcacatcctaaaagtagagcagtctggatgttgagaccttttgggaattacctaaaaccttggaaacctgagaaaaggaataatactaccaattgtacctttgtttatttttatttttattatatatattttttaagacgaagtctcactctgtcccccagcctggggtacagtggtgtgatcttggctcactgcaatctctgcctcccgggttcaaacaattctgcctcagcctcccaagtagctgggattacaggtgcgcaccaccatgccctgctaagttttgtatttttagtagagatggtgtttcaccatgttggccaggctagtctcgaactcctgacctcaggtaatccacctgcctcagcctcccaaagtgctgggattacaggtatgagacactgcgcccagcccactaattgtacttttcaaatcaactttattgaacatagtttacctatattaacattcactcatgttaagtctccacttttacaagttttgacaaatgtacatagtcttataaccaccaccaccaccatgaagatttagaatattttcataccctcaaaagttccctcatgccctttacagttagtcctcaccccttaccactgcccttgtcaaccacggatcagcttactgtcaccatattttacattttccagaatgtcaaataagtagaatcataccatttgtactctcttgtatctggctttgttcagttagtatagtgcttaagattggcagacattgttatttaaaccaaatatttgtccctttttaattgctgagtagtagtccattgtatagatttactacagtttgttcatcctttcattgttcatgcacatgtgggttgtttgcagttttggactagtatgactaaagctgccatgaaataatattaaatgtacaggtctttatgtagacatatgttttcattgctcttgagtatataccaagaagtggaattgcagggtaagtgtaagtttaactttataaaaaactgccaaacagttttccaaagtggctatatcatttttacattatcatatgcagtggagagttccagtggttccataacctcttgatattttcagtctttttaattctagccattctcatggacatagtgataccttactgtggttttaatttgcatttacctaatgactcatgatgatgagctgctttttgtgtgcttaatgggcattcatgtgtcttcattgatgaagtagctgtttaactcttttgcccgtttaaaaaattgggttgtcttattattttattgtaggggttctttatacattctggttctacaagtcctttatcagatatatatatatatatatatatatcatatgtatcatatatatatcatatgtatcagatatatatatcatatatatctgatatatatagcatatatatgatatatatagcatatgatatatatcagatagatatatcagatacatatatatcatatatatgctatatatatctgatatatatgagatatataagatatagatatatatgagatatatatatcagctatagatatatatgagatatatatatcagctatagatatatatgatatatatatcagctatagatatatatgagatatatatatcagctatagatatatatgagatatatatatcagctatagatatatatgagatatatatatcagatatagatatatatgagatatatatatcagatatagatatatatgagatatatatatatcagatatatatgatatattttccagtagcttgaaaaaggacttagataagccaggcgcagtggttcatgcctgtaatcccagcactttgggaagctgaggtgggcagatcacctgaggtcggtggatcacttgaggtcaggagctcgagaccaggctggccaatatggtgaaaccccgtctctactaaaaatacaaaaattagccgggcgtggtggcaggagcctgtaatcccagctacttgggaggctgaggcagaaaaatcacttgaacccgggaggctgaccttgcagtgagccgagattgtgccattgcactccagcctgggcaacatctcaaaaaagaaaaaaaaaaagggacttagatgttttgtaaatatttgagtttgcgacttgccttttcattttttaaaacagtatctttcaaggaacagaaattttaaattttgatatagtctcgtttatcagtttttaaatttatggataatgcttttttgtgttctaagaaatctacctaacccaaggacaccaatcttttatgttttcttacagttttatagtttcagctatctttttttgtaagaactttattattatttatttatttattattagttttttgagatggagtcttgctctgtcacccaggctggagtgcagtggcgcaatcttggctcactgcaagctccgcctccatggttcacgccattctcctgcctcagtctcccgagtagctgggactacaagtgtctgccaccatgtccggctaatttttttgtattttttagtagagacggggtttcactgtgttagccaggatggtctcgatctcctgaccttgtggtccacccgcctcggcctcccaaagtgctgggactacaggcgtgagccaccgcgccctgcctattttttatttttgttttattttattttattttattttttgagacggaatttcactcttgttgcccaggttggagtgcaacggcgtgatcttggctcactgtaacctctgcctcctgggttcaagtgattcttctgcctcagcctcctagagtagctgggattacaggcatgtgccaccacacccggccaattttgtatttttagtagagacagggtttctccatgttggtcaggctggtctggaactcctgacctcaagtgatccgcccgcctcggcctcccaaagtactgggattacaggcatgagcaaccacgcctggccttttatttatttatttatttatttatttatttatttatttatttattttgagacggagtctccctctgtcacccaggctggaatgcagtggtgcgatctcggctcactgcaacctcggcctcccgggttcaagcaattctcctgcctcagcctccccagcagctgggactacaggcacatagcactgcgtccagctaatttatgtgtttttagtagagatggggtttcaccatgttggccaggctggtcttgaactcctgacctcatgatccgcctgcctcggcctcccaaagtgctgagattacaggtgtgagccactgcacccagccataagaactttattaagatatgatttatataccatacgttcacctaaagtgcacaatttagggttttttttatttttttattttttagacagagtttcgctcttgttgctcaggctagagtgcaatagtgcaatctcggctcaccgcaacgtctgcctcctgggttcaagcaattctcctgcctcagcctcccgagtagttgtgattacaggcatgtgccagcacgctcggctaattttgtatttttaatagagatagggtttctccatgttggtcaggctggtcttgaactcctgacctcaggaaatctgcctgccttggcctcccaaggtgctgagattacaggcttgagccactgcgcctggccaatttagtttttagtgtgttcacagaggttgcagtgagcccagatcacaccactgcactctagtttgggcaacaaagtgagacttcgtctcaaaaaaaaaatagataaataaaagtacaattagtaatttcattccttttctcaagttcccaaggttttaggtaattcccaaaaggtctcaacatccagtctgctctacttttaggatgtgaccttgatttcaacttcttacatgtcttatgactcaaagttagcacttttgaagcataaaacaaatttgtaacattttcatcacctcaaaaagaatctcattccttgtagccatcattttccaaacctcccatcccctccaattctaggaaagcactaatctatcctctgtcttatagatttgcgtattctggacatttcatagaaatggaatcatggttttttttgtaactggcttctttcactcagcataatatttttgaggcttattcaagttgtagcatgcatcagtacttcattttaacattccattatatggatataccacttttatttatccattcttcaattgatggacatctgggttctttccacttttgactattatgaataatgctgttatgagcatttgtgtacacgtttttgtgtagatatgtgttttcatttttcttggatatatacctaggaatggaactgctgggtcatatggtaactctttaggtttaaccttttgaggaactgccaaactgttttccgaagtggctgtaccatagtttttactcttacgtttaggtctgtgatccattttgagggatttatttatttatttatttagtatattgtgatataaaggtcaaggtttttttgtttgtttgtttttgagtgtcagctaggctggagtgcagtggcgcaatattggcccactgcagcctctgcctcccgggttcaagcgattctcctgcctcagccctcctgagtagctgggattacaggcatgcgctaccacacctggctaatttttgtatttttagtagagatgaggttttgccatgttggccaggctggtctcaaactcctgacctcaggtaatccacccgcctcggcctcccaaagtgttgggattacaggtgtgagcccttgaccagggtcaaggttttgtttttgattttgtttttatatggatatccagttgtttcacagcaacctgtgttgaaaagaaagttctttcctcattgaaatatcttggcatcattgtggaaaatcaattgactatgtgtggttctatttctgaactttttactctgtttcattggtctgttccttatgtgtctgaacatttgtgtcattttgggattggtttctgttaaatgtcttttcccttgagaatgggtcatattcttctggttctttgtatattgagtcattttggattgtatcttgcatatttatgaatgttacattgtggagactctgggttctgtaatattcctctgaggagtatcgatgtttttgttttagctggcaataagctgtaagctgtgtcgccttctgtgggttaaacttcaaatctcagtttaattctttcagcctttgctgtgctactttgagtctgtatacatccaagaagggattagtctgagatacatgtggtgtttattcttagaattaaggatcaccttctctggttttctcttgtcttggattctccactcactctggtagcagccatggttacctagaatcttttccctatatgtttgagtcagaaagacgtcactttctgagttttagttacttaaattgtgctattttgtaacttatgcccacaagcagggcaaagccctcttaatgcaggagtgtaccccaccctgtgcatcattgctccatgttttgagtcccctccacagtctgcctgcttttagtgtgtaattcagactcctcagataattgtttttgtatttcgtccagaatttatagtggttacagcagaagggttggtctacaggaagtgtatgcactacttgaaatggagttttcagttctgtcaggtttttctttatttataatgaatattatatcttgatgaattgatccctttaacattatttatctctttatataagtctctatctgtaatatatctatctgtctttatccctggtaatattctttgttctgaagtctttctctcatataacatatgagccactaacatatagccactagtagccatgtcacctttctttcggttattgttttcgttgctatattttccatttaacctatttatacatttataattaaactgggtttctcatagaaagcttagagctgggtcttgcttttttatccagtctggcaatgtttttatttggaatgtgtagactacttacctttagtataattattgctatagttaggctaaatctactatcttgttctttgctatctatgttgtatcattatttatttttttcctcatttcctgccttcttttggatggatagagtatttttaaatgattctattttatctctactattgttttattaggtataatttgttttttttcttggtttacagtatatatctataatttatgaacatttaccttcaaattatatatttgaatttgtagttgtatagacataatatatagtacatatatattatatatagtataacactgtatataggtaagtatatctaatatatctaattttataatatataaatatataatatatatttgtattggccattttgtccccccgtcagatgttaattcctacaaatttgtgagttttctagctttccctctgttaccaatttctaactttaccccactgtagttatagaagatacttagcataataccttctgtgtgtgtgcgtgtgtcaaggtttctctctgttgcccaggctggacacagacacacacacacacacacacaaacaaacacacactatatatataatttaagacacttacaagagtatatttccccccgccatcctttgtgctattgttgtcatacattgacttctatatgtgttataaacttaatgatacattgttatctttgctttaaacaattgccttttaggcttcaggattgtcagttaaatataattgtttttgcctgggtctactgacagacaggtttacatcatctctattacttttttttttttttttttaatttgttttttgtttttgagctggagttttgctctcattgcccaggctggagtgcagtggtgagatctcagctcaccacaacttccgtctcccaggttcaagtgattctcctgcctcagccttccgaatagctaaactacacgtgtaagccaccatacttggctaatttttgtatttgtagtagaaacaggatttcaccatgttggccaggctggtctcgaactcctgacctcaagtgatctgcccaccttggcctcccaaagtgctgggattacaggcatgggccaccgtgcccagcctattacatgttttaaggtcataaaactgctacttctggaatatttcttaaacttgcttgatttgtctaaattgagctaaagctgtaaggtctggctgctgggctccctgaaaccttgcacatatcttactgtatgactgtatttcgttttgagtctctggattctggggtttggacagatgaccatagtgaggcctgcagaaatatgcatgtcctcagtgtttggactgccagctgcaaggcagagccaaacccaatatggccccatcatccctggctcagctgtgctacctggccatgctggaaggggtttgatcttccaggaatttgcttcacagctctttcctgtcccaagatctatgcctgatgtgtaaattcaggacccaaaagggcacaaaaaagcaataactactaaatataaggaaaacaactctgtatacagcatgtataaagaaaagcaaggtatatttggggagataaaagttgtaaaggcattaagatgtgtgtttgttgagaaaaaataaatttgtgcatttaagaagttaaaaaaaaaaacaacaaaaaaacaattgccttttaaagagtcggggtttttttgttttttgttttttgtttttgttttttgaggtggagtctcactctgtcacccaggctggaatgcagtagtgcaatcttggcaccctgcaacctctgcctcccaggctcaagtgatctcccacctcaacctcctgagtagctgtgaccacaggtgcgcaccaccacgcccagctcattttttgtgtttttggtagagatggggtttcatcatgttgcccaggctggtcttgaactcctgagctcaagtgatccgccagccttggccacccaaagtgtgctgggattacaggcatgagccaccacgcctggcgttaaagagattaaacatgagaaaagagttattttatatttgatcacatatttaccatttctttctttctttcttttttttgagacggagttttgctctttttgcccaggctggagtgcaatagcgcgatcttggctcactgcaacctccacctcccagattcaagcaattcttctgcctcagcctcccgagcagctgggattacaggcatgaaccaccacgcctggctaattttgtatttttagtagagacagggtttctccatgttgtccaagctggtcatgaactcctgacctcaggtgatctgcccaccttggcctcccaaagtgctgggattacaggcgtgagccaccatgcccagcccatatttaccatttctgatgcactttattcctttgtgtaaatctagtttctgtctggcattagattccctctgcttgaagaacttgcattaatatttcttgcattaatagtgcaggtctgttggcaatgaattctcttagcttttgttgatgtgaaaaagtcttcatttcacctttatattcgaaagattttttcagggtatagaattcttggtggattgtttttttcttttctttttctttttatttatttatttatttttgagacagagtcttgctctgttgcccaggctggagttcagtggtacgatctcggctcactacagcctctgcctcctgggttcaagcaattctctgcctcagcctcccgagtagctgggattataggcgcccgccaccacgcccagctaatttttgtatttttagtagagacagggtttcaccatgttggccaggctggtcttgaactcctgacctcatgatccacccgcctttgcctcccaaagtgctgagattacagacgtgagccactgtgtctggccgattttttaaatttttatttatttatttttttaaagtaccaaaagaaaaaaacaatcactccattgtaatcccagcactttgggaggctgaggcagcaagattgcttgaggccaggagcttgagatcaccctgggcaacatactgagactctgtctctacaaaaaatgaaaaaatagctgggcatggtgacacaatgctggtagtcccacttacttgggaggctgaggcaggaggatcacttcaacccagaaggttgaggctgcagtgagctgtggtcataccactccactccaacctgggagacagagctaaaccctgtctcaatttaaaacaaaatcactccagtcttctggttttcatagtttctgatgagaagcctgcttgttttattttttggtcttttctatggattattttaaccctctctggctaccttcaaagtttactctctttttaaaaaacagagacagggtctcactcagtcatccaggctggagtgcaatggtgcaataatagcccactgcagccttgacctcctgggctcaagtgatcctcctgactcagccttccgagtagctggaactacaggaatgtgccactgtacctgtctaacttttatattttattttattattttatttttttgagatggggtctcactgtgtctcccaggctggagttcagtggcaccatcttggctcgctgcaacctccacctcccagggtcaagcaattctcctgcctcagcctcccaagtagctgggactacaggtgtgcatcaccacacccggctcatttttgtatttttactggagacagggttttaccatgttggtcaggctggccttggacttctggcctcaagtgatctgcccacttcagcctctcaagatgttgggattacaggtgtcggccaccgcacctggccacctaattttaaaaatttttagtagagatggggtcttgctatgttccccaggctattctcacactctcagcctcagcaatcctccttcctcagactcccaaagcactgagattacaggcctgaaccactgcacctggcctgcagcattttctccttatctttagttttcagagtttcatttttacatgtctaggtgtttgtttcttatttgtcctgcttgaggaatatgtggtttgatatcttttattatttttggaaaactatcagccagtatgttttcagacatttcttcagcccattctttttctcttgcctttctggaggttctagttacctgtgttttacactgtttgatattgtcctagagcttttgggtgttttattctattttagctctaatttttctctttttttttaaaatttatttattttttattgataattcttgggtgtttctcacaggggggatttggcagggtcataggacaatagtggagggaaggtcagcagataaacaagtgaacaaaggtctctggttttcctaggcagaggaccctgcggccttccgcagtgtttgtgtccctgggtacttgagattagggagtggtgatgactcttaacgagcatgctgccttcaagcatctgtttaacaaagcacatcttgcaccgcccttaatccatttaaccctgagtggacacagcacatgtttcagagagcacagggttgggagtaaggtcacagatcaacaggatcccaaggcagaagaagttttcttagtacagaaccaaatgaaaagtctcccatgtctacttctttctacacagacacggcaaccatccgatttctcaatcttttccccacctttcccgcctttctattccacaaagccgccattgtcatcctggcccgttctcaatgagctgttgggcacacctcccagacggggtggtggccgggcagaggggctcctcacttcccagtaggggcggctgggcagaggcgcccctcacctcccgggcggggcggctggccgggcggggctgacccccccacctccctcccagacggggcggctggcctggcgggaggctgacccccctacctccctcccagatggggcggctggcggggcggagggctgaccccccccacctccctcccggatggggcggctggcctggcggggctgaccccccccacctccctcccggacggggtggctgccgggcggagacgctcctcacttcccagatggggcggctgccgggcagaggggctcctcacttctcagacgaggcggttgccgggcagagggtctcctcacttctcagacggggcggccgggcagagatgctcctcacctcccagacggggtcgcggccaggcagaggtgctcctcacatcccagacggggcggcggggcagaggcgctccccacatctcagacgatgggtggccgggcagagatgctcctcacttcctagatgggatggcggctgggcggagatgctcctcactttccagactgggcagccaggcagaggggctcctcacatcccagatgatgggcggccaggcagagacgctcctcacttcccagacggggtggcggccgggcagaggctgcaatctcggcactttgggaggccaaggcaggcggctgggaggtggaggttgtagcgagccgagatcacgccactgcactccagcctgggcaccattgagcactgagtgaacgagactccgtctgcaatcccggcacctcgggaggccgaggctggcggatcacttgcggttaggggctggagaccagctcggccaacacagcgaaaccccgtctccaccaaaaccagtcaggtgtggcggcgcgagcctgcaatcgcaggcactcggcaggctgagtcaggagaatcaggcagggaggttgcagtgagccgagatggcagcagtacagtccagcttcggctccgcatgagagggagaccgtggaaagagagggagagggagaccgtggggagagggagagggagagggagagggagagggagagggagacggagagggagagggagaggaaactgaatcttaatctaatttttctctttagataatttttatggacctatcattaagtttgctgattttttcctcagctgtgtccagtctgctgatgagactgttagaggaactcttcatttttgataccacgccttttttttttttttttttttcctcagacggagccttgctctgtcacctaggctggagtgcagtggtgtgatctcggctcactgcaacctccgcctcccaagttcacgcaattctcctgccttagcctcccgagtagctgggactacaggcagccgctaccacgcctggctaatttttgtatttttttttagtagagacagcatttcaccatattggccaggctggtctcgaactcctgacgttgtgatccacccgcctcgacctcccaaagtgctggaattacaggcgtgagccactgcgcccagcccatgcgttttatttctgtcactttcatttgttatttgcttgtaattttcacacctgctgaaattctgtatctgttcatacatgttttctgccttttccttttgcatgagatctttagcattgttaatcacggttattctaataatatgctgcctgataatttcaacatctgggtcatctctgagactgttttatctcttgacataatgttgggtttcttttttttttttttttgagatggagatttgctcttgttgcccaagctggagtacaatggctcgatcttggcccactgcaacctccgcctcccaggttcaagcagttctcctgcctcagcctcctgagtagctcgaattacaggcatgtgccaccatgcctggctaattttgtatttttagtagagacagggtttctccatgttggtcaggctggtcttgaactcctgatctcaggtgatcacccgccttggcctcccaaaatgctgggattacaggtgtgagccaccgcacccagccttttttgttgttgttgttgtttgtttgtttgttttccatttttgttctgtaatatttaacaatgtcaagcatcatgtgtggaataatagtagagatgactgaagtaaatagtgtttcaacttggaaatgggcaatactcttctgttagggaatgtagtcagttaagctgggcttgaattttgttatagctatcattacctttactgtgccataggcctcaagtttctctagcaatgggttgctattaccttgtgcttagagtgagggctggggttctgaaggtttttaaatttatttattttttgttttttgagacaagctctccttctatcactcagactggagtgcagttgcacaataatggctctttgcagccttgacttcctggcttaagcattcctcctgcttcagcctaccaagtagctgggaccacaagcacacgtcatcacatctggctaattttttttttactttttgtagagacagagtcccactattttgttcaggctggtctcaaaatcctgggctcaagtgatcctcctgccttggcctcccaaagtgctgggattatagacaagagccactgtgcccagcctggagagttttttttgttttttttttttttttgagatggagtcttgctctgccaccaggctggagtgcagtggcgcaatcttggctcactgcaacctccacctcctgggttcaagtgattctcctgcctcatcctccctagtagttgggactacaggcgcacaccaccacgccaagctaatttttgtatttttagtagagatggagtttcagcatgttggctgggatagtcttgatcttttgacctcgtgatccacccgtcttggactcccaaagtgctgggattacaggcgtgagccaccgtgcccggccgaccctggagggtttttttcagtgttttgtcctcaggctttcagccacctgtgcataccagtaccacagacaagttctctctttacattcttacccctctgctactggtagactactcttgctttttacttgggctagactcatggtagaggtagatgttgtgtagttcacccttagtcttaggcagaatctgtgtctctgtgtcctgattcttttgcccttccttcttattgcagccaaactcggccttgtatctgtggttagtcttgggaaagcgtttcctgtccctccctcagctatagccgacctctgcttggtaacagtggaggaacctgggcctaatatggtttcctgcctctccccaggggtatagagtattttacttttactccttcccctgaagaagtggatctttgcctgtgcactctgaatgagaggatttactgcctgtcttagcctgttttcactgctttaatagaataacacagattgtaggtcatttataaagaaaagtgatttggcttacagttctagagcctgagaagtctaatatcaaggggccacatctggtgaaggcctttctgttgtgttataacatgaaggaaggcattccctggtggggaagtgcatgtgagacagagagcaaatggggcccaaactcctgagataaataacccactgcctcaataatgacattaatcacgagagttttgccattacctcttaaagatcccacttcttaatacacttcgtaatcccacttcttaatatatgatagctgcttaatgtccttgtctactgattcttttgtcttggtaacttctgagcctgtttctactgactaatttttatcctggtcataggtcaaattttcatgcttttttatatgtctagtaatttttgattggatattgtatattgtgaatgcagtgtgattgggtgctagattttgttacatttctttaaagagtgttggaatttttttttttctcctggcgtacagttaagctacttaaagattactttggtcctttttagctttgtttttaagctctttttgagtagtttagagtaccttttactctagaaccaatttagctccattcctaaagcatggtctttttgagttcccttctaaattccatgcagatttagggaggtctctttattctggctggagggaagttgaatgattccataacctgtgtgaactctgggaattgtttatttactgctcccggctgataatagttctttccttagatcgttattcagtcaaaattcaagggaacttaatacagatttctggagctatgtcttgctttagctccctcttgcatgattagtcctgcaaattgtagctgctttggcctcctcgaacttcagtttctgtttattcaactcagtgaagttgccaaactctgtttgggtacccctccctgagctgcagtttaggagttacctctaggcagaaagctgagattatgttagggatcatcttgtttgcttcccttttctcagggatcaccgttcttagctgcctgttgtccagtgtctgaaaatagttgttgcctacattgtgtccagttttctggttgtatttaatgggaggttaattaccacctggaagtccacagattgttctgtaaatggagaatgttttttatttagggatgatttgattaaaagttgattttaaatattcttggctttaaaagaaatgccagtggaactctacttcatattatatagaggaataagttccagatggattaaggacttaaatgacaaaacaaaaaattaaaagctcttggccggacacgggtctcacacctgtaatcccagcactttgggaggccgaggcgggtggatcacgagctcaagagatccagaccatcctggctaacacggtgaaaccccgtctctactaaaaatgcaaaaaattagccggccatggtggtgggtgcctgtagtctcagctacttgggaggcagaggcaggagaatggcgtgaacccggggggcggagcttgcagtgagcagacatcgtgccactgcactcttagcctgggtgacagagcgagactccgtctcaaaaaaaaaaaaaaaaaaaagaccagtgacaaactggaagaagatattcacaatacacacaaatgaaacagattatgtcaatatataaagaactccataaatcaaatcaataagaaaagccaaaaaacttaatatgaaggtaggcaaaacgcatgagtaggtactttacaaaaaatgacactcacatggtcaataagtatatgaagagatattaaacatcattagtaattaggatcacagaaatcttttcacaccaattccattggcaaaattaagaggatctttttatatattgctgaaagagaataaattggtacaaccactttagcttacatttcggcattatctcctgaggttgaatatgcatataactctgcagttcactcagggttgtactcagaagaatatcttttgcatgtacagcaggaggcatttatacaaatgtcaatggcagcattattcacggtagctaaaatccagaaacaacccaagtgctcatgagtgggagaacagattaaaaacaaacgagcaactatgatatattcacacaacaaaatgctgtatgcagcagagtataccacaaagacatataatgttgtgatgaaactatagtataatattaactgaaaaaagtaagtcctttgaagtatcattcatcttgatactctatttttataaaaccaaaatatcctttaaaattagaataaaaataaaaatttaaggattatatataaatgcaaaaaatatataaaaagaaaagcaagggaatcatgaacatggttggatatgataactttttgcggtcagagaaacagggacataaggatgtggaatagaggaggcggagactatatggtgtaaagtaaattattttcaagatcttagcttagcttttattttgcttttcacattatctgcttaaggaactaacaaaaattccactgttgctgaaatcattttgtttttttgagacagtgtgtccttctattgtccaggctggagtgtagtggcaggatcgtggctcactgcttcctctgcctcctggattcaaacaatcctcccaccttagcctcctgggactacaggcgcatgccaccatgcccagcttcatttttgtatttttttgtagagacagggtttcaccatgttgcccaggctggtcttgaactcttggactcaagcaatctgcctgcctgtcagcctcacaaagtgtgctggaatcacagacgtgagccaccgtgcccaggccgcttacatcatttttaggccttttctttggaatcaactttagagccagtttaggccacacacgagtatcagttacattgctttataatcaaccctaggttttcagctcccttcaaatttgcttgcttattgactcactatatttaccacattggcttcaaatgacttttaactttctgaaaataaaatccaccttaaaaactgataattgcctttgaagatatttaaaagtatgctagaggtcattttaatagcaaaaataagatcacactcctcctgctgggtgcggtggttcaaggtgggtggatcacctgaggtcaagaggtcgagaccagcctggccaacatggtgaaaccccttctctactaaaaatacaaaaattagccaggtatggtggcggatgcctgtaatcccagctattcaggaggctgaggcaggagaattgcttgaacccgggaggcggaggttacaatgagccgagatcatgccactgcactccagcccgggcaacagagtgagattccatctcaaaaaaaccccaaaaaacaaaaacaagatcatgctcctttggtagtccttttttatgcatataactttatgcatgtttgtcaaaagtaagtcttactttaaagtgagcttgaatatagtctttgttaaatgcatagcagaatgcatctaaccaatatcatctaagcctgactagatgattttgtgatttaatttgtattaagtatgcttttcttttgttcttctccttcaccaggtatataatgtttacatggcagggaggcagctgtgttctaagcggtaccgggagtttgctatcctacaccagaacctgaagagagagtttgccaactttacatttcctcgactcccagggaagtggccattttcattatcagaacaacaattagatgcccgacgtcggggattggaagaatatctagaaaaaggtaatccaaaccatcaaactctactatattgagtagacgtaggttctagatatgcaacttctaaactgcatagctgaatttccagaacctcaatagtgaatgtaagtcaggtttctgactaagtattgaatgatctgaactttgaaggcaaaactgaaatgtccagtacagtgatcagtagcctgtttcattggtttgttgaatgcttaacaacaacagaaaaatgaatatttagtttttgatgcatttggtgatgcctaatggacttttttttttagacggagtctcgctctgtcgccaggctggagtgcagtggcacgatctcagctcaactgcatcctctgcctcctgggttcaagtgattctcctgcctcagcctcctgagtagctgggactataggcacatgccaccacgcccagctaatttttgtatttttagtagagacagggtttcaccatgttggccaggatggtctcgatctcttgacctcgtgatccgcccacctcggcctcccaaagtgctgggattacatggacctttatttttagggttatattatctgccagcaaacacatatagactcagcaatatgctgaattgatttgggaactaagtgggcaatattaagacattttaaatatttaagacattttcattaaaatgattcttggcttactgctgtatcctacatgaaaactttattcattttacaggtattcatagataggtttgctgagttgtaggtaatctagagtgcccttgttctaagcaggctaaaggtagatactaatacttctgtattgaattttttgttttgttttgttttgttttgttttgagacagagtctctctctgttgcccaggctggagtgcagtggtgtgaccttggctcactgcaacctctgcctcccaggttcaagcgattctcctgcctcggcctcccgagtagctgggactacagaaacgcaccacatgcccggctgatttttgtatttttagtagagacggggtttctccatgttggccaagctggtctcgaactcctgacctcaggtgatccgcccgtcttcaccttccaaagtgctgggattacaggcatgaaccactgcacctgaccctgtattgaaatttccttgttatctcactgcctccagatgatacatcaggagtctgtggatgtggatggtgaaacatttgtctagaggcgtgagccactgcacctggccctgtattgaaatttacttgttatctcagtgcctccaaatgatacatcaggagtctgtggatgtggatggtgaaacatttgtttgtctaggaaggcagggaaatgacacagatctcctcaataagatagctcatcttctggctcagggaagagacctttccttgctacattataaagttatattatttggtagctgttcagtaggtttttctctaaaatactggcttatagaataacagttttacgtgatatgtagtcattctgtttccttgtaactaactgacctagttgaatattttaaaaacttttgtagggagccttatcgtgaagagaaaccattttccccatagaaggtagtggaacttctttatctgtttttagctttttctaacatggactggcctctctgaacaaagcccttgggaaatgagaaagggtacaatttttaaaaatcaaacgaagtaaagtcaccagtttaatttaccattctcatgagagtgtcaggaaattaacttccttaaatttagaggattagctacctaccttacctgccggcttgctttcctatcccatcacgtccccccagtttttttttttttttttggtggttgttttgaagctaaagttaaagtcagtaaggtgaaattatgtgaattcttaattacctaccccagttttcccaaaatagcttttaatttttgtggttctctgactggcctgtttttaggccaaataaatatttttcctttagtatttcaattttatatttggtttattcctgattaatctttccctaccactacctctttaccccatgttctgttgttctgcttgttaataggtcacacaagactgcaaagttatatttacggaacttttatttctccctctggttatgtttaatatttttagcaagctacatctttgtattttctattatttctttgttctgatcatatttagatgaatgtttgtcatgccttaaaatcttatataccagacatggtttgctgcctcattattgcctgctactgatgatttaaacttaaaactgatgatttaaacttaaaactttgatacgtctttgactttatattcttgattttaaggccttatgccagattttatctttattttctacagtgtgttcaatacgagtaattggtgagagtgacatcatgcaggaattcctatcagaatccgatgaggtaggtgaatatctcttttagtgattattttccttttggctccttgtgggggaaaataagttaaaggtattgattatgcattaaatttccataagctctccaaaggactccattttttctacttcctttttatatgtatcctacttatctatcctttaagacctaggtccactttctctttgaagtgccaggcccactttctctttgaaaccatccctgatgagttttcatcaatttttcattccaccaaaaacttttgcaattagttccattcagtgatcacatgttgctatctcattctctaatttttgtacatataatcagatagtcgctttatatttttagcttacaagagtgtgagctacctgtaggtaagagctaaatcttgaccatctttatattcccagtgccttaccacagcatcaagcatgttgtaggtgcttaataaatattaattgaatagaagaatgaatatttaatgccaatatagtagtgtgttatccactacttattttatatgtatatgccttgttttcccactagattataaatttcttacaggcaagggcttacaataaatcaatgcttatgattgtttcaggcaatgagtagtacttttttaaaagtggtaaatgaaaatggacttggtctgaaataattttctctcgtaaaaattacaaggtcaaaaattacaaggttagaagaatgtgttaatcatcaaaagcagtaagaggatttcttttgaattaaggagagtaagaattgtttaccttttgctagaagaaaattgggcatcaggctaactttgaaaggaaaaatggatgagactcaggtatccattttttcttttaacaatctcctgattatttcagggttcagaaagaaacttagtatatctcttgatccagtctatatgcctgaccattaataccagagaatatacatcgaaactactgctttcagttgttttctcctctcacttgtgaattctgaatggggaaagggaagcgaatcaaaaatctcatctgtgtttgacctagactgtttcacgcaagtttcctgttttgaaatgtgaacacgttggcttcaacatgtttctttccttcctgcttatcttaaagattaacttctgctgcagccctgaagtcagctttatgacttgtaaatgtattgattttttttcccgttttcattggaactcacttcttctctaccacgttttaggttattgtctagctagcttgttacagggagagtgaagatatactgggccataaattatttctctatgtcttttcccccagaactacaatggtgtgtccgacgtagagctgagagtagcattaccagatggaacaacggttacagtcagggttaaaaagaacagtactacagaccaagtatatcaggtaaattaaatgaacacgtagacttgacattggatggtgtgaagctaaggaagatagattaaataagtcaatacatataaagtgcttagggtgtctggcacataatccgtttattaaatgttagctactattgttattattaatgtgaaagtactttgccctccttaaaagaaaggtacggtaaatatcccaggttgtagtagttgtgattaacgcctcctttttttttggagatggagtgttgctctgtcacccaggctggagtgcagtggcgcaatctccgctcactgcaacctctgcctcctgggttcaagcgattctcctgcctcagcctcctgagtagctgggactacaggtgcccgccaccacacccagctaatttttgtatttttagtagagacacggggtctcaccatgttggccagaatggtcttgatctcctgatctcatgatccacccacctcggcctcccaaagtgctgggattacaggcatgagccaccacgcctggccaacccctcctttttttattgtaaaaaaaccataacacacatgaaaacagaatagtataatgaatctccatatagtaatcatttatatttaataattatcaagattttgccacatttgcgttatgtatgtcttttttcttttcctttaagtatttaaaggcaaatcccatgttatcggacctgtgtgtacttcagtatgcatcttcttacaaaaccacagtgccattatcaaaccttaaaaattagcactattgctttggtattgcctaataactactccatagtcacatttttccaattgtctaaaaatgattttttacatttggtttgttaaaatctgaatctaaacaaggtccttagatcacatttgattttttttttttttttgagacggagtcttgctctgtcgcccagactggagtgcagtggtgcgatcttggctcactgcaagctccacttcctgggttcacgctattctcctgcctcagcctcccgagcagctgggactacaggcgcccaccaccacgcccggctaattttttgtatttttggtagagatggggtttcactgtgttagccaggatggtctgaatctcctgacctcatgatcctcctgcattggcctcccaaagtgctgggattacaggcatgagccaccaccccggcctcacatttgatttttatgtttgttttaatatagaacagtccccacttctccccattttttttttcatgccattgttttgttgcagaaatgggtcagtgtcctgtggaatgacccatattctgaatatatctgtttgttttctggtggtgtcatttaataatgtccttctgtgtctctatattttctataaatggaagtttgctctagaggctcaattagattcaggttctgcttttttgataatacttcataattggtcctgtatactttatattgcttctcaacaacaagtacacaatactgggttatcccattttagtggtactgaggttaaccagtaggtttaggtggtgaaatctgatgttttctttgtaaaattcaccactgatctttgatcaaatgaatcgatccattgatgattattgccttaaccagtgatttcattaaagattacaaagtgctgattttctaatactctcatttcttccaccgattagctagaattcttctgaaaataacttttccttgtcaactaacgctatttaattatcttgaaatagataatttcccagtttgtgggaaagacaggatacatatttaagcttttcctttcattgctgattttcagagtaaatatatcattatatataaatataattatatatattaataatatatgatatgttacatattaaacaatatatactttatatataattatataatatactaaataatataataatatacaaataatatatattatttaatatataatgcattatgaaatagtatatattatatataataatttagtctcaggtttttagattcagtgtgatttaatcgataacatatattatctttttgatgctcagattgttccatctttggccaatgaatgctccttcatgtctgctcctgtatgcttttgatgcaacctagtattttcatattatccttgctttttggtacaataagatgtcctggcctcatctttgtatatttcttaccctagatatctagaataggacatttccctaaggagtcctattcttttagtgagaaactgtatttagagatcatgatctgcgtgctgggtgtaatcattgcctgtgtatgccttttcaatggcctttaatcctaacttgatcagaattttcagggagacaagcaggtttctgggtactaatgcttatatttctcttttgtagcaaacattaaaaaacctatcccccatacatttattcattcactgtattttatggcaaatgatatatgcaggatctcaggcatttatgaaattatacaatggtagggaatttcaagaaaagtactatttttacagctttctgatctttttgttttgttttgattgcttttttccagtgttcctctagcaaggcttaggttttttacactttcctcccaactctgttactgagacttctagctataaactattttctaaaccttgaaagcattttaatttctatccagtgcaatatacaatggtaatttagaatgcttataatgtccagttcctctatcacataatggatgaacctaggcctcatatgtgagcagatatgagaagaagggatataatcacatttggcttactgagatactaataatcaacagttttatctttgttttatcaacaaaacaatggcatgaaaaagagataccttacttatattgaggttgatcttgaaaagaaattttgttactaccagtttatgttttgttgttgtttgtatgtaattgtcatttatttgcacacagttttccaatttcttttttatttgtcatattaggacctgagttcctagagagaatgagtgattcttgtttaatatgcctttattgtcccagcattttgctattttatgtagatattatgatggtaattcttaggaaatggaggtgcctaatgatcccaacatgagacatggatcatctaaaaagtaaacaaaaaaattttgtttagccagaatataattgacaaactattttacactctagaatcaaatatatagtttttttgtgttaatgtattaaatgtaggctgaatgtgtgaaactggatatttaagaatttgttttctttttaagatctgtgctattaagtacatttcttgtaagtggtgttaaaaatagaatgaagttattttagagagggaagctgatatttaaggagagactattatcagcttacactggaagggagaagctcgtatttagagataatagctgttggggcagatacaggtgttttttcccttttctttcatatatatgtatgcgtgcatgcatgtacacatacatacaaagaaggatagctatggaccattaatgcaatttttgtgaggccaagatggcagaacctctcccctttccctcctccacagacatacacctgctttttcctacagcattgtctgacttaattttcttgaaaccaatctatcctgtttaaccttaggctatcgcagcaaaggttggcatggacagtacgacagtgaattactttgccttatttgaagtgatcagtcactcctttggtaagtaccagtggctgatactaagttttgttttctaatactatgagaaagaaacatttacctagagaagagcttgaagacaaggggagatcccactcattagaactgtctctaacaatcagaccaagcatatcccattaaactcaggtcataagcatgtctgatcactgttgattctttttcctcttttgtaagtataggttataactagcaatgaatcggaagatgctttcatgaggttcttttaaatctgaggttcaaaattcatatattccaataaaacaggcttaaaaatgggatgttctatttagccacatgttgttttagtgtactttataggatttttgtaaagattcttaagcgtagctttctgttttcagaagttaggaagatatgtgttggttaaaagccttgttttaatgcatacatttaagtttctgtgtgaataaatttcctcttccaaggaaattttattgtgtggtgacaggaaatttatattttattttataaaagctagggatggtggtcacattggttgcattgagactacaaaggggagagagtctgagggctctctctgaatgacatagatttcctacagtttatgggtctcttccatgtcatatatatttatacagggctaaggccaaaattgatatagataatattggttgattagaccttccttatcccagaaagggggagagtttggtagatttaggttgccttgctatctcaggtccaggtagaataactttgattcccctaaagcagccatctccctaatattttttttcttcccaactcacagcagtgtaactagacagatgtaaattatgttacaaaggattactaaggtaccaggacatctggattctaaccttattttttttctaagctttagtttcactttctataaaatggaaaatattaaatctgtcttttgtagtgttataaagccaagtaaacattgagagaggaagtaatctcagcagtttgggaggccgaggcaggaggattgcttgagcccaagagtttgagaccagcctaggcaacatagtgagattgccatctctaaaaaaattttaaaaattagccaagcatggtgacacatgcaggcggtccaagctaggaggctgaggtaggaggatcagttgagcctaggaggttaaggctacagtgagctatgattgtgctacaacactctagcctgggcaacaagtgagaccctgtctcaaaaaaaaaaaaaaaaaaaaaaggaaagaaaagaaaactcagcctctcagcctttccacaaaaaggcaatttagaaattaaaagtggtagtttttttatcctgctcgagtggctgttagaaagaggaagtaacattactcagaagacacttttcagtttgaggaatgctgtaggatttttggaggtgggcggaaaaaaccttttggccttaacaataaaagcagttcattgagaattgccacatgagagactctgaatgtaccatagctgggtaagaggagaggcttgctttaaagatgtttagtgggccgggcgcggtggctcacgcctgtaatcccagcactttgggaggccgaggcgggcggatcacgaggtcaggagatcgagaccatcccggctaaaacggtgaaaccccgtctctactaaaaaaatacaaaaaattagccgggcgtagtggcgggcgcctgtagtcccagctacttgggaggctgaggcaggagaatggcgtgaacctgggaggcggagcttgcagtgagccgagatcccgccactgcactccagcctgggcgacagagcgagactccgtctcaaaaaaaaaaaaaaaaaaaaaaaagatgtttagtggacatgagctgtaactagctaatggattagatattttaactaaatttggagttggtgctgtttgcagagttgtcatgttaactgatctgtgtcttagtccattttgtgttgctataaaggaatacctgaggctgggtaatttataaagaaaaaaggtctatttgtttcatgattctgctggttttcagctgatgtctaccaaacatctttaagactgggttcaaaattgggcatctggtaaggtcctcaggctgttttcttccacctatggtgtgtgtagagatcacattaggccccacctctaacattggggatcaaatttcaacatgaactttgcggggtgacaaatatccaaaccacggcacttgtcattcaagtgataggtttcagttagcttgagacttgactggccatggccatagctagaaaggatatttggctggacagataaggctgttttgtgctcccaaggcagaactccttggtggatttgagatgatgttctggttaatgataacataccattcttgatctgccttacatagtttatactagggaagtttcttatatcttttcactccagctttctgtgttttgtctttcctttagtacgtaaattggcacctaatgagtttcctcacaaactctacattcagaattatacatcagctgtgccaggcacctgcttgaccattcgaaagtggctttttacaacagaagaagaaattctcttaaatgacaatgaccttgctgttacctacttctttcatcaggtaggtgaattgatcttcttgaaaggcacaatttctttttatgtttgaatatagttggtactttgccaattccctgtaaatccttagacaggctgctttgctcctgggtctgaattacatttgtaaaatgttctatcccatttcacgaaagataaataatagataagttttagaagtaaagatatcctggagtttaaaaatacgtattttttaaatatgtattctaatatttttaaacaatagaaaatgagcattgtggctgtgtacctgttcaaaaattttccaccaatattatacatacatagagtttaaagcatcaaatagttctacacagtttattgtgaaaaacagtagttgcccctacttatttccatctccccccataggcaaccaccttcacctcttttagctcttgttttttattggtttgtttgtttgtttgtttggtatttacttctatgtctccattataacttggttatattgctcctacttaatttttcagattccagcagcatctcttcatttcccactattgaagatgagacaccagctgtctttccttctccattcctaccatatacccatacctttttcatctctcccatccccttaatatagtcaaattataatatttgtaaggtcaatatgcagtgtttacaatattatgactgtaaatagtgagatttacaacagagccatataataaacactgtctttacttttcactttctttacattttatttttccccagctaattattgccctcctttttcatttgcttaattttctgtgtacttacaattaatttagctccatactcttcaccagttgtctaaatttcctctaaagacattcagttcagacccatcaggtagttcatgatttccactttctgaagaaatctcctgtggagtctcttcctctatccccgtgtgaagtggcagctctctactgtggtgcacagctggccttctgggattgcccttcactaccaccatctcctgtttccagtgtgagagtacattgtttgttttgttttgctttactcccatatttttgtaggatacattttcagagctgttcctctttttatatatgtaattttttatttttaatttttgtgggtacatagtaggtgtatatattttggggtacatgagatgttttgatacaggcatatggtgtgtaataatcacatcacggaaaatgaggtatccatcccctcaaacatttatcttttgtgttacaaacaatccagttatactcttttagtaatttaaaaatgtacaattaaattattattgactatagtcaccctattgtgctatcaaatactaggccttattcattaattctacctattttttttgtacccattaaccatccctgactcttccccaattccccactacccttcccagagtctggtaaccatcctactctctatctccatgggttcaattgttttgatttttacagtccacaaataattgagaacatgtgatgtttgtctttctgtgcctggcttatttcacttaacatagtgacctccacttccatccatgttgttgcaaatgactgactctcattctttttttatggctgaatagtactccattgtgtgtaagtaccacattttctttatccattcatccgttgatggatgcttaagttgcttctaaatcttgactgttgtgaactgtgctgcagcaaacatgggaatgtggatatctcttcaaaatactgattttctttcttttgggtatatacccagcagtgggattgctggatcgtatgatggttctatttttagttttttgaggaacctccaaactgctctctgagtggttgtacaagttacattctcaccaacagtaaacaagggttccctttcctccatatccttgccagtatttgttattgcctctcttttggatataagccattttaactagggtgagatgatatctcattgtagtttctatgtgcatttctttttttttcctgttgagttgtttgagctccttatatattctgattattaatcccttgtcagatgagtagtttgcaaatattttctcccattctgtgagttgctttttcactttgttgattgtttcctttgctgtgcagaagctttttagcttaatgtgatcccatttgtccatttttgctttggttgactgtgcttgtggggtattacttaagaaatctttgcccagactcatgtcctggagagtttccccgattttttcttgtagtggtttcatagctagaggatttaggtttaattattgaatctattttgatgtgacttttgtatatggcaagagttagggggctagtttcattcttttgcacatggatatccagttttcccagcaccatttattgaagagactgtcttttccccagtacatgttcttggcaccttgtcgaaaatgagttaactgtaggtatgtggatttgtttctcagttctttattgtgttccatcggtctgtgtgtctgtttttatgccagtaccatgctgtttttgttactatagttctgtagtataatttgaagtcaggtaatatgattcctccagttttgttcttttttttttttttttccagagacagggtctcgctttgtcacccagaccagagtgcagtggcatgatcacaactcactgcagccttgacctcctgggcacaggctatcctcctgcctcagcctccccactagctggggctataggcccatgccaccatgcccgactgattttttaagtttttgtagaggtggggggtcttgctgtgttgcccaggctggcttgaactcctaggctcaagatcctcctgccttagcctcctaaattgctgggttacagatgtgtgccaccacaccccacccagttttcttctttttcttaggatatctttggctattctgggtctttggtggttccatataaattttaggatagttttttttttctatttttgtgaagatgtcattggtattttgatagggattgcattgaatgtgtggattgctttgggtagtgtggacattttaacaatatttattcttccaatccatgaacatggaatactttttccatttgttggtgtcctctcttcacctttctttcatagtgttttaatttctttttcagattgttcactgttggcatatagaaatgctgctgatttttgttgttgattttgtatcctgcaactttactgaatttatttatcagttctaatagtttttcggtggagtctttaggtttttccaagtataagatcatatcatctgcaaacaaggataatttgacttcttcctttccaatttggatgccctttataactttgtcttgtctgattgctctagctgggacttctagtactatgttgaataacagtggtgaaagtgggcatccttgtgttccagatcttagaggaaagactttcagtttctccccattcaggatggtagtagctgtggatctgtcatatatagcttttattatgttgaggttccttctatacccagttttttgaggggtttttattatgaaaggatgttgaattttatcaaatgctttttcagcatcggttgaaatgatcatatggtttttgtcctttactctgttgatatgctgtgtcacattgattgatttgtgtttgtgaaccatccttacattcccaaggatatatcctacttgctcatgatgattttttaaatgtattgttgaattcattttgctaatatcttgttgaggatttttgtattaatattcatcagggatattggtctgtagtttccttttttgatatgtctttgtctggttttggtatcaaggtgatactggcctcatagaatgagtttagaagtattccctcctcctctctttttttgaaatagtttgcctagaattggtattaattcttctttaaatgtctgatagaatttagcagtgaaaccactgggttctgggctttcctttactggagactttattatggcttcgatcttgttgcttgttattagtatgttcaggttttggatttcttcatggttcaatctttgtaggttgtatatgtctaggaatttatccatttcttttagattttataatttattgacatatagttaatcatagtagccacaaatgattctttgaatttcttcagtgttgtaatatctcctttttcatctctgattttatttggatcttcttttttttttcttaatctggctaaaggtttgtctgtttaacttttcaaaaaaaccaactttttgtttcattgctctttttttgtatttttttatttcaatttaatttatttctgctctaatctttattatttcttttcttctactaattgggtttggtttgctcttgcttttctatttctttaagatgcatcattgtttgaaatttttgtcttttttttgatgtaggcatttataactataaaattccttcttagtactgcttttgctgtatcccataggttttggcatgttatgttttcatgatcatttatttcaataaatttttaaatttccttctcaatttctccattgacccactggtcattcaggagtatattgtttaatttccacgtacttgaatagtttccaaaattcctcatttttgatttttggttttattccattatagtcagatacttgatattattataatatcactatggtcagatacttgatcatattgatattatttgatattaataatacttgatactccattttttaaaaacgttttaagacttgttttgtgacctaacatatggtctgctcttgagaatgatctctgtgctgaggaaaagaatgagtgttctgcagtcattggatgaagtgttctgtaaatgtctattagattcatttggtctataatgcagattaagtccattgtatctttgttgattttctgtctggaagatctgtccagtactgaaagttgggtgttgaggtctccagctattactgtattagagtctgtctctctctttagctgtaataatatttgctttagatattaaatatatgtcagggtgctccagttttgggtgcacatatatttaaaattgttacatcctcttgctgaactgacccctttatcattatatagtgaccttctttgtcttgtcctatatttttgtcttacaatctattttgtctgatataagtatagctacttctgttctgttttggtttccattgtcatggagtatctttttccatccgtttattttccatctgtgtgtgtctttgtaggtgaagtatgtttcttgtagacaacagatcagtggttcttgtttttttttatttattcagccactgtatgtctgttgattgaagagtttagtccatttgcattcagtgttcctattgataagtaaggccttactcttgccattttgttacttgttttatggtcgttttgtgatcatcttttccttctttccttccttcctgtcttccttttagtgacggtgattttctgtggtgatatgatttagtttcttactttttattttttgtgtatttgttgtatgtttgtaggtttgcagttaccacaaggcttgcaaatactctcttgtaatctgttattttaacctggtaacagcactgtttgcataaacaaacaagcaagcaaaaagaaaacgaataaaggctccatgccttaaatatacccccacactttttaactttttgttgttactatttatatataccttattgtactatgtcttgaaaagttgttgtagttattacttttgattggttcatcaaaccatgtttgatgttttttcattttgaagttatctttttccatgttttcaaaccatgtttcccaggttggtcttgaacccctgagctcaagcagccctctctcctcagcctcacaaagtgctgggattacaggcatgagccatcgtgcctagccaaatcactagtcttctactggcattgaagagggcagtcatctggttccagggaataaaggaaaggatctcagaatttgattgtttctttttttttttttgagacaaagtctcgctttgtcgccaggctagagggcaatggcgcgatcttggctcactgcaacctctgcctcccgggttcaagcaattctcctgcctcagcctcctgagtagctgggattacaggcacccaccaacacacccagctaatttttgtattttttagtagagacggggtttcaccatgttggccaggatggtcttgatctcttgaccttgtgatctgcccacctcggcctcccaaagtgctgggattacaggtgtgagccaccgcgcccggcactgattgtttcttaaatatgctttcggtcagtcctccttattttagccacatctaccacctctcctagatggccacctggtgctacagattcttcggtcttttgggaatttcgtcatataaatttgagtagttctctacttttcctactactaggtagggaatccatttttttttttcaggttttgtaagttactacttatatatccgtgttccagattacaaaattttgttctgattgtttccctttgatctcatgggtttattcctttactgaaattttaatggggttttaggaggaagtaagagttgatacttgtttttaatctgccatccctaattggaagccctcttttaggaacttttcctacaagtatttacatgtatatttggctttaggtctttatatggatgtataatttttacatagttataattttaatacagatacaacctttttcttttcttttttcctttttcatacagttttttatatgtcatttatgactgagttaatgtagtatatgttgtttagtcattccctgttatttgttccagagtttttttgttttgttttgttttgttttgagatgggttttccctatgttgctggggctggcctgggactcctgggctccagcaatcctcccacctctgcttctcaagtagagtgcctgggactacatgtgtgcctggctagagccaggttgttttttgagtatgtgattataaatgatgctgtgattaactcttgtaatatcactttttggtgtctgtctttctttctttctttccctccctccctcccttccttctttctttctttcttttttttttttttttttttttttttttttttttatataggctctcattctgtcacccaggctggagtgcaatggtgtgatcatagttcactgcatcctctacctcttgggctcaggtgatcctgccaccttagcctcccaagtagctagaactacaggtgctcaccaccaggtccagctaatttttacttttttaaaaaaatagagacaggatcttgcagtgttgcccaggctggtcttgaactcctgggctcaggcaatcctcccaaagtgttaggattacaggtgtgagccactgtgcccagatatatttttcttttgaatacagctgtttattgattgtgtttttgtaccttgctgtacaaaaattgctgtattttgttaaacttttatgtctttgccattttaatagatatttactctgttccattgtttttgtttttatcttagtgctattaattttttttttttttttttttttttttttttttttttgagacagagtctggctctgttgccaagactggagtgcagtggcacaatctcggctcactgcaacctctgcctcctgggctcaagtgagcctcccacctcagcctcctgagtagctgggactacaggcttgcactaccacacccagctaatttttgtattttttgtacagacagggttttgccatatcggccaggctcatctcaaactcctgggctcaagcgatctgcctgcctctgcctcctaaagtgctgagattacaggtgtgagccaccacgcccggccaggaattttgttttagagaagttttaacatttagtataacaatgtttatctatcttttccattgtgatttctactaacattttctttcctcaatataagaggacaatagcacacttatatttagtgtgcttttgtcacaatattttatttttaatatttaatgctttaatttacccaaggtttattgtggtgtgtagtatgaatgaatggttggtctaagttaaattttcttggtattgctatccacatagcacatcaggatacattaaatgattcatttctaatacattatgcttaacttgtctttcattaaatttatatctgtctggtgtgtgtgtgtgtgtgtgtatatatatggcctatgtttagcatctctctgctcttaatctgtatttctatttttgactcagtattcccttttgattattgtttctatataatatattttaatatctggtaaggctaagccttccttttttaaaagtcttgatattctttcccattttatgttttctaataatttttaacccatttcataacactttataaagtatctatcctattactattccaactggaattttgttaaatttatagtttactgaagaagaatcaccattttaattaaatgttgtattataataatagatgcataaagtatctattttattcaagttgacttttgtttcctcaaaaaaagttacgtggttttatgttttatcaatgcccccttaaattaatcaccaaggattttatatttttattgctattatgaatggaatattttatctttgtatttttggagtagaaaaatcattagctaggagtcagaatatctgattcaagtataagctctacattgggtaaatcctttgcataacattgctgagatctgttttctcatctgttaaaggggaacagtggtgtgtctcataggtgggtttgtttattttattttaaatgtattttttatttaaaaaattgagaaggtatctcgctatgttgcccaggctggccttgaattcctggcttcaagcaatccccccaccttgacctcccaaagcactgagattacaggcatgaaccaccacacctggctgcttttttttaatgcttatcaaaatttaagtgagggcagagcatgtgaaattgctttttgaagtataaaactagaagacaaaagtatttaagtatttagaaaagttaatgtttttggagcagtatcttatatccagcaacttttctgaactttcctattgcctcaaatgatttctaaacagctttattgaggtatagtttacatacaataaactgtacatatttaaagtatacaatttgataattttttaaatttctaagccatttttagtgtatagttcaatagtgttaagtatattcacaatgttgtgtaacagatctccagaattcttttttttaaaggaggggacagaatctcagtctgccacccaggctggagtgcagtgctgcggtcatagctcaccataatcttgaacgtctgacctcaaacgatcctcctacctcagcctcccaaagtgttgggattaccaggcgtgagccactgctcctggcccagaactcttttaatcttgcaaaagattaaaactgaaactctgtacccatcaaacaactccccgttttcctctcccccttggcaactaccattctactttttgtttctatgaatttgactactttagatatttaatgtaagtgtaattatacactatttgcctttgttataactggcttatttcacttaacataatggcctcaagtttcatacgtgttgtggtagtatataacagggtttccttcctttttaaggctgaataataatatgttgtatgtatatcccacatttaatttatccattgatccatggacagttgggtttctttcatttcttggttattgtgaataatgctgctgtgaacatgggtgtgcagatatcttgttgagatccttttttcaatatacccagaagtgggattactgaatcatatggcagttctattttcaacttcttgaggaactgctatactattttccatagtgactgcaccatctcaaatgacttatttttttgttttgttttttattttttggagacagagtcttgctgtgtctcccaggctggagtgcagtgggatgatctcggctcactccaacccgtgcctcctgggttccaatgactcttatgcctcagcctttttgaagtataaaactagctggcactacagttgcatatcaccaagcccagctaatttttgtatttttagtagagatggggttttaccatgttgccctggctggtctcaaaactcctggtctcaaatgatccacccagcttggcctcccaaagtgctgggattacaggcatgagccaccgcacctggccacaaacactgtgcctggcagctgttttttgatggactaagtaaacaactgtatcttttgaaaagtatattaaatttctcttacttaatttcaattatttttgtatcatattttgatggtaggaatatttaacgaatttcacagttctaaaatgttatcaattataagatgcaccattattttatgtattgataagagaaaaaagctgtcagttaaactgatacatcattgattgtaagatacatcccaatttcagaaatgttaaaatatgaaataatgtattcatttaaattgatgagatattatatgttagttgctaatggtaataatgaaccttttccttaaaaattaataaggtagaaattaatcatttatatttaaattctggctaaacctagcaaagtgtacacacatttaagctgctgtttcctgaaagctcacaaaagtagcagtattggaattttaaaaagcgtaaacttgcaaggacaaagagaacaagggaggataccacagcaaatgacaaccgttgacagtttttagaaaatgaatgtctaagtaaaagagttttgatatttggttattgtggaggaaaaattggtgataggtacatgggaagttacaaacaaaaacacgaggcatttaacctcagaggaaataaaaaattttgcaagaaaggaagtcatagcatagtatatagcttagttgtgaatagtgtttacatatttataataatgcagttattgagtatttaattttttattgagaagttgggggaagaggaagtgggagtgtttgggtgctacaagagagttaaaaccaaatattttcaacacagtaagtcaacagtgtctaaaattggtaagtcaagaattgtcaatgtaagcatgccatttagaattatggagggattatcacaagaaattgcttaaagtgcctaaaagtagttgcttttgtggaatgacgctctgggatcagaggctgctgtttttattaggagccttttagtactatatgttttgtttttttaaattatatacatcttttactttaattaaaaaaatttaagaagaaaaggaaactagggtggtgatatttatgttttccacttagtcagtcaagcagtgtaatctttttttttttttttttgagacagagtcttgctctgtctcccaggctggagtgcagtggcatgatctgggctcacggagatgtaacctccgtcttccgggttcaagtgattctcttacctcagactcccgagttgctgggattacctgctccctcctccacatccggctaatttttgtattttagtagaaatggggtttcaacatgttggccaggctggtcttgaactcctgacctcaagtgatcctcccgcctccacctcccaaaatgatgggattgcaggcgtgagctaccacacctgggtaagcaatttcttgattagaaatgaaagaagaccatttttactgccccatgtgtaaaagagctcacttggaattgctggagtagataatcactgtgacccacctctgccttgggaaagtgttcatcaaatattagtactgttgtgagtcagacatagttctaggcgttaggggtaaaaacaaaacagaaagacagtattcttatattcttattctcatcgaaacaatacagaaataaagaaaaatagttgtaaagccttttccctgagctaaataacactgtaagtttctttggaaactggatagaccagtattgtttatttatttcccccctctacttctctgctggcttttcaataattggtttaaatttggctggagcagtacagtgttttggtgatgaagaggaaagtgttcaggatcttcaggacattgacattgcatcgtggttcttcttgaacatcccctctgtggctataatcctcggtgcctaagtgagccttcacttgtatggccaggttggggagagactggcataatctttctattagtcacttcctggcaggacattcatatccttgtacggttcttagaagaacttaatagctaaatgatactaataatagctactgatatatactttacaaaactcttaacatctgtcatctttttcttgtacatctatgagatattccagttttacacagtgaaagggtttacatgacttatgcaagtacacattggtaggtgacagaactagaagttgaattagtctcttaatcttttttttttttttttttttttttgcgatggagtcttgctctgtcacccaggctggagtgcagtggtgctatctcggctcactgcaagttccgcctcctgggttcacgccattctcctgcctcagcctcctgagaagctgggactacaggcgcctgccacctctccccggctaattttttgtatttttagtagagacagggtttcaccatgttagccaggatggtctcgatctcctgacctcgtgatccacccgccttggcctcccaaagtgctgagattacaggcatgagccaccgcgcctggccctcttgacttaatcttgaactcatttgcctatccaactatctttccttaaaatactctgggaaatgctttccaccttgagtaccaaacatcattgatcttccttatttcattctctcttcaggttaattcatgtggctttcaaacacaaatcaaactttctttaataaagaaggagccatttcttattgcttattttagctccctgttgtttatttccttaagtctaaattcctgtgcctactttttaggatttttcataatctagtgttagtctgcctatccagcattatctttaattgtctcctgttcccttatttaaatcaggcaaatctgttttctcaaagtatttaagcacagactcattcctgtttcctatctttagcttatagtttctcttcttcattctgttctttggggatccacctaaggcttccctgataactgtaattatcaataagtgcttccattctgactgcctatatcactgtctgtaccatacatgtttgctatttcattgtaatgcagcattatatactgtctttcagtgctctctaattgtttacacatgtataaaataactggaatttaagtcctctgacacgagaaaccagatctctcacatatacctaaaagaatgcttgagcgcttgccagatattctttaaatgctagttattccaataagtatacctgttactggatgtgttagtccattttcacactgctataaagacactacctgagattaggtaatttataaagaaaggaaggtttttttttgtttgtttgtgcttttttgagatggagtctcgcactgtcacctgggctggagtgcagtggcatgatctcagctcactgcaacctctgcctcctgggttcaagcgattgtcctgcctcagcctcccgagtagctgggattacagttgcctgccaccatgcccagctaattttttgtatttttagtagagacggggtttcatcatgttggccaggctggtctcgaactcctgaccttgtgattcacccgcctcagcctcccaaagtgcaagaaaggaagtttaattgactcacagtttcgcatggcttgggaaagcctcaggaaacttacaatcatggcataaggtgaaagggaagcaagcaccttcttcacaaggtgacgagagagagagcacatgcagggggaactgctgtttttaaaactatcagatctaggccaggtgcggtgtctcatgcctgtaatcccagcactttgggaggtcgaggcgggcagatcacttgaggtcaagagttggagactaggctggccaatgtagtgaagccccatctctattaaaaatacaaaaattagctgggcgtgatggctcatgcctgtagtcccagctactctggaggctgaggcaagagaatcgcttgaacctgggaggcggaggtttcagtgagtcgagattgtgccactgcactccagcctgggtgacagagccagactctgtctcaaaacaaacaaaaaaaccccatcagatcttgtgagaactccctcactatcatgagaccagcatggggaaaccagaccatgatccagtcacctcccaccgggtccctccctcgacatatggggactacaatttgagatgagatttgagtggaggcacagagccagaccatatccctggacatgtggcagagttcactggtaatgatggtggtccaagtggataagagattttctgaaaatgcgtctgtgtctgttttcatcgagaatgtacataataatgatttttacactcctttctgctctacttctgttttggtgataggcagtcgatgatgtgaagaaaggttacatcaaagcagaagaaaagtcctatcaattacagaagctatacgaacaaagaaaaatggtcatggtaagtttatgtccccataatccctttaaaaatgccccttcctacctttaaaacctatagtcctagtcatttttgaaaggattacaacctggttagtggcttaactaattttaaaaaaggaggggaatagggaccttgatgcaaagtccattgtgtttctccatttaacacacaaagatcttgaattactgtgtattagtacataattttattattattttggggggtggggtgggggagggacagagtcttgctctgttgcccaggctgaagtgcagtgtcgcgatctaggctcactgcaacctttgcctcctgggttcaagcgattctcctgcctcagcttcccgagtagctgggactacaggcatgtgccaccacacccagctaatttttgtatttgtagtagagacagggttttgccatgttggccaggctggtctcgaactcttgacctcaggtgatccacctgcctcgacctcccaaagtgctgggattacaggactgagccactgagcctggcccataattttattattaataataactattttttggttaaaaagtgctaaaacaaaagttgtgtaaaacattacaataggatatagataagattgtataagacctgatatttagctttttaacattaggagttattttagtcatgatttagcaatagcaaaatcatttgtttttacagcttccatttctgcagttgcttaaacatttatgctccgtagtgctcttggttagtatatcatcctagaattgtgctatttgattcaatagctactagactcatgtaggtatttaaatataaatttaaattcatttaaattaaatgcaatttaaaattcagttctctagctgctctagccacatttcaatgctaagcagccatatgtgcacagtgaatagctagcatattggactgtgcaggtatagaacattttcatcatcactgaaagttttgccgaacagggctgcctagagtattccttaaatggctttaaattcattttcaatttgtatctgccatagatacagggatggaaattgtcaaaaataaaattagtaaagaacacataaaaatttctactcattataacatttttaaatttctctcttggcagattcacatgcagttgaagttttttcaattatacatgcttctcaacttacgatggggttacatcccaataaacacatcttaagttgaaaatattaaatcaaaaatgcatttaatacacctaacctaccaaacattatagcttagcctagcctatcttaaatgtgatcagaacacatattaccctacagtcaggcaaaatcatctaacacaaagcccagtttagaataaagttatttaaactgttttttttttgagactgagtcttgctgtgtcacccaggctggagtgcagtggtgtgatctcagctcactgcaacctccgcctcctgggctcaagcgattctcctgcctcagcctctcgagtagctgggactataggcacccaacaccacgcttggctaatttttgtatttttagtagagatggggtttcaccatgttggccaggctggtctcgaactccagaccttgagtgaaccgcttgcctcagcctcccaaagtgctggaattacaggcgtaagctaccgtgccaggcctaaagttatttaaagttttgaacaaaaatttgaggtacttgtaaagacagcagaaaagttaaaaaaaaaattgaagtacaatgtctactgcacacacattgttttcacaccatcataaagtcaaaaaagcattaagttaaccattgtaagttagtgaccatctgtatcattttcattctttagtagtgattctgataggtcatttgaattcttttgtaccttctgtgtacttttcaggagagaatattgattcatgtacattaattgggttggaataagaatgcaaacagctgcggggcacggtggctcacacctgtaatcacagcactttgggaggctgaggcgggtggatcacctgaggccaggagttcgagaccagcctggccaacatggtgaaaccccatctgtactaaaaatgcaaaaagtagctgggcgtggtagcatgtgcctgtaatccctgctactcaggaggctgaggccagagaatcgcttgaacccgggaggcggaggttgcagtgagccgagattgcaacactgcacttcagcctggaaaacacagtgagactccgtctcaacaacaacaacaacaacaaaaaatgcaaaccagtcagccattgaacttagcctgtaatcttatatctagctaagttagttattttaatcatttatgtgatgaaaagtaataaatctctataccttagaaaattgccgaagatcagggagccaccttaccaatgttctacgtatcagcaggctgacatagaaaatgcaaaatcttttaaatgtaattaaatcttggcagaattttggttaggagaattttgctatgtgtgagacagaattttaaaacacgacttccacctgttctttaagataatggcattgtcttctatatattaatgcatgattctgaccaatacatttgcatctttttggtgaaaagggccaaatactaacaggccatcaacttctgcagtaatcctttgcctttgctaaagccaacagagttttcttgtttctgaaaagttaatagagtcaaaataatttcataaggtcttctgataataccagtgtggaatacatactgtttctttgcatttatagtattccaaacacactatctttccatctatgtattcaacaaaacatatttgttgagtaccaagtacgtgccaggcacagtgcaaggtgtgagagaaatacataggtttgcattgtgctgtggcaaaatatagaaaatctgaatttaataaacacagtaatctattatgaagtcatttttagacttgtttatattttgtaatcacccaggtaaaaactcaagtatagttgatagacagatatgtttccccatggtcttttgccattgtgtataaaatatgcttaaacatttgtggaattagattgtcttgaaaacctagtgccaacatatttctgtgtactagccacatgatatgatagtcagattttgaagaaaggctcatcaaagtttgaattttatgagtataatatgtattcaagtatcagtgttcaaaggcattagcctagccaatattaggtcatggtcaatacattgaaacttctcacatgggccttctgagcccataggccctgatgccattaaccatagcaactaagtgtggtgaacaggcctacgattaggccaggtcactacaattagtagttgtcacatcactgtgagaactgcagcaacacaatgaacttctcagttttagtttcttttctgtaaaatggggatattccgattatcagctattaagtagaatcttgacaaaatacaccaagattcttggaagataaataagctttgtgtaagttcccctgtcctccaaatcttcaaatacagaagagagctcacgtctgtgcatagtttataatacccagtgtgatcaaaaacatttttgttttttacttacttacaaagttagactgaatctcaaatttggatggttgagaatataatatacaagaaacaatgttttctcttctcttccttcctccctccctccctttctgtctcctcacacaaacagtagacatgtgtaaattatgcttttcttatgttgaagtggcctgattttgcccttgttgaacagataaataaagagcttttgtgtttctctacataatttgtattgatttcacacaaggcagcatgtatgtcagtttttctcaaagtgtggtctccagtctacttacatggaagacacttttgaagctgcttaaaatgcagatttctagactccaccccacatttactaagccagaatctctgggggtaggacctagggaactttatttttaaaaagcacactggtgattctggaacgttaggtgcttcagaatcactactctgattctggttttgggagagttggctcttgaagttcctctcagtcccttacttctattttggacctggtttgacccttagcaggttgtttgggagaacagagagttctctggagtggaccttgacccattcacctaaagtgttctgctctgttaaacactgagtctctgctttaaaaactgtcggcctggcgcggtggctcacgcctataatcccagcactttgggaggccgaggcgggccgatcatgaggtcaggagatcgaaaccatcctggctaacacggtgaaacctcgtctcgactaaaactacaaaaaattagccgggcgtggtggcgggcgcctgtagtcccagctactcaggagactggggcaggagaatggcgtgaacccaggaggcggagcttgcagtgagccgcgatcgcgccgctcactccagcctgggcgacagagcggagtctgtctcaaaaaaaaaaaaaaacaacgaaaaacaaaaaaaaaaactgccctatgtctgtatttatttgtcttgctgaatattgaacatttataaaatatcctgtactatacctgtccaattctctggcttaaatgggccactttctacatgatacatgaataaaggaagataattcgggatacatagttactcaaaacttaaagtgaaaactaagggaagctgtgtccttggtgagacaacagagtaaagtctcactgggagacagggtggtcagagagactcaggttgggtagtatttgtcaactttaagtgggaagtccctgaaaggagaatgggcaggatgatttggtgttttaaataccaaatacccttttaaatatccttatgtaaacatgcttaaaagcaaaaattcagcgaggcgcggtggcttacgcctgtaatcccagcactttgggaggccaaggcaggcagatcacgaggtcaggagttcgagaccagcctggccagcatggtgaaaccccgtctctactaaaagtacaaaaaattgctgggtgtgggggtgcacgcctataatcccagctactcaggaggctgaggcaggagaattgcttgaacccgggaggcggaggttgcagtgagctgagatcatgccactgcactccagcctgggcaacagagtgagactctgtctcaaaaaaaaaaaaaaaaattcacctgtttttacgaatttttgatttatataaataaatttttgtaactcattttaggtttagggacacgtgcagatttgttacatagataaactgcatgtcatgggagtttggtgtacagattattttgtcacccaggtagtaagcatgatactacctgggtgttttttctgatcctctcctgtaaagttttaaatgtttcttctttgaggctttgtgcaagcccaagaatgtagagactgcccacttaatgctgataaatactgcccaatctgagctctctgaaaaccttgtcttccaatgagactttacctttatcggctcaccaagggcacaggtgcccttagttttcacttgggttatttttagagcttatgccattaagaagtcccctgaaggtcttttgctttcaaggactacattcttgaatatggagggataaattagtcttttgattcagaggggacggacagggcatgtattatgtgcctgactggtctaggcactttatatgaagtctcattttctccttataacaaccctgcaggtattattcttactttacagagaagtgaagtctgagagattaagattcttacctaagatgacgtagcttctcagaagtggaactagaatttgaaaatgtgatttgaacccatttttgtcaggctccagtgcatatatttttccctgcatcagggaagacaggatagcagcaatgtcttttatttccagatggcagaagagaagaccccaggtagaataacttactcaaggtcacaaagagagagtttaaggtactcagagctccacgcttcttctgatctcttttcccaaatccctgcctttgtcggcatgcttctctctttttaaaagatctattatagtaaaagtcccaattagagattgtggcagaaatatttgtcaaaacagtagtggtacctctcaacgaagagaactctcaacagatgtgctgtatgtaatcctgttttgttaaaggacatgagtagtactagtttcaagggtcaacgacacccactggcatttacagaggtgttaagtgtcctggagcagaattgctgcttatcgagcatgtaaagtttctgatgactatgttaggaagatggcttggattgagtgccagaggcctggttgctagggtgttctttttcttttaacattttattgtatctatatatacttttttttttttgagatggagtctcagtctgttgcccaggcaggctggagtgcggtggcacaatcccggctcactgcagcctccaccttccaggttcaagcaattcttctgcctcagcctctcatgtagctgggattacaggtgcatgccactatgcctggctaatttttgtatttttagtaaaaatggggtttcaccatgttggccaggctggtctcgaactcctgacctcaggtgatctgcctgccttggcctcccaaagtgctgggattacaggcatgagccaccacacccagctgtataaatttttaaatacataaagaagttggaagaaaaatacaattaatccccttgtatccattacccagcttcgatagccttcgactttctgccattcatgttgcctctatctcactcacatgcttttttcccctcaggagatttgtgtgtttgtttgttttactgtcactgacttgaagctcaccccagggatttttaaaagtaatttccagatactttaaaagtttttttttagctgtcatttattaaatgcctaattatggctgagtactatgttaaatatcttttttatttttatttcttgttttgagacaggtcacttattttgagattgcagtggtgcagtctcagccaggctggagtgcagtggttccatcatagccttgacctcctgggctcaagcaatcctcccacctcaccctcccaagtagctaggactacaggtgcccggcaaattttttttttgtttttttttttatagagatggggtttcactatattgcctaggctggtctctaactcctgggttcaagtgatcctcccacctcagcctcccaaagtgttgggattacaagtgtgagccaccatgcccagccaaatactctgtatttaatgctcacaaatcacactgtggtttagatgttattattatttcccatttatggaagaggaaactgaggcacctgggattaagtaatttgcctgccttaaagtagcttgcgcaaggttgcacagttaggaagtaatggaagtaatggggccaggattcaagcccagggtagtctgggcctcttcctcactcctctgtgtttcaggcattgctgtttattataaccccagaagagttctgttctataccacccacccctgtcatatttaccaaagtataggagtcagagatttattttgtttatagtgccaatggcaggattaagcagtatccatgtttatcactgatctaggaaggacaataaaaaagagaaagtgaaatagaaggtggtatgtgcctatagtcccagctactcaggaggctgaggtaggagaatagcgtgaacccaggaggtggagcttgcagtgagccgagatgtgccactgcactccggcctgggtgacagagccagactctgtctcaaaaaagaaaaagagaaatatttactccctttcttaattgtaaggatagattagatgcccatcccttgattacaatgaaaatagaggatcagactaaacagaattgtgagaccccttctagccctgtgagtcctggttatagtatatcttctggttttcatctgtgtatctttttgtttttctggttttttttttttttttttccttgagacagagtcttgctctgtctcccaggctggagtgcagtggcgcaatctcagctcactgcaacctctgcctcctgggttcaagcgattctcctgcctcagccttccgagtagctggaattacaggcatgtgccaccatgcttggctaattttttgtatttttaggtatttgaggctgcagtgagacatggtcatgccactgcactccatcgagacggggtttcactgtgttagccaggatggtcttgatttcctgacctcgtgatccacccgcctcggcctctcaaagtgttgggattaccggcgtgagccaccgcgcctggcctgtatctttttgaagtagagaaaggagggttagaagtatgaaggtgttgtttccttacttatggcaaaaaaaagtagaagttgaaagtgggataaagaattgctagccaggcacggtggctcatgcctgtaacccttgcactttcggtggctgaggtgggaggattagttgagcccaggagttcaagaccagcgtgcgtaacatagggagaccctgtctctatagaaaatcaaaaaattagctgggtatggtggtgtgtgcctgtggtcccagctacttgggaggctgaggcaggaggatcactggaggctaaggtgggaggattgcttgagccctggaggttgaggtttcagtgagccaagatcatgctactgcactccagcctaagtgacagagcaagacctggtctcaaaaaataaaaagaaaagaattgtctcagagtcctttcccaacttagagatgggtgtgagaccagaggccaggtcttcaggttgttgggtgagaatactctttgttctttttcttgcaccacatctcaatagctctttattgtgtttaataccatagtaaccctgtttcctgtttctccttccttttttttttttttttttttttttttagtacctcaacatgctaaggacttgtgagggctacaatgaaatcatctttccccactgtgcctgtgactccaggaggaaggggcacgttatcacagccatcagcatcacgcactttaaactgcatgcctgcactgaagaaggacagctggaggtgagttttcagcatagggctctggctgcgaggactggagatactttgatgctcacttgcttgtgacgttttaattccattttagggggaaatgaaatcaaaactgtattttgactggggcaaataaacaggcatggaatccacactgatcctcaacttcattggctgcttccactgatttgtattcttctatcacagtcctttctctgaagcgatgcagacatccattcatttctcttctgtctcctggttcagaaccccctacctcagttccccagcactctgaaacacagactgtaccttactcccttgtcttggttgtccagaaccaggtaattgcatttgaatgggatgagatgcagcgatgggacacagatgaagaagggatggccttctgtttcgaatatgcacgaggagagaagaagccccgatgggttaaaatcttcacgccatatgtgagtgcaatttggggaaagtaactgggacttagtttgtttttttgttttttttttcagctaaatgcataaatggagagagagatagagctagtagttgtcttgagatccgaacctgtttgaatcctggagcccccagattcatcctgtttttgctttaggcctgactggaattggcaatttcctatcccacttggctcgtagttaccactagaaggagctagagaatagtggatgaaccaggcctgggttttatggtacttgtcagggtttttctctagactgagtttggaagatgggatgactggggacaggagttcaaaggcacagtcctgagatgcctgctcttgagaagttagtgagtgtcaccaccttttttttcagttcaattacatgcatgagtgcttcgagagggtgttctgcgagctcaagtggagaaaagaggtaattctgaacagtccttgaattgaccttttcatctttttgtttctttaaaatttataggcctgtggccaaatacctgggaccctcacctccatctctgtctttctaggaatattagttagagactgattatctcatgtgagccaggacattcttccagcaaggttggcctctggatggtgaacgggctgtgcaaaaaagccctgcttcttcccttgtctagagggtggacattggctacaggctcttccatctctcatgacttcatggaccctcctctgccagttttttaaatcagatcaccctccatgttgttcctgacccacaggggaagctgtcctcagttgtagccgtcttgactggatgagtcctggcagtctttctaggcgaaccaagaatgtttgtgtgagggaaggtgtttgctgttgctttactgctgtctgtatgtgccagtgctggaacagaatttggaagattctgaataattagttacttattctcaaagaaaatctttgaaagaatcaggaggtcaagtcaagaacatgaaaatttatattttagtacagtagaaagaacattgggctctgggaattttatctgggttttctcctggcttttttttccctctgtgtaattttgggtaaatcagcctccctagctttcagttttctcttctgtgaaacaggaagactgaaccacgtaattaatatccaaggtcccttccggctctaaaaggctatgattctagatgagaagttatatcaagaaagatgtggccaatcagattgagtcatccaggcatacctttttagcttctgtttgtggagttgtctccagataagaggagatgtgccttcccaataactctttttttttttcctttcagaacattttccagatggcgaggtcacagcagagagatgtggccacctagcctttccttatccccttcccttcccttcacccccatcctcttactcctttcatgtcccatttcagacagagtaaccattaacaaaaaagaagagaaaaagttaaagtcgttatattcaaaagccctaaactaaatattattaataaccccctctgaatttcatgtctctggaattgaggtggtagtgaacagcagatcggtcagcaccagaagtcaactgagttaaggcaggaaaagaaataagcccaaccaacttgccaaaggtatctttgtcctttcacctgggcctcataccaacagcctctccttgtactatatttttaaaactggaactatgaacttcatccatttgcactgttcagacatatatatgtatgtatgtaaaaattatatatacacaaattagctgcacgtatatacatatatatatttctttttaaatttcatattgatggcagtaccttttttagcttgtgtttttacacacctttcactagaatccatgacctccctcgtgctctctttcttttgaaacaaactttaaaaaggaaaaaaaagcattttacagggaaaaatacctctcctcatgaaggacttgaaaagtttacaacctgcttggatttttgcccctttttttgtattgagtatagattccggctcatgggttgccatagagtctaggaacaaggagtatagtttctttatcttccaagagggtgctggggaggagaaagaggtgtgtttctcaaggttaacaggctgtagttctgcagggagagcctgaagtcctggtatgggctcttgattctgtgacaatttttttgatccatctatttctctcactcctggctttctagccacattctgcacctccttcctgctttcctagagcctcggtatgctttccctcaaccgaccctggctcaggaggttgatgccatgggaacctgaacctgaaacacttcatggtagtaatttcctgttttccttgccttttttttttttttttttttttttttctgagacagggtcttactctgtcgcccagactggaatgtggtggcatgaacatagctcactgttaccttgaattctgggctcaggtgatccttccgcctcaccctcctgagtagctgggactacaggtgtgcaccaccacacctggctaattcttcttaaaatttttttgtagagacagggtctcactatgttgcccaggctggtctcaaactcctggcctcaggtgatcctcttgtctcagcctcccaaagtgctgggattacaggcatgagccactgtgtccttccctgccttttttgcagcagggatagtactcaggaccagagttaagctgataccttaggcacacaggttggacttacatagaggaaagaaagcaagaaatgccctatgtacatgaggttttacctcctccattcctgaccaataaccacccataactacggcattctctgtgacttccttaaacagcagtgatgggaagggatccaatagtatcttcaaggccttggggaaacttgcagtgggtcagtggtctgtgccaaccaaacgatagccccatccaagccagctgagaacctaggaaggagtagtaggaatatggttgattagattggatctcccaagttttaattgaaaggagactgaacgaaaacctttctgctttctgtccgttaaagagctcctcatctgatcttgcagctagaccctttgagacttaagagctgcatcccaggatcagaagccagggctaattggggtaggacaatattcccagcccctaagctctgtagataatgcataagaagcaccaagtcaggctcagatgcaactaaaacacatctttgagccttttctttttcccttctcccctttctaaacaaaaaccttcctaggatggcatcttttgctctaactgggagacagtcataattggttgtagtcaattctactaagcagtgttggggtggttggaaagtctcttttttgtaatttgtttttgcaaatcattgtgaggccactttttctttctttctttctttctttctttctttctttctttctttcgttctttcgttctttcgttctttctttctttctttctttctctttctttcttttgctttccttctttcatctcttttttgtaatttgttgttgcaaatcattgtgaggccacttttctttccccttccttccttcctttttttctgttttttttttttttttttcccagagtcttgctctgtcgcccaggttggagtgcagtggcacgatctcggctcactgcaccctctgcctcttgggttcaagcgattctcctgcctcagcctcccaagtagctgggattacaggcatacaccaccacgccccactaattttttgtatttttggtagggcggggtttcaccatgatggccaggttggttttgaactcctgacctcaagtaatctgcccacctcggcctcccaaagtgctaggattacaggagtgagccactgcgcctggcccacttttctttctttccttcttattttgttatgctggcagccatttgcccctgcatggtatgggatcaaagaggacagcctttcctccctcaccttctccaaatctaggtgaaatcacagagtacaaaacgtgagaatgctgaatgtgtaaagttgcagagggatccctaatttgaagactttgacacagaactaacttcttttgacttaaatgaatttaaaatgagccaaaggaccctgaaaagaagacatgttgatttcccactcctagatgctaaagagacttggcaccagctttgttcaaactgtaaaaatagcaatttgcccctactcgctcagagtgggacagtagtgaacagagctgggattccatgcgacagcttgaatgctgaccttcagacatgagacatagggatttggaggccccttagaatgggtagatggtgttatgttccctttctggcatagcattcacttggtgctttggagattaggtgagggccctataggtagttggcctgttggcagaatttatttaggaacagcccttttgaaagtgtcccagtaacaacgcacccagctgcagcaaggaggtggggaaggagggcaccccaaaggacagcgccttcttctcttccacccatgcacggccttgggtgatggaggcgggttccctgtggctgcgtggatcccataggatcaagcccttctttgcatgaagcagtgttgtgactcttctctctccccttcctctgcacttcctttctgtaatccctactgttcttcttagtcccagcttctgcccagggaggcttctacccagacttcttttgcaatttgtccctgggaagagggggtctcccagtgcccccagcttcatcccagcagaaccagcaggatcctcctggtctctcactggccttcctccacacttggtttctatcctcaggggtagaagctcagagctttttatggcccaggagaaaatgtagaccctgagaaacctgtccctgcagaaaggttcccttgggccatgctttgggccctctgctctttatatgtttattctattctccatttttccaccccgtccttaccctaggcctaaacacaggtacagatatgtgcatgctcagggcagctcctaggcctggactgagctctcaggggggaattagataaatattccaacatcctcatgcctggcccatttagtttcatcctttagttacccaggccagtagctttgggttatcccttcctgtagctccaaacccagcacttggagcagcaaaatagggcactgacaggagatgaaactctctcctatctcagaatttgccaacttctgggctgggctcctaggaggtagttttcttgaaggggactgcatcctagttgacctgaattttccagaccaggagggactgctgtgctctcccttctcgccatcatactgtttggctagattcattcagcagtagaagctgtttgatctgttgaccccagcatactgctgtttcttcaccagcttcattgtgtcacagtagcttcctttgggaggatgatgtgatagaacactcagagagagggagggagaagagagatagtgggtatgcttctctagctccccatcttccaggtccacctcttgacttcctgttcccctaaacctgagcacatcacgccaggcctctttgctgccaggacagcatcagctcactcctcagcaataatctagggtatgtgggaaggtcagggctgtggtaaggaatagaatcaaagaggggagtgatacggggtgggggcacttggccgcctgctaaacttggacattaattttatatcatgacccccttttaagccagtgagctgggcttcagtttttcccaggccatgcacatttaatttatttcagagaaactctaattgtattttcactgcagtatcttgtattttttatttgtgatttaagaaatgtgaagagaaaatacacagacacaataatggctaacattgtttctttcattccttgttctagagctaaccactctaaaattgtttggtaatgtcacttagtgtaattaattgtaacatattcttttaaataaattgatttattgatcaaacacttctttggtttcctagactacaaatcctttgggttgtgtgggaagaagtgaactgggacctttgagatttgagtcagagtggtcagtctgaaaagaagaaacatctaaccagttttcccaggtaactagtgtggcagttttttgagtgcagggaatggagaagggtgaggaaagaagccacaggaggcccttggtttgcagttctcttcccagtggctcctttgaaaattccttcttctccttcagatctcagaggtgattgagcttacccctcccatctgcaagcttgcacaaaaatcctttgaagaatcacaggattcctttctctgccatgcagatagagcctggcagagcctttggtacagatcttagcaatggaccctcctctccacccccagcaacaggtatatactttttcaggtaaatcgggaaagtttttctctttgggatctggactgaaaggaacacattatgactattgaactgtccagcacaaaactaggcactgtgggtggccttactctcccctgctcccacactcctgagaagaagggtggtcctacagccttttgcttttacagaggcatctgaggggctggggcctaattaccttctctcaagggtatctgttcctctgcacatttgtttatgagctgactctggtctgaaaagctcagcatttgtggtgggtgagacattttaatttttttataaagcttcatttattattatttttacaacttccgatcacacgcttttgttccctaactgatgaccataagaccaaggaccattgtggcactttgtttggcagtttgggaagagacattgttcaggggctcattcattcacccacccattagctttggatatttaaaatctaagaaacactactgtgctaatggaggggggaagtgttacctttcctaagcaaagaatccataaagaagaacaaagtggaattccagaattagagttacagtggttaaagtcaaacatttattaggtatctgctgttgggggtggggtggggagattgtttgagatactgcaacagacacaaaagcaaagaaagaaacatttctgccagcttacaggctcacagaagaatgagacacttacgcatggccatgatacacagcagtgaaaggtttaagtgccataaggactagaaaaggaaggagaaagacctgtggatgagggccgttaagattttcatgaagaaagtagtgtttaaggtgaactgttttagtgtgagaaggatttcaacaagaaggcattcaacaaacatttattgagccgttatgtgccagacactgtagtaactgggaatgaaaagacatgggagaaaagggaccaaacttgcctagagaacaatgaatagttctatttgggtatgtgtaggaatgaagtggaaagtaaggcttcgaagagccttgaatgccaggctgaggtgttctatgaaaaacaacaaaaaacagcagcagagaagttttgttttttattagctgcagtttagaaagattgatgcttcagaacatagacagaaggaccaattaggaaattgctatgattactcagttaataagtgtaggcagtgataattgaaaagagggaaatgatatgagaaagtttgtggaagtgaaatcttaaatgatttaataccattgagtttatgcgaaagtactaaaaactcttgaggttttctgtctatgtgactagaaaatagaaatatatgagtcaggactttatgggagaaagttttagcattggccctatgatgatgtagatatggatgggaagtccagtatagatgtccaacagtcatttcttatttactaagcaatgtctaatatttggggcactgtttagggtgaccaggatacagtgctggacaaagcagactgggtagtaaatgttggtgaattaacttttaaaagatgactcttggcttcttgggagaacaaattgtaggagagcaggaaaagaaacatggagacagatgagagcaatgtgacgtggacagtgttgatggctgtggagatgcagagacatgagtaagtaaatcagctgaatactttagaggtagacttggtagggctttgcagttggattggggaggagacatgagagaaagggtgtaatccaagttttggcttgagtaggtacctagtggtgctgcttactaatgatgaagacagagggtggggtagcagcctagaagcacatgttctatgaagtcaaagaagacacctgtgtgatcctgagcctgccctaaagcagctcacagagaagaatctaggaagtggagggacttagggcttatgcagtccaccctctacctgaaggactcactcctaagcctgcttgctacttcttgggatctttgcctcaggtcaaagaacaggtaagaagagaacatcatgggctttggaatctgacaaactgggttcaactcctacagccatgccttactggctttgtgactccagggaagttagttaaccttccaagcctccttttcccatctataaaattatatcctacctaggctgggcgtggtggctcatgcctgtaatctgagcacttcgggaggccaaggcaggaggtttgcttgagcccaggggttcgagaccagcctgggcaacatagcaagaccctgtctacaaaaaaaaacaccatttttaaaaatgagctgggcgtggtggtgcagccgcttatagtcctaactacttgggaggctgagacaggaggatcccctgaaccaggagttcaaggttgcagtgagctatgatctcaccatcacactccagcttgagtgacagagtgagaccctgtttcaaagtaaataagtaaaataaataaactatagcctgcctcacaaggttgttaggaggtaaaatgaggaaatgcacaataaggacttggaacagaatcacatatggagcagtggttagtaaatggtggtgtcacaactggctcccagtatccacactggcctctgtgcagaaatggaggtccagatgtgagactgcaagtcctcagccttcagagggacagagctggatacaggggagagcccccgacaggggagatctccttgtgccgaactctgcaggacattccagaattaagccccaaagaagggctgaaggacaggatcatgaagccatgaacaaggcctggatgctgctcaaaagcaagggcccggccttccctgatgggattttctctctcaaacctcattctctacctccctcccccttcccagtgtgggtagggaacaatcccctaccctcaaccttccaagactcttatttgatgcttttaaacttttttctttatttagacagaaaagaccaactgtttaaaagtaaaatgcaataaataaataagcatagagaactgtctgaaactgactccccggtctccccttaccacccccacccccaccccattttcttttccctaaaacctcttcctaaagaaaatgatcaggtaataaaccccttgacccctccccacacccctcctcccaatacccaattaccccccaaagcaaagggagaaattaagagagagaaaaaaatccaagggcaacattgtctaaactcccagaaagagagatggcagcgtccgggccaggccgggcgggctggataacgcacgggtggtagtggtatttacacagagggaaccagcagagactgtaaacatttttaggggttcaggggaaggtcttttcctcgtgaaaggaggagggtctctgtggctgactggcagagaggcagccctcagggctcccccacaccctccttagagggggcccttgggggaggcagtgagttttagggctgggagcccaggaatcagggatatcctacctctagctgagggtggaggggagtgagagccagcttccaagaaacccctaatgtggggaagaggctggggtgagggtgagctgggagtgtgtggcaggcccctgcggctctcctggggcctgcacgggtagaacaggcccactgttgggggaggcaagtacaaacgctgggcacagaaggcctgtcacaggagcccagcagaaggcagataccccggagccttcgagcctgttcctcgctccctcacaaaggccaaaagggcatctaggaggaaatgggcccttggagccagggaagcatagccatggcccttcagagaggcaggggggtgggaggggccggtgtcttgtgcccccgggggccacgaagcagcgtttgccccagaacccagtcaaggcccagggcaggtgtgcggagagggccggggccagtcgtgggaagagggtgtgaggcgccccttcctctgggatctccagacctgtgaaggaagaaacatgggtgaagcatggggaagagacccccgatgcggatcacgggctctgggggaggggagggggctggggtgagtgacagcatctaggatggggctgcctgaggaaggcagatcatcaggcctcagtccaaacggacccatctgcccccacccccagccatgagagcagggatagaggagacaggagggagggggcaaaccatacaggaaaccaaacggtattaggaaggaaatagatagcccatgagaaaaataaagactggagggggagagaggcaaagagatgacaacagacaggcaggcagagaaatcgagagagagacagagaagggggtgcgtgtaagagacagacacctggaaaaagaaagggaacacccgcagagaaggccagggcagagcccaggtcacggctcagggatggagtctcatggggtgagaccacccccggcccccagttagtgctctcattcctttttggaaaggaacacagaaagcaagagaaatgcacagaacacagaccacagtcaccaaccactgtagaccaagcacgtcccgcgagctgcccccggccctgaccttgggcttgggggtgcttccctccgcggcccctccccaaagaacaaacaatcggctccaaagacaacacgctcgttccatgcaacttacaggggcccggagcaggggtccggggatgggggcttcggccgacaatggacacgggccctgggctgggggggcccccagggttgggggagttaagcagccaggattggggggaaaggggagaaacagaaaatgtgggtatttttcttgggttgtgttttctcaagggtttggtccaaaggagattaaacagtgcaaaagtaaccaaggctcacagctctgtggccatgaggttgaggtggtggccagcaatggggtggaggagacctaagtaaacttcacaggcggcgcgacatttcaacctcttccacctaaaccagagcaactcccaagaggcctgaaaatgggctcccccagtctgtcctgtgcactctgctgccccatgggtctgctgctacatgggaaaaatcatctgaagtccagggaaaccagggctgatgtcctcacttctcaggacaacagagattctaggagccaaggattctagggccctctggcaccctcagccaaccccttaatcctccagtcctattcccctaattccactctaacccgaaggaaaaccagaaagagacacacacagacatggacactgaccagacaaacgagaccagatattgtggaaggtccagggagtggacacatacatacaaagacttggctctttctggggtcacggagggtgtgtgtgtgtgtgagagagagagagagagagagagtgactcagattattgaaaaacagctgagggagctgccccagccccctgcttcaagtgcccagggtcaagggtggggtgggcatccctgagggtggtggaggacaggggttgggggtgta

SEQ ID NO: 1437 - DNA, 2156 bp, Homo sapiens
gacggggaagggattcatccctcagcccctcacaggaacggaggtggcggcggcggcggggggtctgggctccactgcgccgggaacggcggcgggggaggcggcggcccgcgggtcgtgcgcatcgtcaagtccgagtccggctacggcttcaacgtgcggggccaagtgagcgagggcgggcaactgcggagcatcaacggggagctgtacgcgccgctgcagcatgtgagcgccgtgctgcccgggggggcggccgatcgggccggggtgcgcaagggggaccgcatcctggaggtgaaccacgtgaatgttgagggggcgacacacaagcaggtggtggacctgattcgagcaggcgagaaggaattgatcttgacagtgttatctgtacctcctcatgaggcagataacctagatcccagtgacgactcgttgggacaatcattttatgattacacagaaaagcaagcagtgcccatatcggtccccagatacaaacatgtggagcagaatggtgagaagtttgtggtatataatgtttacatggcagggaggcagctgtgttctaagcggtaccgggagtttgctatcctacaccagaacctgaagagagagtttgccaactttacatttcctcgactcccagggaagtggccattttcattatcagaacaacaattagatgcccgacgtcggggattggaagaatatctagaaaaagtgtgttcaatacgagtaattggtgagagtgacatcatgcaggaattcctatcagaatccgatgagaactacaatggtgtgtccgacgtagagctgagagtagcattaccagatggaacaacggttacagtcagggttaaaaagaacagtactacagaccaagtatatcaggctatcgcagcaaaggttggcatggacagtacgacagtgaattactttgccttatttgaagtgatcagtcactcctttgtacgtaaattggcacctaatgagtttcctcacaaactctacattcagaattatacatcagctgtgccaggcacctgcttgaccattcgaaagtggctttttacaacagaagaagaaattctcttaaatgacaatgaccttgctgttacctacttctttcatcaggcagtcgatgatgtgaagaaaggttacatcaaagcagaagaaaagtcctatcaattacagaagctatacgaacaaagaaaaatggtcatgtacctcaacatgctaaggacttgtgagggctacaatgaaatcatctttccccactgtgcctgtgactccaggaggaaggggcacgttatcacagccatcagcatcacgcactttaaactgcatgcctgcactgaagaaggacagctggagaaccaggtaattgcatttgaatgggatgagatgcagcgatgggacacagatgaagaagggatggccttctgtttcgaatatgcacgaggagagaagaagccccgatgggttaaaatcttcacgccatatttcaattacatgcatgagtgcttcgagagggtgttctgcgagctcaagtggagaaaagagaacattttccagatggcgaggtcacagcagagagatgtggccacctagcctttccttatccccttcccttcccttcacccccatcctcttactcctttcatgtcccatttcagacagagtaaccattaacaaaaaagaagagaaaaagttaaagtcgttatattcaaaagccctaaactaaatattattaataaccccctctgaatttcatgtctctggaattgaggtggtagtgaacagcagatcggtcagcaccagaagtcaactgagttaaggcaggaaaagaaataagcccaaccaacttgccaaaggtatctttgtcctttcacctgggcctcataccaacagcctctccttgtactatatttttaaaactggaactatgaacttcatccatttgcactgttcagacatatatatgtatgtatgtaaaaattatatatacacaaattagctgcacgtatatacatatatatatttctttttaaatttcatattgatggcagtaccttttttagcttgtgtttttacacacctttcactagaatccatgacctccctcgtgctctctttcttttgaaacaaacttt

SEQ ID NO: 1438 - protein, 351 aa, Homo sapiens
MAGRQLCSKRYREFAILHQNLKREFANFTFPRLPGKWPFSLSEQQLDARRRGLEEYLEKVCSIRVIGESDIMQEFLSESDENYNGVSDVELRVPDGTTVTVRVKKNSTTDQVYQAIAAKVGMDSTTVNYFALFEVISHSFVRKLAPNEFPHKLYIQNYTSAVPGTCLTIRKWLFTTEEEILLNDNDLAVTYFFHQAVDDVKKGYIKAEEKSYQLQKLYEQRKMVMYLNMLRTCEGYNEIIFPHCACDSRRKGHVITAISITHFKLHACTEEGQLENQVIAFEWDEMQRWDTDEEGMAFCFEYREKKPRWVKIFTPYFNYMHECFERVFCELKWRKENIFQMARSQQRDVAT

SEQ ID NO: 1439 - DNA, 2691 bp, Homo sapiens
gacggggaagggattcatccctcagcccctcacaggaacggaggtggcggcggcggcggggggtctgggctccactgcgccgggaacggcggcgggggaggcggcggcccgcgggtcgtgcgcatcgtcaagtccgagtccggctacggcttcaacgtgcggggccaagtgagcgagggcgggcaactgcggagcatcaacggggagctgtacgcgccgctgcagcatgtgagcgccgtgctgcccgggggggcggccgatcgggccggggtgcgcaagggggaccgcatcctggaggtgaaccacgtgaatgttgagggggcgacacacaagcaggtggtggacctgattcgagcaggcgagaaggaattgatcttgacagtgttatctgtacctcctcatgaggcagataacctagatcccagtgacgactcgttgggacaatcattttatgattacacagaaaagcaagcagtgcccatatcggtccccagatacaaacatgtggagcagaatggtgagaagtttgtggtatataatgtttacatggcagggaggcagctgtgttctaagcggtaccgggagtttgctatcctacaccagaacctgaagagagagtttgccaactttacatttcctcgactcccagggaagtggccattttcattatcagaacaacaattagatgcccgacgtcggggattggaagaatatctagaaaaagtgtgttcaatacgagtaattggtgagagtgacatcatgcaggaattcctatcagaatccgatgagaactacaatggtgtgtccgacgtagagctgagagtagcattaccagatggaacaacggttacagtcagggttaaaaagaacagtactacagaccaagtatatcaggctatcgcagcaaaggttggcatggacagtacgacagtgaattactttgccttatttgaagtgatcagtcactcctttgtacgtaaattggcacctaatgagtttcctcacaaactctacattcagaattatacatcagctgtgccaggcacctgcttgaccattcgaaagtggctttttacaacagaagaagaaattctcttaaatgacaatgaccttgctgttacctacttctttcatcaggcagtcgatgatgtgaagaaaggttacatcaaagcagaagaaaagtcctatcaattacagaagctatacgaacaaagaaaaatggtcatgtacctcaacatgctaaggacttgtgagggctacaatgaaatcatctttccccactgtgcctgtgactccaggaggaaggggcacgttatcacagccatcagcatcacgcactttaaactgcatgcctgcactgaagaaggacagctggagaaccaggtaattgcatttgaatgggatgagatgcagcgatgggacacagatgaagaagggatggccttctgtttcgaatatgcacgaggagagaagaagccccgatgggttaaaatcttcacgccatatttcaattacatgcatgagtgcttcgagagggtgttctgcgagctcaagtggagaaaagaggaatattagttagagactgattatctcatgtgagccaggacattcttccagcaaggttggcctctggatggtgaacgggctgtgcaaaaaagccctgcttcttcccttgtctagagggtggacattggctacaggctcttccatctctcatgacttcatggaccctcctctgccagttttttaaatcagatcaccctccatgttgttcctgacccacaggggaagctgtcctcagttgtagccgtcttgactggatgagtcctggcagtctttctaggcgaaccaagaatgtttgtgtgagggaaggtgtttgctgttgctttactgctgtctgtatgtgccagtgctggaacagaatttggaagattctgaataattagttacttattctcaaagaaaatctttgaaagaatcaggaggtcaagtcaagaacatgaaaatttatattttagtacagtagaaagaacattgggctctgggaattttatctgggttttctcctggcttttttttccctctgtgtaattttgggtaaatcagcctccctagctttcagttttctcttctgtgaaacaggaagactgaaccacgtaattaatatccaaggtcccttccggctctaaaaggctatgattctagatgagaagttatatcaagaaagatgtggccaatcagattgagtcatccaggcatacctttttagcttctgtttgtggagttgtctccagataagaggagatgtgccttcccaataactctttttttttttcctttcagaacattttccagatggcgaggtcacagcagagagatgtggccacctagcctttccttatccccttcccttcccttcacccccatcctcttactcctttcatgtcccatttcagacagagtaaccattaacaaaaaagaagagaaaaagttaaagtcgttatattcaaaagccctaaactaaatattattaataaccccctctgaatttcatgtctctggaattgaggtggtagtgaacagcagatcggtcagcaccagaagtcaactgagttaaggcaggaaaagaaataagcccaaccaacttgccaaaggtatctttgtcctttcacctgggcctcataccaacag

SEQ ID NO: 1440 - protein, 338 aa, Homo sapiens
MAGRQLCSKRYREFAILHQNLKREFANFTFPRLPGKWPFSLSEQQLDARRRGLEEYLEKVCSIRVIGESDIMQEFLSESDENYNGVSDVELRVPDGTTVTVRVKKNSTTDQVYQAIAAKVGMDSTTVNYFALFEVISHSFVRKLAPNEFPHKLYIQNYTSAVPGTCLTIRKWLFTTEEEILLNDNDLAVTYFFHQAVDDVKKGYIKAEEKSYQLQKLYEQRKMVMYLNMLRTCEGYNEIIFPHCACDSRRKGHVITAISITHFKLHACTEEGQLENQVIAFEWDEMQRWDTDEEGMAFCFEYREKKPRWVKIFTPYFNYMHECFERVFCELKWRKEEY

SEQ ID NO: 1441 - DNA, 2355 bp, Homo sapiens
ctcggtggccgagtcggtcccgcggccggcggatcgggcgcgcgcgtcgggggtcgtccggctgccaggaaccacgtgaatgttgagggggcgacacacaagcaggtggtggacctgattcgagcaggcgagaaggaattgatcttgacagtgttatctgtacctcctcatgaggcagataacctagatcccagtgacgactcgttgggacaatcattttatgattacacagaaaagcaagcagtgcccatatcggtccccagatacaaacatgtggagcagaatggtgagaagtttgtggtatataatgtttacatggcagggaggcagctgtgttctaagcggtaccgggagtttgctatcctacaccagaacctgaagagagagtttgccaactttacatttcctcgactcccagggaagtggccattttcattatcagaacaacaattagatgcccgacgtcggggattggaagaatatctagaaaaagtgtgttcaatacgagtaattggtgagagtgacatcatgcaggaattcctatcagaatccgatgaggctatcgcagcaaaggttggcatggacagtacgacagtgaattactttgccttatttgaagtgatcagtcactcctttgtacgtaaattggcacctaatgagtttcctcacaaactctacattcagaattatacatcagctgtgccaggcacctgcttgaccattcgaaagtggctttttacaacagaagaagaaattctcttaaatgacaatgaccttgctgttacctacttctttcatcaggtagtcgatgatgtgaagaaaggttacatcaaagcagaagaaaagtcctatcaattacagaagctatacgaacaaagaaaaatggtcatgtacctcaacatgctaaggacttgtgagggctacaatgaaatcatctttccccactgtgcctgtgactccaggaggaaggggcacgttatcacagccatcagcatcacgcactttaaactgcatgcctgcactgaagaaggacagctggagaaccaggtaattgcatttgaatgggatgagatgcagcgatgggacacagatgaagaagggatggccttctgtttcgaatatgcacgaggagagaagaagccccgatgggttaaaatcttcacgccatatttcaattacatgcatgagtgcttcgagagggtgttctgcgagctcaagtggagaaaagaggaatattagttagagactgattatctcatgtgagccaggacattcttccagcaaggttggcctctggatggtgaacgggctgtgcaaaaaagccctgcttcttcccttgtctagagggtggacattggctacaggctcttccatctctcatgacttcatggaccctcctctgccagttttttaaatcagatcaccctccatgttgttcctgacccacaggggaagctgtcctcagttgtagccgtcttgactggatgagtcctggcagtctttctaggcgaaccaagaatgtttgtgtgagggaaggtgtttgctgttgctttactgctgtctgtatgtgccagtgctggaacagaatttggaagattctgaataattagttacttattctcaaagaaaatctttgaaagaatcaggaggtcaagtcaagaacatgaaaatttatattttagtacagtagaaagaacattgggctctgggaattttatctgggttttctcctggcttttttttccctctgtgtaattttgggtaaatcagcctccctagctttcagttttctcttctgtgaaacaggaagactgaaccacgtaattaatatccaaggtcccttccggctctaaaaggctatgattctagatgagaagttatatcaagaaagatgtggccaatcagattgagtcatccaggcatacctttttagcttctgtttgtggagttgtctccagataagaggagatgtgccttcccaataactctttttttttttcctttcagaacattttccagatggcgaggtcacagcagagagatgtggccacctagcctttccttatccccttcccttcccttcacccccatcctcttactcctttcatgtcccatttcagacagagtaaccattaacaaaaaagaagagaaaaagttaaagtcgttatattcaaaagccctaaactaaatattattaataaccccctctgaatttcatgtctctggaattgaggtggtagtgaacagcagatcggtcagcaccagaagtcaactgagttaaggcaggaaaagaaataagcccaaccaacttgccaaaggtatctttgtcctttcacctgggcctcataccaacag

SEQ ID NO: 1442 - protein, 305 aa, Homo sapiens
MAGRQLCSKRYREFAILHQNLKREFANFTFPRLPGKWPFSLSEQQLDARRRGLEEYLEKVCSIRVIGESDIMQEFLSESDEAIAAKVGMDSTTVNYFALFEVISHSFVRKLAPNEFPHKLYIQNYTSAVPGTCLTIRKWLFTTEEEILLNDNDLAVTYFFHQVVDDVKKGYIKAEEKSYQLQKLYEQRKMVMYLNMLRTCEGYNEIIFPHCACDSRRKGHVITAISITHFKLHACTEEGQLENQVIAFEWDEMQRWDTDEEGMAFCFEYREKKPRWVKIFTPYFNYMHECFERVFCELKWRKEEY

SEQ ID NO: 1443 - DNA, 1729 bp, Homo sapiens
ctttcctttagtacgtaaattggcacctaatgagtttcctcacaaactctacattcagaattatacatcagctgtgccaggcacctgcttgaccattcgaaagtggctttttacaacagaagaagaaattctcttaaatgacaatgaccttgctgttacctacttctttcatcaggcagtcgatgatgtgaagaaaggttacatcaaagcagaagaaaagtcctatcaattacagaagctatacgaacaaagaaaaatggtcatgtacctcaacatgctaaggacttgtgagggctacaatgaaatcatctttccccactgtgcctgtgactccaggaggaaggggcacgttatcacagccatcagcatcacgcactttaaactgcatgcctgcactgaagaaggacagctggagaaccaggtaattgcatttgaatgggatgagatgcagcgatgggacacagatgaagaagggatggccttctgtttcgaatatgcacgaggagagaagaagccccgatgggttaaaatcttcacgccatatttcaattacatgcatgagtgcttcgagagggtgttctgcgagctcaagtggagaaaagaggaatattagttagagactgattatctcatgtgagccaggacattcttccagcaaggttggcctctggatggtgaacgggctgtgcaaaaaagccctgcttcttcccttgtctagagggtggacattggctacaggctcttccatctctcatgacttcatggaccctcctctgccagttttttaaatcagatcaccctccatgttgttcctgacccacaggggaagctgtcctcagttgtagccgtcttgactggatgagtcctggcagtctttctaggcgaaccaagaatgtttgtgtgagggaaggtgtttgctgttgctttactgctgtctgtatgtgccagtgctggaacagaatttggaagattctgaataattagttacttattctcaaagaaaatctttgaaagaatcaggaggtcaagtcaagaacatgaaaatttatattttagtacagtagaaagaacattgggctctgggaattttatctgggttttctcctggcttttttttccctctgtgtaattttgggtaaatcagcctccctagctttcagttttctcttctgtgaaacaggaagactgaaccacgtaattaatatccaaggtcccttccggctctaaaaggctatgattctagatgagaagttatatcaagaaagatgtggccaatcagattgagtcatccaggcatacctttttagcttctgtttgtggagttgtctccagataagaggagatgtgccttcccaataactctttttttttttcctttcagaacattttccagatggcgaggtcacagcagagagatgtggccacctagcctttccttatccccttcccttcccttcacccccatcctcttactcctttcatgtcccatttcagacagagtaaccattaacaaaaaagaagagaaaaagttaaagtcgttatattcaaaagccctaaactaaatattattaataaccccctctgaatttcatgtctctggaattgaggtggtagtgaacagcagatcggtcagcaccagaagtcaactgagttaaggcaggaaaagaaataagcccaaccaacttgccaaaggtatctttgtcctttcacctgggcctcataccaacag

SEQ ID NO: 1444 - protein, 116 aa, Homo sapiens
MVMYLNMLRTCEGYNEIIFPHCACDSRRKGHVITAISITHFKLHACTEEGQLENQVIAFEWDEMQRWDTDEEGMAFCFEYREKKPRWVKIFTPYFNYMHECFERVFCELKWRKEEY

SEQ ID NO: 1445 - DNA, 1718 bp, Homo sapiens
tacgtaaattggcacctaatgagtttcctcacaaactctacattcagaattatacatcagctgtgccaggcacctgcttgaccattcgaaagtggctttttacaacagaagaagaaattctcttaaatgacaatgaccttgctgttacctacttctttcatcaggcagtcgatgatgtgaagaaaggttacatcaaagcagaagaaaagtcctatcaattacagaagctatacgaacaaagaaaaatggtcatgtacctcaacatgctaaggacttgtgagggctacaatgaaatcatctttccccactgtgcctgtgactccaggaggaaggggcacgttatcacagccatcagcatcacgcactttaaactgcatgcctgcactgaagaaggacagctggagaaccaggtaattgcatttgaatgggatgagatgcagcgatgggacacagatgaagaagggatggccttctgtttcgaatatgcacgaggagagaagaagccccgatgggttaaaatcttcacgccatatttcaattacatgcatgagtgcttcgagagggtgttctgcgagctcaagtggagaaaagaggaatattagttagagactgattatctcatgtgagccaggacattcttccagcaaggttggcctctggatggtgaacgggctgtgcaaaaaagccctgcttcttcccttgtctagagggtggacattggctacaggctcttccatctctcatgacttcatggaccctcctctgccagttttttaaatcagatcaccctccatgttgttcctgacccacaggggaagctgtcctcagttgtagccgtcttgactggatgagtcctggcagtctttctaggcgaaccaagaatgtttgtgtgagggaaggtgtttgctgttgctttactgctgtctgtatgtgccagtgctggaacagaatttggaagattctgaataattagttacttattctcaaagaaaatctttgaaagaatcaggaggtcaagtcaagaacatgaaaatttatattttagtacagtagaaagaacattgggctctgggaattttatctgggttttctcctggcttttttttccctctgtgtaattttgggtaaatcagcctccctagctttcagttttctcttctgtgaaacaggaagactgaaccacgtaattaatatccaaggtcccttccggctctaaaaggctatgattctagatgagaagttatatcaagaaagatgtggccaatcagattgagtcatccaggcatacctttttagcttctgtttgtggagttgtctccagataagaggagatgtgccttcccaataactctttttttttttcctttcagaacattttccagatggcgaggtcacagcagagagatgtggccacctagcctttccttatccccttcccttcccttcacccccatcctcttactcctttcatgtcccatttcagacagagtaaccattaacaaaaaagaagagaaaaagttaaagtcgttatattcaaaagccctaaactaaatattattaataaccccctctgaatttcatgtctctggaattgaggtggtagtgaacagcagatcggtcagcaccagaagtcaactgagttaaggcaggaaaagaaataagcccaaccaacttgccaaaggtatctttgtcctttcacctgggcctcataccaacag

SEQ ID NO: 1446 - protein, 116 aa, Homo sapiens; identical to SEQ ID NO: 1444

SEQ ID NO: 1447 - DNA, 2643 bp, Homo sapiens
cagcagctcggtggccgagtcggtcccgcggccggcggatcgggcgcgcgcgtcgggggtcgtccggctgccaggcagggcgagcacgcgccgggcggaggtggcggcggcggcggggggtctgggctccactgcgccgggaacggcggcgggggaggcggcggcccgcgggtcgtgcgcatcgtcaagtccgagtccggctacggcttcaacgtgcggggccaagtgagcgagggcgggcaactgcggagcatcaacggggagctgtacgcgccgctgcagcatgtgagcgccgtgctgcccgggggggcggccgatcgggccggggtgcgcaagggggaccgcatcctggaggtgaaccacgtgaatgttgagggggcgacacacaagcaggtggtggacctgattcgagcaggcgagaaggaattgatcttgacagtgttatctgtacctcctcatgaggcagataacctagatcccagtgacgactcgttgggacaatcattttatgattacacagaaaagcaagcagtgcccatatcggtccccagatacaaacatgtggagcagaatggtgagaagtttgtggtatataatgtttacatggcagggaggcagctgtgttctaagcggtaccgggagtttgctatcctacaccagaacctgaagagagagtttgccaactttacatttcctcgactcccagggaagtggccattttcattatcagaacaacaattagatgcccgacgtcggggattggaagaatatctagaaaaagtgtgttcaatacgagtaattggtgagagtgacatcatgcaggaattcctatcagaatccgatgaggctatcgcagcaaaggttggcatggacagtacgacagtgaattactttgccttatttgaagtgatcagtcactcctttgtacgtaaattggcacctaatgagtttcctcacaaactctacattcagaattatacatcagctgtgccaggcacctgcttgaccattcgaaagtggctttttacaacagaagaagaaattctcttaaatgacaatgaccttgctgttacctacttctttcatcaggcagtcgatgatgtgaagaaaggttacatcaaagcagaagaaaagtcctatcaattacagaagctatacgaacaaagaaaaatggtcatgtacctcaacatgctaaggacttgtgagggctacaatgaaatcatctttccccactgtgcctgtgactccaggaggaaggggcacgttatcacagccatcagcatcacgcactttaaactgcatgcctgcactgaagaaggacagctggagaaccaggtaattgcatttgaatgggatgagatgcagcgatgggacacagatgaagaagggatggccttctgtttcgaatatgcacgaggagagaagaagccccgatgggttaaaatcttcacgccatatttcaattacatgcatgagtgcttcgagagggtgttctgcgagctcaagtggagaaaagaggaatattagttagagactgattatctcatgtgagccaggacattcttccagcaaggttggcctctggatggtgaacgggctgtgcaaaaaagccctgcttcttcccttgtctagagggtggacattggctacaggctcttccatctctcatgacttcatggaccctcctctgccagttttttaaatcagatcaccctccatgttgttcctgacccacaggggaagctgtcctcagttgtagccgtcttgactggatgagtcctggcagtctttctaggcgaaccaagaatgtttgtgtgagggaaggtgtttgctgttgctttactgctgtctgtatgtgccagtgctggaacagaatttggaagattctgaataattagttacttattctcaaagaaaatctttgaaagaatcaggaggtcaagtcaagaacatgaaaatttatattttagtacagtagaaagaacattgggctctgggaattttatctgggttttctcctggcttttttttccctctgtgtaattttgggtaaatcagcctccctagctttcagttttctcttctgtgaaacaggaagactgaaccacgtaattaatatccaaggtcccttccggctctaaaaggctatgattctagatgagaagttatatcaagaaagatgtggccaatcagattgagtcatccaggcatacctttttagcttctgtttgtggagttgtctccagataagaggagatgtgccttcccaataactctttttttttttcctttcagaacattttccagatggcgaggtcacagcagagagatgtggccacctagcctttccttatccccttcccttcccttcacccccatcctcttactcctttcatgtcccatttcagacagagtaaccattaacaaaaaagaagagaaaaagttaaagtcgttatattcaaaagccctaaactaaatattattaataaccccctctgaatttcatgtctctggaattgaggtggtagtgaacagcagatcggtcagcaccagaagtcaactgagttaaggcaggaaaagaaataagcccaaccaacttgccaaaggtatctttgtcctttcacctgggcctcataccaacag

SEQ ID NO: 1448 - protein, 305 aa, Homo sapiens
MAGRQLCSKRYREFAILHQNLKREFANFTFPRLPGKWPFSLSEQQLDARRRGLEEYLEKVCSIRVIGESDIMQEFLSESDEAIAAKVGMDSTTVNYFALFEVISHSFVRKLAPNEFPHKLYIQNYTSAVPGTCLTIRKWLFTTEEEILLNDNDLAVTYFFHQAVDDVKKGYIKAEEKSYQLQKLYEQRKMVMYLNMLRTCEGYNEIIFPHCACDSRRKGHVITAISITHFKLHACTEEGQLENQVIAFEWDEMQRWDTDEEGMAFCFEYREKKPRWVKIFTPYFNYMHECFERVFCELKWRKEEY

SEQ ID NO: 1449 - DNA, 2424 bp, Homo sapiens
atgggattgtctttttccctttttccccttaggaaccacgtgaatgttgagggggcgacacacaagcaggtggtggacctgattcgagcaggcgagaaggaattgatcttgacagtgttatctgtacctcctcatgaggcagataacctagatcccagtgacgactcgttgggacaatcattttatgattacacagaaaagcaagcagtgcccatatcggtccccagatacaaacatgtggagcagaatggtgagaagtttgtggtatataatgtttacatggcagggaggcagctgtgttctaagcggtaccgggagtttgctatcctacaccagaacctgaagagagagtttgccaactttacatttcctcgactcccagggaagtggccattttcattatcagaacaacaattagatgcccgacgtcggggattggaagaatatctagaaaaagtgtgttcaatacgagtaattggtgagagtgacatcatgcaggaattcctatcagaatccgatgagaactacaatggtgtgtccgacgtagagctgagagtagcattaccagatggaacaacggttacagtcagggttaaaaagaacagtactacagaccaagtatatcaggctatcgcagcaaaggttggcatggacagtacgacagtgaattactttgccttatttgaagtgatcagtcactcctttgtacgtaaattggcacctaatgagtttcctcacaaactctacattcagaattatacatcagctgtgccaggcacctgcttgaccattcgaaagtggctttttacaacagaagaagaaattctcttaaatgacaatgaccttgctgttacctacttctttcatcaggtagtcgatgatgtgaagaaaggttacatcaaagcagaagaaaagtcctatcaattacagaagctatacgaacaaagaaaaatggtcatgtacctcaacatgctaaggacttgtgagggctacaatgaaatcatctttccccactgtgcctgtgactccaggaggaaggggcacgttatcacagccatcagcatcacgcactttaaactgcatgcctgcactgaagaaggacagctggagaaccaggtaattgcatttgaatgggatgagatgcagcgatgggacacagatgaagaagggatggccttctgtttcgaatatgcacgaggagagaagaagccccgatgggttaaaatcttcacgccatatttcaattacatgcatgagtgcttcgagagggtgttctgcgagctcaagtggagaaaagaggaatattagttagagactgattatctcatgtgagccaggacattcttccagcaaggttggcctctggatggtgaacgggctgtgcaaaaaagccctgcttcttcccttgtctagagggtggacattggctacaggctcttccatctctcatgacttcatggaccctcctctgccagttttttaaatcagatcaccctccatgttgttcctgacccacaggggaagctgtcctcagttgtagccgtcttgactggatgagtcctggcagtctttctaggcgaaccaagaatgtttgtgtgagggaaggtgtttgctgttgctttactgctgtctgtatgtgccagtgctggaacagaatttggaagattctgaataattagttacttattctcaaagaaaatctttgaaagaatcaggaggtcaagtcaagaacatgaaaatttatattttagtacagtagaaagaacattgggctctgggaattttatctgggttttctcctggcttttttttccctctgtgtaattttgggtaaatcagcctccctagctttcagttttctcttctgtgaaacaggaagactgaaccacgtaattaatatccaaggtcccttccggctctaaaaggctatgattctagatgagaagttatatcaagaaagatgtggccaatcagattgagtcatccaggcatacctttttagcttctgtttgtggagttgtctccagataagaggagatgtgccttcccaataactctttttttttttcctttcagaacattttccagatggcgaggtcacagcagagagatgtggccacctagcctttccttatccccttcccttcccttcacccccatcctcttactcctttcatgtcccatttcagacagagtaaccattaacaaaaaagaagagaaaaagttaaagtcgttatattcaaaagccctaaactaaatattattaataaccccctctgaatttcatgtctctggaattgaggtggtagtgaacagcagatcggtcagcaccagaagtcaactgagttaaggcaggaaaagaaataagcccaaccaacttgccaaaggtatctttgtcctttcacctgggcctcataccaacag

SEQ ID NO: 1450 - protein, 429 aa, Homo sapiens
MGLSFSLFPLRNHVNVEGATHKQVVDLIRAGEKELILTVLSVPFADNLDPSDDSLGQSFYDYTEKQAVPISVPRYKHVEQNGEKFVVYNVYMAGRQLCSKRYREFAILHQNLKREFANFTFPRLPGKWPFSLSEQQLDARRRGLEEYLEKVCSIRVIGESDIMQEFLSESDENYNGVSDVELRVPDGTTVTVRVKKNSTTDQVYQAIAAKVGMDSTTVNYFALFEVISHSFVRKLAPNEFPHKLYIQNYTSAVPGTCLTIRKWLFTTEEEILLNDNDLAVTYFFHQVVDDVKKGYIKAEEKSYQLQKLYEQRKMVMYLNMLRTCEGYNEIIFPHCACDSRRKGHVITAISITHFKLHACTEEGQLENQVIAFEWDEMQRWDTDEEGMAFCFEYREKKPRWVKIFTPYFNYMHECFERVFCELKWRKEEY

SEQ ID NO: 1451 - DNA, 1820 bp, Homo sapiens
ctcggtggccgagtcggtcccgcggccggcggatcgggcgcgcgcgtcgggggtcgtccggctgccaggaaccacgtgaatgttgagggggcgacacacaagcaggtggtggacctgattcgagcaggcgagaaggaattgatcttgacagtgttatctgtacctcctcatgaggcagataacctagatcccagtgacgactcgttgggacaatcattttatgattacacagaaaagcaagcagtgcccatatcggtccccagatacaaacatgtggagcagaatggtgagaagtttgtggtatataatgtttacatggcagggaggcagctgtgttctaagcggtaccgggagtttgctatcctacaccagaacctgaagagagagtttgccaactttacatttcctcgactcccagggaagtggccattttcattatcagaacaacaattagatgcccgacgtcggggattggaagaatatctagaaaaagtgtgttcaatacgagtaattggtgagagtgacatcatgcaggaattcctatcagaatccgatgaggctatcgcagcaaaggttggcatggacagtacgacagtgaattactttgccttatttgaagtgatcagtcactcctttgtacgtaaattggcacctaatgagtttcctcacaaactctacattcagaattatacatcagctgtgccaggcacctgcttgaccattcgaaagtggctttttacaacagaagaagaaattctcttaaatgacaatgaccttgctgttacctacttctttcatcaggcagtcgatgatgtgaagaaaggttacatcaaagcagaagaaaagtcctatcaattacagaagctatacgaacaaagaaaaatggtcatgtacctcaacatgctaaggacttgtgagggctacaatgaaatcatctttccccactgtgcctgtgactccaggaggaaggggcacgttatcacagccatcagcatcacgcactttaaactgcatgcctgcactgaagaaggacagctggagaaccaggtaattgcatttgaatgggatgagatgcagcgatgggacacagatgaagaagggatggccttctgtttcgaatatgcacgaggagagaagaagccccgatgggttaaaatcttcacgccatatttcaattacatgcatgagtgcttcgagagggtgttctgcgagctcaagtggagaaaagagaacattttccagatggcgaggtcacagcagagagatgtggccacctagcctttccttatccccttcccttcccttcacccccatcctcttactcctttcatgtcccatttcagacagagtaaccattaacaaaaaagaagagaaaaagttaaagtcgttatattcaaaagccctaaactaaatattattaataaccccctctgaatttcatgtctctggaattgaggtggtagtgaacagcagatcggtcagcaccagaagtcaactgagttaaggcaggaaaagaaataagcccaaccaacttgccaaaggtatctttgtcctttcacctgggcctcataccaacagcctctccttgtactatatttttaaaactggaactatgaacttcatccatttgcactgttcagacatatatatgtatgtatgtaaaaattatatatacacaaattagctgcacgtatatacatatatatatttctttttaaatttcatattgatggcagtaccttttttagcttgtgtttttacacacctttcactagaatccatgacctccctcgtgctctctttcttttgaaacaaacttt

SEQ ID NO: 1452 - protein, 318 aa, Homo sapiens
MAGRQLCSKRYREFAILHQNLKREFANFTFPRLPGKWPFSLSEQQLDARRRGLEEYLEKVCSIRVIGESDIMQEFLSESDEAIAAKVGMDSTTVNYFALFEVISHSFVRKLAPNEFPHKLYIQNYTSAVPGTCLTIRKWLFTTEEEILLNDNDLAVTYFFHQAVDDVKKGYIKAEEKSYQLQKLYEQRKMVMYLNMLRTCEGYNEIIFPHCACDSRRKGHVITAISITHFKLHACTEEGQLENQVIAFEWDEMQRWDTDEEGMAFCFEYREKKPRWVKIFTPYFNYMHECFERVFCELKWRKENIFQMARSQQRDVAT

SEQ ID NO: 1453 - DNA, 22274 bp, Mus musculus
  misc_feature (1)...(22274): n = A, C, G or T/U
aaaaaagtactttccccctacattctgtataaatatttattaaaaaagaatctccctatatagtttaaaacctctgtgcaatctttcataatttaatgcaataaaaataaaatgtatgctcagggacatactcagcacagactctgtctagtctaccagtgttttctgaaagagccaagacgtttacattctcaagaaggaatgagaggtgaagaataccattccatgtttgtagctgtgggctctctacctccctggcactggctttgtctcgctgcaccgtggctgccttgctgctggtggtggtggttttctgcctgtggcatagcctcggtgtgcaacttcctaagctctcggcccctggattgaaggcctcgatcccaacaccgttattgttctaggaatgcttccagagtgaccaccaggcgtgcatttgacttttatggtgacttgttcctaagggtaagaacaagcatccaaaaggaaaagtttcttattcaataaatatcacacagacattgttgacaagtctggaagggtggagtttgggaccagttagtgacctcaaaaatggggaggaactgtctgcctaagggactggtagcccttggcttaataaggaaagtgaggagctgaggcgtgccttccatctcagctgggtccagttttcaataacagccatggaaccgaggaaccagaaaaggatcgtccatcagactagcaccagccaaagggaggccgcacgagtgaatgactcttttcttagctcggttccaaataaaaagctcagacttaaaaatattagcacataggaagtggaggcaggatcaggagttcaaggccagcctgggttacaagaaatcctgtttcataatagatagatacatagatatgtagaaagataggtagaaagatagatagatagatagatagatagatagatagatagatagatagatagatagatagataggtagtaggtaggtaggtaggtagtagtagatagatagatagatagatagatagatagatagatagatagatagatagatgtttcttacaggtgtacctgctatggtgcactccttggctgaggtgtgcctgagaaaactgaatttgttttgtcagcttttgtcacacacacacacacacacacacacacacacatacacacagtacactggaaagctgaggcaagagcggaatcgtctcgttcctttgccagacatctgccctgacaggtcatttaccctgttctgtgctatctagagtgggtttgcttcttgcactgaagatctcacttgatttattttttactctggtatcctttttcctttcatacaatatattttgttcatattcctacctcatccccaactgctaccagatccagctttgttgcctttttctctctctctctcaaagagagagagagagagagagagagagagagagagagagagagagagagagagagagaaacaataccccacaaatcaaaccaattttaaaaagaaaacgaagtaaaactggtcttttaggacagcaacacgccaaggaaactattgctattgctattctttctgaggcagtgtctcactcacaggaatccttctgcctcagaccccagagttccagggttacaagggtgtctgccttttccatgcctcttgaggcataatagttgtgtttagcagacaaacatggaggtcggtgtagcaaagccaccgtagttagctgggaatgcaatgtgcacacactgaaggaatgctgatgactccgttgttgaagcctctggttactcagactcgggtaaaagccctactctacagccgccagcgccgtgacgaactgcacgttttcccgatgagcaacacatgctcacacgacagacaactctgtaatgctggggacttgtttatctcctaggaatcagtttttcatcgtgctctgcaagctcataaagcctgctgaaacctctgacgtttctttgttgagagagggaacctctgactaagattgggccgtgaagggtacagaatacagaatccatcccaacactctgtggcctggacacccttgggcctaaagactcaagttgacagtacttagtgctggaacacagcaaacgttaaggccatggaacagactgacaggaattcgaactatccagaccaaagagcagagccattgccaaatcaaagtccagcagacccggagggaggccgtagcccttacttcttgttccccacgctctctgaactctcgctagtgtcttctcttgaccaactccagccaccaagagccagaatgcaagggagcccagctcatcagtctccagggccactgcacaggggagctagaaaatggcctggaagggtagactgaggttagcagtacagcaattctgcaggatcacagttacaaggatgctagcccccagcatctgtggcgctaatgggactcctctgccattatgctactgttctgcggtcccttctaggtttgtagtcacttgggtttctgttacatttggtggcaggccttatatccggggctgttatttctacttttattattattatttctaattatcactttttgtccttttttctaaaatttgcccataattccatgtcctgactttttttttttttgttttttttgatttgttttgtttttttgtctgtctctctggttgattggttggtttatttttggtttgaaacagggtctatctaggtagccctagctgacctggaacaatcgatacagaacaaagctggctgaaatgcatttgccaccatgcctggctgaatggttcattttaatcaaagatttctttcttggacttaccttaatatcctagtcacatgctttccttgggtactggaggctttcagcacttcatgtgtctacatcaccatctgcaacatcatcagcttcctgcagtcagcactccaagctgctgagaccacttcctgtctccagagaagcatccagtgtcctcctcctcttccccactcttttttttttctttttttttaaattctggctccttcactatggtttgttttgcccatttcctatttccttaaaatattatgaagtaaatgctgttattgtataagtcatatattgcttgtgtgtacatgtttgtgcatgtctgtgcatgtctgtgtatgtgtgtgcgctcccgtgtgtgtgtgtgtgtgtgtgtgtgtgtgtgtgtgtgtgtgtgtgtgtatgtgtgtgtgtgtgtgaagtcagggttggatttataatttccagatctccaggccttctctcttagagaagatggcacagtctctatcagttgtgtgatcctattgcctctttttttttcttctcctcctcctcctcctcctctcagattcgaagccagagcaaggcgtcgggctccgggctgcgtgagggggatgaagtggtgtccatcaatggcaacccctgtgcagaccttacttaccctgaagtcatcaagcttatggaaggcataacggactctctgcacttgcttgttaaaaggtaaagcaaatttgttggaagagttatttcttccttgaagttaagtgggaaggattctagagtccatgcctgtagatggttatgaggaagctggcagtactgtgtagaactcaggacaggtacacagtgctgaaagcaagcagttccgttcagtggggctccctgcccagttgagaatgaacttgaaaatctttgttccaggtattttgttgaaaaacttcagtattttagagcacattttcagtgcattaaccatcgtgttaccttttccgaggtgaggagtttctgttaagttcaggattataattcttagatccaaagatgaattgaaaatgattgagcatgaaatagttgactgatgtaataattttttcatacaaagatgaggcctccaggggtggggcacaaaaagcttaccagtaaattttctctggtcaggatgccagtaaaaccatatttgggtaaggagtagcaggctacataaaagactcggtgctgtcaaagcattgcttccagtgcagaggacccctcacccgtgtggtatacgagtccatgtgtgtgcagtgtgtgtactagtgcatggtcattgtatataaatattgttcattgtgtataaatatttgctttcaagctcttaggatcccacatacttataatgttgccctttgcttttaaaagtacccagtaaaaaagtaactatttagaaaccaaatggaaacaaaccaaaaactgtaggaagaacgttgctcagagagcatacatatgtccccactctgtgtaagacttctaaacatttgcagcgttccagggtccccctctgtaaatagtctacgtgtaaagagggacacaatcgtctctgctttgtcctctcttcttgtctttactgacttaatgaggccagtttctctggaacaaacacttgtctggggcatgttcttctggctccactttctattatgatatcatcacaggaggaacaaaaatggcttaaagctccaacttaggtacctaccccattttagcaacaaatagacttgctctctgctgctctgaatagagagactcacgttttgttttgtctttctcttaagcattttgaatttctaaggtagagttaactgggctgcagagagggaacagtggtcaagagcacctgctgctcttgccgagacatgaatttgattctcagtacccgcatggcgcctcaaaaccatctggcaggccagtcatacggatctcttgcccactctgactttcagggtctccaggcatgaatgcagtacaggcaggcaaaacacttacacacattaaaaaatacataaaatcaatcaatcaacattttaaaaaagaaatagatcatcaatgagattcggatgaaatatccagtctctgagccctgtcacagacaactatcttcagaggaccagagtttggcttcattacccagagagggctaacaaaccctatttcaaaacaaaatgcatgccaggcagtagtggccgtcgcctttaatcccagcacttgggaggcaaaggcaggcagatttctgagttcgaggccagcctggtctacagagtgagttcaaggacagacagggttatacagagaaatcctgtctcgaaaaaaaacaaaaacaaaacaaacaaacaaaaaaaaatgcaaccctgccttttaataccaaatcttcattaccttagatttttattaaaatcacaagaaatcataagcaaatgattttctaattgtccacattgtgagactgagtacccgtgtgtacatatctccccctcatgtctttataatttttttatccatttgtttccatttcatttcaattcccaaaaatattagcactggcctgtttgcctatatcccagtctataaggcaagaatcaacactactcctttctcagaagcataattgatgaataaaataattcaaagttatttcagctatccttatcccgaagtctgctagattaactattttgagctttgcactcccaaatttagttaaatgggatgatttatcatttcttacatgggattgaagtacctggatcttcaagctcatgcctacaatccaaacacttgggaggctatgacaggaaggtcttcatgacttggagcctagactacagagtgaatgccaggccctcttagtctacagtataagatactgtctcaaaaagtaaactgaagaatagcctaacctgataacagcgtgttttaaaaagttattttctaaacagcaaatcattatgaagcttcagaggtgacttgcacagagaaacacagctgctttgatttttgtcaggttctttcaaatgcagtcaaaaatcatagttagaggtaaacatattgtacgttggcctgaaattccccttgcacataattctagagtaaattactttgagtagaagagatgtaaggccatccgccctttcgtggatgatccctgcactagttaggatccatcccaagggagcaagaagggaagagagagttcttgctgctgcttcaaacatttacaagtgtgggagatgaagacatgtcttagagctcggggatttagaaagacgttatttgactcctgaagtgatgttgcttctcacaaacccaaagatgcaaacctgactgtgaatgggtaggtttgcctcagaggagactgtggaataatagctctgtggaataatatctccttagcagagatacagacacagtctgagaacaaagattctacaaggacggtgctgccggtagcaagcacaagtagaaggaagacgcctcagagaatgaataccccatggcttagcaagtcatctcggcctaggaaggatggatctttgcataggctgcggtcccaatgccccagattgccctttgcacaggcaggctggggtccactatgctcactagtgcttagaaatgggtttctgttcattcactcaagaatacaccatgtctaaaaaattgtattttgtctgatccgaagctccgaatgtgtctacgagatttgataatatctactccacaggacactgggagttcctggacatctatagtaaacatagtttgttggaaaaacccaatttcaaaaaagggacacacatagctacaccctgtgctttttataatcaaggcagggttggggatgagttcggatttcaaagctttttgtaagcacttttcttgtacttgaaggaaagacggtctgatctcaaagctctttatcagccctgtcatgttccagcaagttctgttttctaatatgttgaagttcttgggggaatttttgttgtatcttccacgagacatcatgtaagttggggaaattctttggcaggtgggagacccactgactaactgttaggaattatttttgtgtgcagaccctctagtggaacaagtgagactttggattctgaatcagaaactacaaaccatcaacatcttacacatgaggggcccatggaaagtaccaccctgcagattcagcaagccaccgagacccagagcgaagacttctttcttgctccagtccagactaaagttcccctaactgaggaccaaagcaatgcctggggttatgcagaatgtccaaaagaagaacaagctcccccgatgcttggctcccaggaaggacacttggtagaagaggtcatcttaaggcaaaaggcagaagcaggccagccaggccatgtggttgagctacagctgtccctctcaaaggagagacatcaatgcaccagtggccctatagtgactctccagggaaatgacaaatccacgtctccagacccagactggagctcacaactcgagaggactgtccacataaattcgatccctgctcctgagaaagcagacacttctctgacgtccagcacctccagtggccgagagttgagagtgatccagggaagagacccaggaggcgcagggctgccccaggtggaagtgattctagattgctctgacaggctgaaggctgaagagtgcaggctgcagacaggaagggggtgtgtggcttctcccgtggaaggagggcggtcagaagcacctccttctctggtctcctttgcggtctcgtcagaaggcaccgagcacggagaagatcaacgctcgggaaaggatcagagcagaccacacaagcaccgtgcacgccatgctcgtaagtcctgccatggttggggcgggtgtcaggggagttgggattttagtttattttactagctggactgtataaacttttttaaaaagagttttcgcatgccttttactacctttggtggttatctaatgcacaaaataataaatataaatagtgtggggaaataccagtttttaaattagaagcagtaaatttgaacttcatactagactcaaatgtttttcataaactttatttcatgcctaaatatttttcatcaacttcattttatccccaaagatgcaggaactgttaaagaaatatgaaatacgcccctcttacttgttgaagaatgttatggcattttgtgttaaaaaaaaactttaagaggattggaagctatgtggactcagtttaaataacaattccccctcctgaggtgcctttaacaaggtttccacgctgatattaaaagcagagcttcattttggaaaagaaaaaaaaaaaaccattctgcggcttgatgatgcttgcagaagtgtttgacagacaagggcaagtgtgatgcccagcagttacacgatccgatccttgctgttgtgtaagcctcactaggtggcagcgcgctcaccaccttccagactcaagtctccagggccatgtggcaggcagctcggcagctcagagttctcccccaggaaaagtgcctagtgcaaggccccccactggccttctctcctatctgtaggacgaaggtcacaaacggaaggaggtcaagaactgtagcttcagtaccattattattagttttctttcatagacaccattctttttctttattttaccaacttgagcatttcctctgaggatgcacgggctgactggtacacaatagcagtgagcttgcgtcctcggaatcacacatcagccttctagcccccgttgtcctttgggtgcctatttttagcacagccatttgtagctttgttggcaagtgccggtggccactcctcctgctttagacacctcacatatatagcatattaaacctgagcattatgacggcatgtgcatatttcacatggtggccctgagcagacaactgtgcagttgttactgtcagtgtaatagcaagctgtaacatcactagtcaaaaaaaaatcatatttaagattgcccagattttggactattttgtctgcataaatttgatcaccagataaatatctgtatggtttctcttatttcattttattttgttgttgttgttgttaaattaaccaagtctgacttttaacaagaagaactaatttcaatcgtgaaatatctaatttttctgatatcttcctttaactcgggatatgataaaaatatattttggatcatactcattcaagtggttgaattagttgattctataaactaacttgacattaatttgctttttataataaaatgaaaatataaacttctgccattttaagactgccaagttctatttttaaggcacaattgctacctcagtttcaatgctagtttaaaagacctcaattcatgtaatttttaaattttcccaaggttcccatttattctttctgaaacttaagcaggattatatttgcaagagcctgttaatttacaaagttgtgtagatagtgtccaatctagactgtcacaatgttctagtactctgaaatacaactaattattaactcagtactgtcaattatccagtattatgagttcatattaattcagtagctcagtggaaagatttcaggtggttgtcaaagtaaaaaagaagaaacttaaaaatgtaaatgcattgcattggaatattcaattttaacatttcacatttacatatggcaggacagagtacatcttgttttcaaaatgtattaggttcctaaagtattttcactttaatgcgatcataacctattaactggcagttccaagcctattttttattaaagcttataatctagaggtggggggggggggtgatctgttttctatgtaagtcagcacatctaacgctgtgttcatgggagtaaatgggacaggatatcgtcctgtgctagacatcattgttttataagtgcaaatttgaagtgaagtaaaacgcagtgtagtccctaggtcatgtgcactcccagaacacacaggggtgcggggcaggatgaatgaatgaaaaaataaataaatgagttagatctctccaaatttcgtacccaattatagtatgtctttatatattcattattcattttccccattgggaatcaatttctgtgcatgattccttgcagtcatcaattcagtacaatttgtgtgctttccccagggctcaggaggagtgaaagtctatctgaaaagcaagtgaaagaagcaaagtctaagtgcaaaagcatcgccctcctcctaacggatgctcccaacccaaactccaagggggtgttgatgtttaagaagcggaggcggagggcccggaagtacaccctagtcagttacggtactggagagcttgagcgagaggaggaggaggaggaggaccaggaagcaggtgacaaggacgagataagtgaggttgcatttcttggaaccagtgagtcggaagtggatgaagagttgctgtctgacgttgacgacaacacccaagttgtgaactttgattgggattctggactggtggacattgaaaagagactcaaccgaggggacaagatggaaatgttgccagacaccacaggcaagggagcgctcatgtttgccaagaggagagagaggatggaacagttcacagcccaaaatgaagaggagaagacgggtgggatggcaggtggaggaccggatgccctgcagacggatggtctgagaaccatgacttcttatcagcgaaaagaagaatcggtaagaatgcagagctctgtgagcgaaagttccttccagatgggacgcagtcttgccagtgtgccacaacagaatggcttcagtggagtgtcagagacagcaggggcccagaggatgttccctatgaatagaaccgccaaacccttcctgggatctatgaaccagccagcagcaccattctccccaacgcggagtgtgacaagtcccatctctgacttcccggctccgccaccatactctgcggtctcacctccaccggaagccttctctaggggggtatcaagcccagtggctggcccagcacagccccctccatggccccagcctgctccgtggtcacaaccagccttctatgattcatctgaacaaatagcttcccgcgatgagagaatcgcagtgccggccaaaagaacgggaatactgcaggaagccaaaagacgaggcacaacaaaacccatgtttactttcaaagaaaccaaagtaagccccaaccccgaactcctgtcacttcttcaaaatgcagaaggcaagcgaggcactggaggggactctgggcccgaagaagactacctcagtttaggcgcagaggcttgtaacttcatgcagagttctgccaaacaaaagaccccacctcctgtcgctccaaagcctgcagtcaagtccccctcttcctcccaaccggtagccccagtttctccagtctggtctccaggagtggctccagcccagcgtcctgccttctccacatcaaatccaccgaacccaccacaggtcactgctgtgtcctccatcaaaatagctcagcctgccgcccctcctgcccggcccgcgagtgcgctgaacctggctggtcctttcaaaggtccccaagcagtagtggtcagtcataactacacgcccaagccatcagcacccacaccattagtaaatgctgctcctgctggtgcagggggaccatccaatgagcttcctggaatgagtgggaaaggagcccaactcttcgctaaaaggcagtctaggatggagaagtatgtggtagattccgacacagtgcaggcccacacagttcgggcccagtctcccactccatccctgcccgccagttggaagtactcctccaacgtccgagcacccccgcccgtggcctacaatcctatccattccccctcttacccactggctgctatcaagtctcaaccaccgggtgcccaggcttccaaaacgagcaagaaaaagggcaagaaacctcttaacactttggatgtcatgaagcaccaaccgtatcagctcaacgcgtctttgtttacctttcaaccccctgattcaaaggatggcctccctcagaagtcaacagtcaaggtcagttcagccccggccatgaagcaagccctccctccccggcaggcgaatgttgggtctcccacaaatgcgcaggcttcttctgtgtactcggtaccagcttatacctctcagcccaacttctttgccgcggaggccacttcacccgtcagcgcatccccggtgcctgtgagtgtccccacctctccaaagcaagaatcgacctccacatcctattttgtggctccaaggccgaagttctcagccaagaaaagtggggtcacagttcaggtgtggaaaccgtcagttgtggaagagtaatcttgtagctgaagttgggtgtccactttgcttgaaatgaatcgtttgcagtgttgagtccccaaggatacttagcagatcctcgccttacttaatttcagatatatttacctcccgatctgggtccaagaagcataataatatgtttttgggtcaaaaaccccaactcagtttgacttaaaataatatatttattttctttgcacacttcaaagtatctgtgatatcccaaaataggcatgcgcagatacattaggatttatgctttcgccataagacagtggtcagtgtgaccaagcttggggacacagcctttatgtaatacaccagctgtgctcccatagtgaagggtgaacgccgtgaaaatatactgtgacggctgggatcccctttgagtcatttagctctatttttggtattaaggaaataggaaatctctcaagggcagtaaaggctctgctcaggggcatgtttgctgccacggaaaaggtactctgagacttgctggggtttatgtagcttagcagtaggttgtaaggaggatcttaggcacagcccacttactctgtattggaccctttactagacgtcctcccatacactggctcacttcagaagacacatttgaagtaaatagcttattatctttagaaatgggttcttgtggtccctccctggaaccattgagcactttcccccattgcggaagaaagccccaaggcaaagagtagcgcagtagaatggagaaacatccaaaggagaatggacacaaagtaacatgtggctaaggcaaagagtagcgcagtagaatggagaaacatccaaaggagaatggacacaaagtaacatgtggctattgttttactctgagaagccacacagtccggggcagacgggttgttaaccacaggagcacgcagacaaagcaagaactgttgagagcctctctgggtgacctcccagatgttttcttttcttttttgtttttgttttccccttgtgtttcctccactgtcccttgcaattctattcttgcacctttcttttcctgtttctatttgatgagccagcatagtttgaaggttaccttgtaaatttggattggttgcacgccatggtgtcatccagctggccgtgaggttagtaatgttactgatggcagacctgaagacctttctcatatctattttaagtctgagtggaaccaaacatggaaaatattccatgtgagttagtggagagaagtgcaaagactcaccacagctccaggggaagcccgctttgcacaggcgatgtctagagactttgtgtaaagactttgctggtttgggggtacacagcaccatttcagtctcaagatatctgtgttcctgtcttctgctgccaatgcctttctgctgtattccactatcctattaaaatattaccttcttctttatctgctcattgtatgtgttttgtaaaggcttcatgtatgactttgctctgatcttaatcgtttctctaatatttctcttatagcatctgaatttccctttggagagcatctatttcttttggggagcatccactgtgaaaatgtcagttttaggtattcccaaaacataatgagaggtgggtcagctgcagagtgaagctggactgcgctgcttttctctctataacccccccccccccaccatgcatttggtggaaatacaaccacagggagtgattttgtctctatttgcctctatggaaatcaatcaggaagtttcttgtagaatacaggggcaaccagtcccttatacaatagtacttggtcattcactgccttcataggcagtttgttaaatgctgtctgtgtgtgtgtgtgtgtgtgtgtgtgtgtgtattttataaaataaccaaagattctttcttcatatggaaaaagaaaaggggtatttttttataactttgctttgggttttttgttgttgttttgtttgtttgttagttttttgatttgggtttttttttctttcattttggtagggtttttgttttgatttgattttttttgtttgtttgtttgttttgttttgttttttgagacagggtttctctgtatagccctggctatccaggaactcactctgtagatcaggttggccttcaactcagagatccatctacatctgcctcccgagtactggaattcaaggtgtgtatcaccatggtgtggcataactttgcattcttaacatagcaataagttagacgaaagacatagaacttatatggccattctgccacccaaccgacgggtagttatttttaaatcattagttcaaaagtacccttattattagtggctcagaagtacccccagttatgcagtggtttgcagcagtgagaagtgcccttagtctgttcgctgctgtcacatggtattagcagagatactacttacattcataactaaagacatggctaatacaactatgccatctttttatctagggatggtttgtgggtctagaaaaatctctaagggatatgtcacgcaaacagacacagtgtctacagtttttaccagaaggtagcatagcctcattcaggactacagggtccatgggtagacactagattgaattctccaagggactaagcatgggaaagaaaagactaagccaactccctgaggtacagataggacttcctcctccaaggagctacacgggccacccctcaggtggagttacggtagggatggcactggggcagaaagaggttagaattctggctccaactgctgctccgtccacggttaaatctgagtcctggctttactttaggcaaaggttggtggggtcgttggttggctggatggggagtttagaaaaaacagtttcttttttttttttctttcctttttattctctgttggttggttttgcttgctccttccctcttcctttcacctttgttaactcacgaagtccatttctgttgtcaacaacagtgataatgaatccccgagggtgccttgtgttgagtacctgaagatctatacccagagggatccactgcatgctttatccactgagggaatcccagccacaactgaaggactgtgctaaattttccttccgagaggctcaagcctcccgtcccagcaggaacaaggcgctgtgagcacacaatatgaagattccaggaggcaggcaggtagcatggaaatacaagcccagcatttgcccctgtttttggggggaactacattgacaccataacctaagaacactcactagcctatctctaatacttcgatcataaacaagttctattttgagagtagctaatacacagtgtatgtatttagactatccactgtcacattttttagagctatgttttatcttgcacatttggatgatcattctcgaactcgtaaactgctattatgtacagtgattgttgacaataccacgtgtcaacaatcccatttaatatgcacaagaagaaactaattgtaagcagggggaaacacgtctaagctatagctagttatgtaacataagctggcgtcttttattctagagcagtggttctcaaaccttcctaatgctgcgaacctttatacagttcctcatgctgtggtgactccccaaccataaaattattttgttgctacttcatagctgtaattctggctactgttatggattttaatgtaaaatatatgatatgcagcatatctgatatgcgacccctgtgaaagggttcttggatcccccaagttgggaacggctcttctggttagtgccaacatctctcagtgtagaacaactgcagatcaccccacagcctgtactagagcatcagtagtcacatctgcaatgtcacagacgattctcctttaaaggaatgaaccggcacctgaggctgctctcctgtttgcagtcactgggagaaagaatgtgaatggtctctgctacctctgaaagggcaaagctctccgacacagccagtgaagcccattgtgagcactcagtgtttccccagtgtcacttaagtcatttagcgctcacatctcaaggtgagttcccctgagtcagctgtgctctctcaggagtccccaccaaccaggcaggaaggaagggcacttgaaatcaaggtcggtaagaagtgactgttttctgaaaggcttaattcttcacaggctttcagaaggaagccaggagagcacgctcacctcacctgaagcagagctgttgcgtttgcttttaaacgttttactgtgcgtgttcatgagaaaagtatgtaaattccaaccatcgatattcccagaaacactggcccctgatggtcttatgtcccatatcactggactctggggaacacagagatttttgttaacacttcaaagctgctggcggagtcaacaagtattctgggaaaataccaagttgaaattcttctcttgacttcctaccagagttggcttccagccacaaagcagaccagcaaattcccataagatccaaacagcaggcaaaagtgctgaatgaccagacaccgcatctcaccccgtgagcttccattcctcgaggcaggagcactgatgtgcagttgtttcctcgacaaagtcactttctaaaatgtttaaagtgtgtggtccatacgatgtgtgcacactaatccaccacttggctctcagaagtcaaagagccactcagaggcgattgaatggagagaattttaatcttaacattgtcaaatctggagctaggggtgtgtttgggcacacagatgcaggttcctgggtcccatcacccagaccactgtgaggacagaaaattctgccagacaggtttcagattactgatttggtcagaagattggcagctaactcagtataattgggggtctttgtttatctccttcttgatctgtttatctacatccggtgtagtttaccactgccgaaatgatagtttagagtccctaagcacagcccaccaagacctgctgttcaatctccctccttcctgcctctgccaatgggagcactcagaaatgttcaaagcactctgcagagatctgatctcatggatccaaaagaaaggtccctggtatatgcatgagaaacagtttaaagtcaaaggacagtagctggccctgcatgaaaaagaaatgtgcctcgtaggaagaaacagaaagtgttcttcttggaagttgacatcaaagagtacagtgctgggttcttcttgatgggggaatgacattttgacacactggacaaccctgaatgaagacctgcagtccctatcaggatgtcagttagggacagaagctggggcggccattcacacagtttcaaagcttccgaggactagagtgtgggcagaaggtaggaaggacaattagcttattgatagtcgtaaaatatgtgagtgttttacataaactataatgagaatactgagtttacaaaaactttagcccggcatcagctgagtatcttttctacaatacccttttgattggttgtccaggtaaaggaggtagcatttttgtgcccattttatggattgttgatggggttccgaggcacaaaggctggagaccttgccctaggttgtacactgtgagctagcattctgttaacaactcagtgtgtgctctgccttcctaaccagccacactgcttttactcctgggatttaccgggagagggaaggtggtttgctacttaatggaacacctgaaattcagaatgtttaataacgacctgtcaaataggaagttaaaaaggggaaataaaactgaagagcttgccccctctgcttcctctgttggcctgtcatttagatctactgacccaacttggagatgtttttgttctttcttgggttcaaaaggcttaatgtagtttttgtgcgggtcctgagctttggatagtgggtgaggctgatacatacacctgctggcaacgccagtactctgcatccatggctacattgtttccaccctgccttctcactccagaagacctgctagttgtctgctgggcaagcaaattccgcatgaagttccgtgttggataaatggctttccatacaataggcttgggaaggaccctttcatccgaagatagaccataaatttatatactatgggagcttgatggaaatggaaataagtctctaagaaagacatagctataagtggggggggggggggatacggctctgacagcgagtttgtgtgacagggtcacagcctctggctaggcaagggatacgatttagaaaatggagtcagggctaggaatatatagctcagtggtagatcacttgcctagcgtgtgtgtgaggccctggaatgaatcaaataaaatannnnnnnnnnnnnnnnnnnnnnnnnnnnnnnnnnnnnnnnnnnnnnnnnnnnnnnnnnnnnnnnnnnnnnnnnnnnnnnnnnnnnnnnnnnnnnnnnnnnnnnnnnnnnnnnnnnnnnnnnnnnnnnnnnnnnnnnccccccccccccgagagaattcaaagaaatttcctgttagatagttgggtaattcaaaacccatcactttgggcatcctaacagtactactaagcagaattgtaatgcgagactcgccagcttccagtgtttcaaagaacacgagtagttatcactgggacctgtgagggtgacacttccagctgaggcagcagccaccctagatgtacctggggtggggggatcaacccttcctgctatgcagaccccattggaagattcccccaagacagacaaccctccctgtcttaggcttataattgctgtgaagaaacaccatgtccaaaagcgagctggggagaagagggttcatctggcttacccattcacattcttgtctgtcattgaaggaggtcaggacaggaattcaaatagagcagcagctgatgcagaggccatggagggatgttacttactgccttgctcctcggggcttgctcagcctgctttcttatagaacccaggaccaccagcccaggggtggcaccacccacattggactgaactctcctcagatgtctctagtctgtgtcaagttcataaaattagccagcacagtccctgtcaaatacttccaagcaaccgtagaccacaccttacatttcagacaagtgtgctgaacagactccatcaaacaaattcccagcccttgtaggctggtatgtgccagactgtgctcactgctaccaggaccgtagaggaccaagagaaaacggagatccatgagaaagaacaaaagaaaaccctcaaatttagtgacaataataccgagtgacaaaaattcccgcaaaattaggaattaagaagctgtgatttggggacagggcattgctcaacagtacagtgcttgcccagaaaatatgaggttccaggatccatccctgatgctggggaggaaaaagggactggtttgatttggtatgatcaaaagataatcacctcttaagtaaattccatgtgggattacctgagatgatgcaaatactctctcagcacacagaggtgcacacacacacacacacacacgcacacaaacccttttatttttgagatagagtctcactgtgtgttcctgccctgacaacacccactgacccattcattcactgtacctcactgtccccaggcctgctgcagctccctctggggacaaagggtcaatgacccgacctgttttgcagtacttgatcttgcctaagaggtatggttgctttccaaagccagactgaaatctaggtctccacagagcaagcgcccagggcctgggaaggcatagacacaagcctcagaagccatgcagggagggacgtcaacatgaccacctccgcccagggaatttttgtggattttctggtacttctagaatgtctatgagtcagaagcagaagtcggagctcagaagactcgacctttaaaaaagaatcacaaatcaaaacaagcttggatttggaattttgtttcggatataatgaaacagaaatggcttagattttcatgtgtgacgtctagtcatagctaaagacaaaacacaactgggccccaaacagccaaaccccaaaagccacaactgggtcttgaattggtttacccttggtcatttttccccagtgtgtttcaaatgtataaatgccgtcaacaactgctcactccagaataagatccactattgagtaacctggataccccaggtggcagtctaaggcatgaatctgccatttcgagttttcttttttttcccccacacttagcacccaaggatgaatacctgacctgcttgtcaatgtttggatatggctaactaattcttcacggtagcctagtatgagttccatagacgctggaatctgaattaggaaagtcttgctgaaagccagcataatggcgcaatggtgaaggcagtaagattaggagttaaaggtctccctcagctatagacgaatttggaggctagcctgggcttcatgagacctcccctcctcccccatctcaaaccaaagcaagtcaggaactaagtatgagatacaggataagccaccatgcccgtatgtctttcttgtgttttatcacatcgttttccaactttcatttccatgggagtaaagattggcatggccttaccttggatacttatttattagatctgggtgggagccaggaatttgtcatctgatacttgtttgtttgtgcaccgcattttataaaacgcatttctaacacctgtctaacagtcctttaagactcttaatagtttgtaggctcccctcatcaaagacaaccaaaccacgcagggctgtgggcctgctcggactctgtgaggtgttaaagcaaacgtgattacgcctagcgtccaccaggtggcagcagactcttctccctcgtagagcttcccagaccgccattccaaagtttgtggctcagcaactgacttccagtattgtccttgttgttttattaaagataggagaagcctcaagatctgattttgtcagatcagttactactcatcaagggtgagataaatatttttcagaagcagaattatagttttatcacttaagacagtcttgagcgcttcagcatctttgtaactctcagagaagggattgtcaaagaaaagctgcccttggtttggggacctagacctgctaactacaatcaaaagtggtttttaaagtgactaacttaaaaattgaaatctctctggaagtgagatttcaaaacattcttattgatctaaatcaaagaattctgaagcattttgaatgttaactagccatacttcccttccttctttttatcaggtttctttgaaacagagttcaaggccagcctagactatgaaataagattccctcattcttctctcattctcatctcagagagagagagagagagagagagagagagagagagagagaggcagactaataatattccatacaatgatttcttttttttttttctagtctcggcctccctgagtgctgagattaaacatagccaccatggccggataaaatgattcccaagccacaaatcaagggaagtttgagaggaacattttgactatttgtttaaaacttctttcccactctttctctggtgtttttggtttttaatggctagattagatgcataagtacttcagacatgcacattatgggggttttctgttttcttctcctacttccttcccccctgcctccccccccccccccggccccatgcttagaagggcttaaacattgtgttgcctttacaagttgctgtcttaggctacaattacctatcctttatctacttcagaaaattgatcattcacttgacaattcttacctactttatagaatccctttttctctaaaatgaaattattttgtaaattttcttttccatttttttgttttgttttgttttttaaatacagggtttttctctgtgtagttctggctgtcct

SEQ ID NO: 1454 - DNA, 2274 bp, Mus musculus
atgattccttgcagtcatcaattcagtacaatttgtgtgctttccccagggctcaggaggagtgaaagtctatctgaaaagcaagtgaaagaagcaaagtctaagtgcaaaagcatcgccctcctcctaacggatgctcccaacccaaactccaagggggtgttgatgtttaagaagcggaggcggagggcccggaagtacaccctagtcagttacggtactggagagcttgagcgagaggaggaggaggaggaggaccaggaagcaggtgacaaggacgagataagtgaggttgcatttcttggaaccagtgagtcggaagtggatgaagagttgctgtctgacgttgacgacaacacccaagttgtgaactttgattgggattctggactggtggacattgaaaagagactcaaccgaggggacaagatggaaatgttgccagacaccacaggcaagggagcgctcatgtttgccaagaggagagagaggatggaacagttcacagcccaaaatgaagaggagaagacgggtgggatggcaggtggaggaccggatgccctgcagacggatggtctgagaaccatgacttcttatcagcgaaaagaagaatcggtaagaatgcagagctctgtgagcgaaagttccttccagatgggacgcagtcttgccagtgtgccacaacagaatggcttcagtggagtgtcagagacagcaggggcccagaggatgttccctatgaatagaaccgccaaacccttcctgggatctatgaaccagccagcagcaccattctccccaacgcggagtgtgacaagtcccatctctgacttcccggctccgccaccatactctgcggtctcacctccaccggaagccttctctaggggggtatcaagcccagtggctggcccagcacagccccctccatggccccagcctgctccgtggtcacaaccagccttctatgattcatctgaacaaatagcttcccgcgatgagagaatcgcagtgccggccaaaagaacgggaatactgcaggaagccaaaagacgaggcacaacaaaacccatgtttactttcaaagaaaccaaagtaagccccaaccccgaactcctgtcacttcttcaaaatgcagaaggcaagcgaggcactggaggggactctgggcccgaagaagactacctcagtttaggcgcagaggcttgtaacttcatgcagagttctgccaaacaaaagaccccacctcctgtcgctccaaagcctgcagtcaagtccccctcttcctcccaaccggtagccccagtttctccagtctggtctccaggagtggctccagcccagcgtcctgccttctccacatcaaatccaccgaacccaccacaggtcactgctgtgtcctccatcaaaatagctcagcctgccgcccctcctgcccggcccgcgagtgcgctgaacctggctggtcctttcaaaggtccccaagcagtagtggtcagtcataactacacgcccaagccatcagcacccacaccattagtaaatgctgctcctgctggtgcagggggaccatccaatgagcttcctggaatgagtgggaaaggagcccaactcttcgctaaaaggcagtctaggatggagaagtatgtggtagattccgacacagtgcaggcccacacagttcgggcccagtctcccactccatccctgcccgccagttggaagtactcctccaacgtccgagcacccccgcccgtggcctacaatcctatccattccccctcttacccactggctgctatcaagtctcaaccaccgggtgcccaggcttccaaaacgagcaagaaaaagggcaagaaacctcttaacactttggatgtcatgaagcaccaaccgtatcagctcaacgcgtctttgtttacctttcaaccccctgattcaaaggatggcctccctcagaagtcaacagtcaaggtcagttcagccccggccatgaagcaagccctccctccccggcaggcgaatgttgggtctcccacaaatgcgcaggcttcttctgtgtactcggtaccagcttatacctctcagcccaacttctttgccgcggaggccacttcacccgtcagcgcatccccggtgcctgtgagtgtccccacctctccaaagcaagaatcgacctccacatcctattttgtggctccaaggccgaagttctcagccaagaaaagtggggtcacagttcaggtgtggaaaccgtcagttgtggaagagtaa

SEQ ID NO: 1455 - protein, 755 aa, Mus musculus
MIPCSHQFSTICVLSPGLRRSESLSEKQVKEAKSKCKSIALLLTDAPNPNSKGVLMFKKRRRRARKYTLVSYGTGELEREEEEEEDQEAGDKDEISEVAFLGTSESEVDEELLSDVDDNTQVVNFDWDSGLVDIEKRLNRGDKMEMLPDTTGKGALMFAKRRERMEQFTAQNEEEKTGGMAGGGPDALQTDGLRTMTSYQRKEESVRMQSSVSESSFQMGRSLASVPQQNGFSGVSETAGAQRMFPMNRTAKPFLGSMNQPAAPFSPTRSVTSPISDFPAPPPYSAVSPPPEAFSRGVSSPVAGPAQPPPWPQPAPWSQPAFYDSSEQIASRDERIAVPAKRTGILQEAKRRGTTKPMFTFKETKVSPNPELLSLLQNAEGKRGTGGDSGPEEDYLSLGAEACNFMQSSAKQKTPPPVAPKPAVKSPSSSQPVAPVSPVWSPGVAPAQRPAFSTSNPPNPPQVTAVSSIKIAQPAAPPARPASALNLAGPFKGPQAVVVSHNYTPKPSAPTPLVNAAPAGAGGPSNELPGMSGKGAQLFAKRQSRMEKYVVDSDTVQAHTVRAQSPTPSLPASWKYSSNVRAPPPVAYNPIHSPSYPLAAIKSQPPGAQASKTSKKKGKKPLNTLDVMKHQPYQLNASLFTFQPPDSKDGLPQKSTVKVSSAPAMKQALPPRQANVGSPTNAQASSVYSVPAYTSQPNFFAAEATSPVSDVPVSVPTSPKQESTSTSYFVAPRPKFSAKKSGVTVQVWKPSVVEE

SEQ ID NO: 1456 - DNA, 25262 bp, Homo sapiens
acctgtcaccagatttgaatacacagttttaactttattttcattatttagacacatgatttgtagaactgaatcccaaggactgaggttggtgtttaggatctggatagcaagccctctgaaaatggaattatgaacttatttccaagatcttagctactatcatcttgctctgcctcctctgaccattcctctggtattagttgaagaatacagacctacctaaggctttggtttaagatccagttggggtaagggaatgcttattaaaccttgtcttacaggtatgaggcagttttgagaaatgcctgaagtggaaaattgaggaaaggcgggagcttccaaaagaactactagaacatgtagtgtacattttctgtcaaaaaaaaaaaaaatctctaaaactttaattgttgcctgagatcacaatcatctctctcatcctctcttagttattgccaggtccctgagacttcatcatatggattgagaatagccccacatgtgataggcaaatgtatgctaattttctctttttcattgatttcaatagattataatagtggatttaaggaagagattgtcttgtttctatcacccactctgacattttccaacagtacttgtcaatgaattatacatgaaaatgcagctcctgagacaaaatttagttctgacagcaagctggcatgattgataggccatatacacaacacaaaataatttatgtactaggtcgatgagaaatcaaatctgagacctgctttctagtcagtcttggaagacctggaaatgaagagagaacaacacaagagaaaaacgaggtttttttaattttgcaaggaattatttattcataaaactaaattagcatagccgaaagtcttctcagatttagtctatgaaatgtaaataatgtcgttaaatttccccgagaagtcttaactttccaatttcacttggtgttggtaaaacaaatctttcctggcatggatcaagaaatggaaatcctcacatgtgagtgagaatgagcaatatttgtctttttgcacatggcttgtttcacttaagataatgccctccacctccatccatgttgttgcaaatgacaggatttcattttttatgactgaataatattccactgtgtatatgtaccgctttttctttatccactcatccactgatggacacttgggttgattccatatcttggctattgtgaatagtgctgcaataaacttgggagtgcagatatcccttcaatatactgatttcctttatattggatatataaccagcaatgggattgctggctagttctagttttaattttctgaggaacctccatatggttctccatagtgactggactaatttgcattcccaccaacagggtatgtgggttcccctttctccacatccttgccagcattcattattacctctctttttgataaaagatagagagtagaatgatggttaccagagactgggaagggtagtagagaggagagggggataaactggagatggttgatgggtacaaaaatacaattagaagaaataagatctggtgttttgtggcatgactatagttaacaataatttattgtatacttcaggataactaaaagagtgcaattgaaatgttcctagcacaaagaaatgataaatatttgaggtgatgaataccctaattacactggtttgatcattagcttgtatcaaaatatcacacataccccataaatatgtataactattatgtatccataataattttaaataaaaagtttttgaagttggtaagctgcatgttctcacttataagtgggagctaaatgataagaactatgaacacaaggaaggaaacaacagatacaggagtttacttgatgggggaggctgggaggagggagaagagcagaaaagataacttttgggtactgggcttaattcctgggtgatgcagtaatgtgtacaacaaccccccgtgacacgtgtttacctctgtaacaaaccttcacatgtacccctaaacctaaaatgaaaattagcaaaccaaaacaaaaaggtggtaagcaatgaaacatagtattgcatttggtaactactgacattaccaatatctcttagttatgtgatctgattaaattgggagatactgaaaaagaatacaggataagaactcactcagggtctaatatattatatgtagaatgaggtctctaaaggaatgttttcaaaggaaaggaattacatgatgtgctcacgcaggtattttgtgtcaaatcacagtttatgaaagataattatactcaattttgaacttataacacattgagtcataatattgtctgttttaatttttaaaaatattttatatgtaactctgtgtgtgtagaaagccaacacgtctgaattcaccagtcccttcttgagcacctctttgagctgtaggtacatcatggaactttacacacattatttctaatcctgattaaacatctagacgataaaatttattagcaccattttacactttagaaaactaaagcttagggtagtagcgtaactcatctaggtttagacaggtagtaagcataggagcaacacagttgaaacccatgtcttgttccctcagagttggtaccctttcccactgctacatgtattttatgaatccaagactagtggcttaaggagactggttgataagttcactgatagagaattggtatcatcagtactaataatttttgtgtctaaatttagttttgtgatgcacagtgtctttcattttcacaaataagaacatttccaagtgttagaatcttcactcacataaacatacacacttatacaattataaaaatacgtaattacgcacaatagaaggtaaggatcttaggtacactaatacatgtttatccttcttgatactactataagaccctgtcataccatgtttttttggttgaagagttctataaaaaatggagaaagagtagtccttcagaaaaacttaagtaagaagaaaagttctcatcatatatagcaaggttcttgagggaaaaatatttcttgttattcagatgaatgtgaaagttcagtgaaacgcaatcacagcagttgattgtgaatgttgacctcagaatgtattctctgaaggaatgctaatgactcttaccatgatgcactggcttatttagataccattaagagctccaacttgacaagcaggatgatgaactgcacttttcctatcatgcaacacatgtttggataacaggcagctctgttaagttgggagattatttatttttaaagaatcaatttttcatcttcttctgcaatcccagtttaaaactcagacaactcatggctaataaacagaacttctgcctaagattgggtcttggggggcacagagtataatgacacctctgttttatcaacataaaacctctttggtcctccaaaggatgatgttctgttcgaatcctggtatatctgactccattgaatgaatgattttatgcctcaaaagtatcctgtattacctacctaattttttttataaataaatttcagtaactgaaatgtgaacaactctaaccctgacatagatgtttactgttggatattgttgtatcctttacttattaaaaaatttcttgtgatctttcattttaaatatttcatgcaagataaaacaaaacaaatatatttaacagctaaatggatattttcaaaattaggtgaaattctctttctcattgcttttgtgactttcttatagtcttggaatattgagttcatttaatattttctaataaattagtgttttccaataaattagtatattccaaaaataaattatattttccaataaattagtatattcttccccaagaggtaatgatattgatgtgtcagcagtggggaaggctttctacagattgtaatttatgacaatagaaggatgggccctcccagaacaaaactaattgaatcacttcaaatttcaataatgccattgttttggctcttaaaggtaatattttgctttcaagagtatcatttaaaatgaacctctagatgtaaactttaaacctatatgagttaatatatgaattatcatttaagactttagcaggaattagtgggcagcttttagagataaattgaaatacattttgtgcccagtcagaaataagcctagccatgaaaacattgttcaagaagtgctgcttacctggtgttcacctctctaggctcagaagctttattttaataaaaaggaataatgcttggtagaaaaaaatctagaaaagtatcttaaagtattcttaaatttgagactgtatggtcatcatacatggttcattgagaacaattgaactcataaaatgaaatctaagcacattagtatcacttagggctccagcaggaaataggtggcatgctcaaagaagaattcaatataatgcaatgcagagactaaaggtagtcttaagggaaccaacaaatgataatgaagcacccagaaatccagagattgagagcaggaaactattatcactcataggcccaaaggtacaaggagataatgtgtgttgttggaacctaacgagttaaggcaatgatagaggggcaggctgacaggagctgcaactctctagactgaagaacagagccactgctaagccatggcccagcaggtccaccaaggagagcatagacctgacctctcatttcccttggtctttgatctcttactggagtaagaatattccagtagattatgacacagtgcttatggcagggctgcttttactttctgcaaagtaatctcttttttctttcttttttgctaaagtttgcttagtaccatgcctggagtagctgatttcaatgaagcatttctctctttgacatattccctaatatccaggctccctggtgccccactatactgggatggtttttatcagtccatttagctatacagctctctcctcaaacaagttgccccgtcctgtacctccttcttatagtcatggcgtttcattcaccttggcaatgggaaggattttaaaatttattgtaatgcaggaggttactttctcactggagtaaaaccttacaatgtggaattatcatcatcataataataatgttttaagacggggtcttgctctgtcccccaggctggagtgcagtggcatgatcttggctcactgcaacctccacctcctggctcaaacaatcctcccacttctcctgtgtggctaggatcacaggcatgcaccaccaagcgggctaatttttgcattttttgtaggttttttttttttttttttttttttttagagacagggtcttaccatattgaccgggctggtctcaaactgctgagctcaagagatccacctgcctcagcttcccgaagtgctgggattataggcatcagccactgtgcctggcctgaattatttattttattttattttattttaattgtattttattttattttatattttattttattttaattttattttattttatgttttattttattttattttatattttattttattttattttattttatttttgagacagagtcttgctctgttgcccaggctggagtacaatggtgcgatattggctcactgcaacctccacctcccgggctcatgcaattctcctgcctcagcctcctgagtagcttggactacaggcgcacaccaccatgcccagctaatttttgtacttgttagtagagacggggtttcaccatgttggccaggctggtctcgaactcctgacctcgtgatccacccgccttggcctcccaaagtgctgggattacaggcataagccaccacgcctggcctgaataattatttttaatgccatcaatgtaagcctttaacatcttttttcactcttctctattttttatttctttaattctgtctggtacctttacattgatttatttactttcttttttcctgtttacttacaatgctatgaattaaatgttcatattatggtacatgataaagtgtgtggctgtgtgtgtgttcataaggtggtaagaagtatttaaatggtcttacaggttaacaggtgaattaaaattcagggctggtgttactgttgacagatttgtttctcagagatggtggcttgctttttacaaattatatcattctactatgtcttctttttttactccactcagattcgaaatcagagcaaagcctctgggtctgggctctgtgagggagatgaagtggtttccatcaatggcaacccttgtgcagatctcacctaccctgaagtcatcaagctcatggaaagcataacagactctctccaaatgctcatcaaaaggtacaacagatttgctggaatatgtattttctcttgaagctacatgggaatgattatagcttttactacatatataacttgtcatttatggagaaattaggggtgctttgtagaaggttaggtatagttaaacagaaacaccactgtgtttgaaaaatagtcaattctagtcaaccaaactttctggttaattgagaattaagttgaaaatgcttgtttcaagcactttgttgaaaatcttaggtattttaggctccttccttagaaagctcagtatattgagcataacttaatatttctttgataggtcaagattttgtgatggatcagaatcactcaattgtaattatcagatgcacagatgaattaaaaatgtttaaatattagaccattaaactgtacaatttttcattaaaaggatgcttaagagacagaaaagagaaacaacaacaaaaacttacaagcagccggatttctccagtaaaaccaatatttgaggatggacaaaagcagatgattagaataaggtttttgcacgaccaacacaggtcatttgggaattcaatctcttcaaataccaccatccccacatagttgtttaacaatataaaagaaacctttaaatgtaaaaaacaaaagaaaacaatgaggacaataacaaggaaaactacagcattgacatttttatggtgtacaaatcacagtacaatccatactgattttgcaacggaagctctggctattgcatgataatgaatccagaaaggaaagctttggcttcctggagagcagcttttaggaagatgtcagaggacatctcaagatgaacctcaaggtcctccaggtttttcctcaactctgcagaaacactacgcacagttacccctctgctaatcattcagtatgattctgttccgggatgaaaatgaactcactatggccaaaatcttgagacaacaatggaaatctagcattattcttataatctaaatatttacccatcaaactcagtgtttaaggccttagaatccttccttcatgttatgaagagaaaataagtttataaaatacataatttactaatacataattaaatttataaaataaaaaaattacaaagtaagtaactaattggtaggattcaaagtggaatctcaattgaaaatcaagtcaaaagcaattattatcatcaccaccactaccactattttaaatatctgaatattgtttcctgcaataaatatttctgtcactcatatcactgtcatctatcagtagaggacaagtgtttttacttttcctgaactattgcccagagatagctcagtaagactattttaaaataactcctttaacattccatctctattatcttgaatgttcttaaaataagattttaaaaattctataattgtgacacataaattgtggacttgatgaatacctatgtagactgatgggaaatgaatgttttaaggcataaagctttattcgctcatgcttttatgatatttactcatgtctatttattttacttcagctgctgataaatgttaatatttatctggccatttgtctgtattggtctacaaggctggcatgaattgaaactattctcttctcagcttcacaattgattgctaacgttattcaaagtgatttaatctacttccatcccaaggccttcctaaattaaaactctctgaccttttggtaccctcaaattcagtttaacaatgtatttaacattttctacataataatgatctaatttgctaacatcatgcttttttaatacgatattataatgttgtataaatactgtattacagggaagcttttccaattacttgcgtatagagaaaggtgcattttgtttaactgttagtttgttttcattttgtttagttttgttttgccaaatgcagttgaaagcaaaggtaggagtaagtattttgagcattggtcggaaattgcactaccacataaattctaaggtaaattcctttgagtagaatccaagtagaagctcacgcccttcagctgacgtgcctgcatgagtcataactgtcttttaaggaaggaggaaaggggcaaagataattatgctgcttccaaaattaaaaaaaatacaaatataaaaaatgaaggcatttcctacagctgttctgtgaataatacctctaaaaacatttacagtttaaattagagtttcagaaagaagttatttaactcttaaactgacattgcttcttctcagaaacccaaatttgcacagacaactgggaagatcaaaatcaaagagctgtggtgtacagctctaggctccttagctgagagataaaggaacagtttgacttcagatatcctaaaaagaaaatgctccaagaaacagatccaaatagaagaaagggagacatctcagattataaatactccatgacttaatgattcattgcagcacggaaaggatttctctttacgcaagagtactgggctgggtccacttattacgaaacacatgctcactggggcttaaaaaacagcttctatttcattcctttcaagaaagcacagcctctaaaaggactagttgagttatctgtaagttaagattgatctgaaggtgctggatatgtttatgtgacttcataatgtctagaccaaaacttagtcaataagacattgaaatgctttgtcacattctagcaaactcattataagagatacccagattccaagtacttacagataaacgggatccatgtagttttttaaaaataaaagctgaatttaggatggattcaggtttcataatcttgtgtaagagtttctttgtgcttttaaaaaagtttatttggtatctctttaagtaataatatgaacatgttgccaccttctgttttcaaatatgttgcaactgacatttagaagaaaatattttgactatatcacatattagacatcacaaaagtgtcaggaagttctttggcagatgtaacatagtctgatttaagtgtctggaatgatttttctgtgtgcagaccatccagtggaataagtgaggctttgatatctgaaaatgaaaacaaaaacctcgagcatctcacacatgggggttatgtggaaagtaccaccctgcagattcgaccggccacaaagacccagtgcacagaattcttcctcgcccctgtcaagactgaagttcccctagctgagaaccaaagaagtggtcccgactgtgcaggcagcttgaaagaagaaacaggcccgagctaccaaagggctccccaaatgcctgactcccaaagaggacgcgtggcagaagagctgatcttaagggagaaggtagaagcggtacagcctgggcctgtggttgagctgcaactgtccctttcacaggagagacataagggcgctagtggccctttagtggctctcccgggagctgaaaaatctaagtctcctgacccagaccctaacttgtcacatgacaggattgtccacataaattcgatccctactaatgagaaagcagaccctttcctgaggtccagcaagataatccagatctccagtggcagagagttgagagtgatccaggaaagtgaagcaggagatgcgggactgccccgggtggaagtgatcctcgactgctctgacaggcagaagacagaagggtgcaggcttcaggcaggaaaggagtgtgtggattctccagtggaaggagggcagtcagaagcacctccttctctggtatcctttgccgtctcatcagaaggcacagagcagggagaagatccacgctcggaaaaagatcacagcagacctcacaagcaccgagcgcggcatgcacgtaagttctgcctgggctttcagaaggggcttgggagttgggggcattttgctgcttctttgcttgcatgagtttttcagcaagatttttcttatgtttctcattggcttaaagaaatatttaattaatgcacaaaatcacaaatgtgaaattgtggagaataccaatttctaaataggaagcaataagtccgaacttcatatagatttaaacatttttcatgaatttctttttatccccaaaggcacaggaactgttaaagaaaataatattgtcaatgtgcctgttcattttgtttcagacagttgaaatagttcatgttaaaatagcataagaaagcacttgaagtcatgtggactcagtttaaatgtcaaaaactgttgagtctgctactgagaggtgtctttaaaataaaagctctaccattgatatcaaaagcagatccttgttttgaaaaaaaatcattgtgcagcttgatgatgcttgcagaagtgagtttgacagacaaggacatgtgtatactgagcagttacatgatcctctccgttgtgtaagtcttcatttgactgcaaagtgtttcatctaccttctagacacagaagtcagtctccagggccatgtggaggcatttaaatgtctccaaacataaaatatatttaaattcagtgctttgtatggcattttgttttacccaggggagagaagacagaaaggagaattgggataagaattgcagttaggtgttaggatttctattgttttatttcacgtttatttttgtttgtttttttttttttttttactaattttggaattttatttgaggatgtaaaggctgacaggcaaaggcacttgactgtatatatgatacacaatggcaatgaattcggttattcaaagtaggatattaagtcttctaacctattgttattcctttcaaagcatatttttagcataaccatttgtagctttattggcaagtgctgttaatcattccttatactttaagcatctgtaggccatcttcacatttatagcatattaaacaagagtattgagacaccattcacatactttacatgttggcagtgaagttagcagcaactgtgcaactgtgactgtcaatttaataagttgtataacactagtcaaaaaaggaattctatttagtaataaccacagtttcaactatttttctctagaaaattcgatcaccagtaaatgcctgtaatcatattataaaattatttccttggattatattttatttaaaaaaaattaaccattaagtctgtgacaaaaagagctaattttcaatcataaaatagtcaaaaattttttcttaattttccacttaactgttttgaggaattaaaaaatttaggggactcacagtcattatcattgaaaatatgatataactataaattataaatgatagatgctatatgtttagttgctataatttgccacccatttcttttttataatagtaataatgaaagaaaattttaaatatttttatttttataaaataaaaatcatattcttgttttaaatgacttaatttctgcatcagtttttacacagttaagtgggtcacaagtcaatttttaaatttctccaaggtttattcttgctgcaaggaaagtaatattgtatttccaaaatagcaatacatttacaaacaaatctgtctagaaaactttgtagctagagtttcttatatgtatttacaataatgtcatattttgaattttaattattgattcagtaccttcaatgattaattcagtgttttgaatttatattaatccagtagctgtgagtggaaagatttggggtggttgtcagggtaaaaaaagaaaaaagagaaagaagaaaacctaaatagctaaattcattacattaaaacatttagaaaattttaaaacatcttcttgggacgctcctccctttttaagattcctggaaacagttttatattgacactttattttaaaatatggaagtatgagatatgtctcatcttgtttttcagaaaatattatgtctttaaattatgtccttcttaattctaattttatcctattaattgacatttactagccagtttttattattaaagtggaaggatctctagagaaacaaatgtatgaaacatatattctaatcagcatatataaaatatttttatgtaaacaaatagaacagtatattattgtagaaggaaacatgttaagagaaataagaaaaagaaatgtgttggattccttcaaaattctgtactcaatggcaattttttacatatttattttcccccaggagagttcatttctgagttgctgtggtgtcttccttgaactcatcagctcaatataattttttttttttttgctttccctagggctcaggaggagtgaaagcctgtcagaaaaacaagtgaaggaagcaaaatctaaatgcaaaagcattgcccttcttctaacggatgctcccaaccccaactccaagggggtgttgatgtttaagaagcgacgtcggagggccaggaaatacaccctagttagctacggtactggcgagcttgagcgagaggcggacgaggaggaagaaggtgacaaggaggatacatgtgaagtagcatttcttggtgcaagcgaatcagaggtggatgaagagttattgtctgacgttgacgacaacacacaagttgtgaactttgactgggattctggactggtggacattgaaaagaaactgaacagaggggacaagatggagatgttaccagacaccacaggcaagggagccctcatgtttgccaagaggagggagagaatggatcagatcacagcccaaaaagaagaggacaaggtaggtggaacgccaagcagagaacaagatgctgcccagaccgatggcctgagaaccacgacttcttaccaaagaaaggaggaagagtcggtaagaacgcagagctctgtgagcaaaagctacatcgaggtgagtcatggtcttggccatgttccccaacagaatggcttcagtggggcatctgagacagcaaacatccagaggatggtccccatgaatagaacggccaaacccttcccagggtctgtgaatcagccagctacccccttctcgccaacccgaaacatgacgagtcccattgctgactttcctgcacctccaccttactctgcagtcactcctccccctgacgccttctccagaggggtttcaagtccgattgctggcccagcacagccccctccatggccccagcctgccccgtggtcccagccagccttttacgattcgtctgagcgaatagcttcccgagatgagaggatctcagtgccagcaaaaagaacaggaatattgcaggaggccaaaaggagaagcacgacaaaacccatgtttacttttaaagagcccaaagtaagcccaaatcctgaactcttgtcactccttcaaaattcagaaggcaaacggggcactggagctggaggtgattccggaccggaagaagactacctcagcttgggggcagaggcttgtaatttcatgcaaagctcctctgccaaacaaaagacccctcctcctgttgctccaaaacctgcagtcaagtcctcatcctcccaaccagtaactccagtttccccagtctggtctccaggagtggctcccacccaacctcctgccttccccacatccaacccatcaaagggcaccgttgtctcctccatcaaaatagcccagccttcttaccctcctgcccggcctgcaagtactttgaacgtggctggtcccttcaaaggaccacaagcagcagtagccagtcagaattacacacccaaaccaacagtttccacaccaacagtcaatgctgttcagcctggtgcagtgggaccatccaatgagcttccaggaatgagtgggagaggagctcagctctttgctaaaaggcagtcgagaatggagaagtatgtggtcgattcagacacggtgcaggcccacgctgctcgagctcagtctcccactccatctctcccggccagttggaagtactcctccaatgtccgagcacctcctcctgtggcctataatcctatccactcgccgtcttacccactggctgctctcaagtctcagccatcagctgcacagccctccaaaatgggcaagaaaaagggaaagaaacccctcaatgcattagatgtcatgaagcaccaaccgtatcagctcaatgcatccttgtttactttccaacctccagatgcaaaggatggcctcccccagaagtcatcagtcaaggtcaattcagccctggccatgaagcaagctcttcctccccggccagtgaatgctgcctcacctacgaatgtgcaggcttcgtcagtgtactcggtaccagcctatacctctcctccttccttctttgcagaggcctcctcaccagtcagtgcatccccagtgcctgtgggcattcccacctcgccaaagcaagaatcagcctcatcatcttattttgtggcaccaaggccaaagttctcagccaagaaaagtggtgtcacaattcaggtgtggaaaccatctgttgtggaagagtaatcttgtagctgaagctgagtgtccactttgcttgaaatgaattgtttgcagtgtttcttgagtccctgagaatgcctagcaaagtcctcaacttacttaatttcagatatgtcacctcctaatctgggtccaaggagtataatatttttaatgagtcaaaaatccaactcagattgacctaaaatatatttatcttctttgcacacttaaaaaatccaggagcaccccaaaatagacatgtaccgttatattaagtaagcaggagacttaggatttgtgctgtagccacaagaaagacagtgatcagtgatatcaaacatcaggaatcagcctttatgtaacataacagctgtcctcctatggtgaaaggttcaaatgtagtgaaggtataacctatattgactgagatttcccttttaggtagtgccttatctctattactagtgttaaaggaataaggaatctatgaaggacagggagcagctctggtctgtcaatctcagccacctgtttgatatcacagagaagatactcggaggattgttggaatgtatatagtttagtaagaagtgggtaagaaagagggtcttaattactgagcacttattatgtattaggttctttgccagatgtttttacatatataaactcatttcagaaaacttatttaaagtaaatggggccgggtatggtggttcatgcctggaatcctagcactttgggaggctgaggtaggaggactgcttgaggccgggagttggagaccagcctgagcaacatagtgagaccctgtctcaataataataataataataataatagtaataatgaagtaaatgggataaggaaagaaggataattatctttaaaggttgattcccaccctccctccccagttacttaaggaactaagtgagtacatctccagttgcccatgaaagcataagtttgttttcctcagctgaggcaagtggtagagtatacaggataacgaagtaacatgtaaaaggcaggacgcacataaaggtgtacatggctattgtttcacctggagaaaccacatgattgggacctgaaggtttactgactgactacaggggctgattgtgaagcacgaggaaccccatgtgtgtggagactgtagggtgagagcacacaattattagcatcatttctgagtgatctcacagattttttttcttgtgtttgctttgctttttgacaactgcttctcccacgttccttgcaattctattctctcaccttcactttactatttgtattcgatggaccaggataattcaggcaaggttaccttgtaaactttaattggccacacaccatgttgtcacccagctggctatgaagtgaataatggtactgaaagtaaacctgaagacctttctcagatctattttaagtctgagtctgaccaaccatggaaaatattcgacatgaattaatgtagagaactataaagcatttatgacagctccaagaaaaatcatctactctatgcaggagatatgtttagagacctctcagaaaaacttgcctggtttgagggtacacagtaccattttaatcttctgaaaatatctgtattcctgctctttttctgctgtcactgtcaatctgctatatttttcactatcctattaaaatattactgtctcctttatctgttcaatgtccatattttaaaaaaatcttccttgtatgagctattctgatctaaataatttctctgatatttctctatatggctcccacaacaatttcattgttgttagcatatctatttctccatacattgtaaaactgtaatccttaggtatttctaaaacataaagaggagaattaagtcagctgcagaacaatggggctgattcttctgctttttctctggaaaatctttcattgcttttggtggaaatttacctagaggttacaaccacaggatgtagcttggtctcttatttgcctttttgggaaaccaattaagattaatacaggataaaggaaaaaagcaatctattcattatataacacagttgtttgtattacttgttccctgcaaaggaaatctgttgaatgcttgcattttgaattcttttctaatagaacaaccaaaaaaggcttcttatggtgcagcaggaaaaaagatcatttttatagctttgcattcttaacatagcatttaaagagcggcatgaattagaggaaagacatggaacacacaggtagtcggtttgagatcatcggcttaaaagtatcctaggatggtaatgacccagaagtatttccagttgtctagtggtgtggtatgcaggaatgagaagtgttttctttccatttcctgttggacaggtggcaatcttagcagagccactatttggagttgataactaaagatgcaaataacatgactatgccttctggtcatcctaggactatttggagttctccaaaaccttgtaagaggcatgtcaggcatgcagtaaaagcatctacaacttcagctgggcactggcagcataggtctcatcttggaccatacagtcccactttatagaagagggtggaagttctccaaaacaatatccacaacaaagtctgacctcactctgagggagatgggaagtgggaggaagaaggactaaccagctccctggagtaagaggaatttgctttccctgtctgcccaccaggggctatatgtgccacctttcaggttggggccaaggaagtgatgtcagtgtgacagaagggagagttagacctccagacgtcagcctccctcccatggggtacattttcaatctgagtgttgttgccttagctgtgttggtattagcttgattggttggtccgctggttatgaggtgtagggaggcagtttttgtttagtttttaggactttgcctcttcctttgtccttagcataatttctaggcagagcatccacgaagtcggttttcattgccagctcaagagcgacaatcatttacgagttcctatgttatgttaggtgccttatgtatattatcccaaatccactgcatggtttaaatacaggcactggaatataaatgaaaaaggtcattacagtcactgactttctgcaggaccttaaacatttctctttccacaagtttccccttaatcatgtgtcaaacctctcttcctgacgggaatgttgtgctataatgaatctgcataacgcttgggattctaggaggaaggaaggttccatggacatgtaagtacagcatattcccctcagtcttctaggagggcagagtgaatcccagaactggtaagattgggaatctgagcattgccactttaatcttagaatatttatcattttgacacatcctgttttttagagaggaaaacaaacacagtttctgcattggtagtgtaaagcataccttgttaggaacgtgttttgtaagacacatttgggttgtcattctagagcatgtcaaactttgtacttcaaaatatatttagtatgattgttagtggtaacatatatcaaggctttgaattaactgttttatttaattttcacaagaagcacttattttagccataggaaaaccaatctgagctacaaatagttctttaaaataagcccaggttatttagctattctagaaagtgccgacttctttcaagaagcaggcattgtaggacagctgagaattatcacatagcctaaattctagcctggcagcaagagtcacatctgagatgtccaaaaaaaaaaaaaaaacacctgatctacattgaaagggggtagactaacgtatgtgagaccattttcctatttgcagttacaaggttaaagaactttgaaggtcattcggctgctaagaggcatgtcgaacactctgtgtggctctttcacagtaaaccctcctaagagcagaagacacatggctgttagtgtctgcgtttagatttaatttctcaaataaaggcccttggctgcgtatcatttcatccagttataaactagggctcctgcaagcacccccattctaagggtgaattattgaaatcagttgctatttgatgagtcacaactggcccagcaggcagggcatttgaagtcatggtcatcaaaaagaaatgattgttttttgaaaagctaaatgcttaaaatgcttctagagggaagtcgtggggcgtgtgctcattctctttaaaatcagggttgttgagtttgtttttaaacatttttataagttcatgagaaaaaatatataaattctaagaaccaacactgtattcccagaaacatgaccctcgctggtcttgggtccacatatcattggactctgggggacacaaagatgcctgtgacactttggtgttgccgagttagtcaacaattattctgggaaaaagcagaattgaattcttctctagatgtcctaccagggttggccaagggccacaaagcaggctaataaattcccacaggatccagacaccaggcaaaattgctctaagaagccagttactgtcatccctctatggttctagaaaaaatagtacaaaaatgacaggtcatcctatgagcgtcatgccaatgaaaccccatcttctggagaagcccttgaatcagaattatcttttttcttgatgtcgtcagatgcagccagtttcttaatttttttaaaaactgtatgtttctgtggtatgtatatttgtacacctaactacctggcacttggaaatcacagcactactcagaggcaattgaataaagagaaatttaattttaaatatcaagtcctgtcaaacatttctcaaacttctgattttatcaaaggtttgccagccaataaagtgcatcccaagtatacaggggagaaagctagactcctacagggtcctagagtttaagtaatttttttgttattaatataggtaataatttttctaatttttattttttggttccaaatgtaaagctccttgtgtttacctctgtttatgtcattcttgacatgtttatctaaattatgtgtgctctgtgacaggtgaaatgtaaatctgggatccatagtcaagatatcataaggacctacttcccagcctacctttcttcctctacctgataatgataatactcaaaataacaacattcaaaggaaacacaaagaaatcctgctttcacatctcctatttcttgggctccttaataactactgatggtttgttcatgaaaaaaaatttttaaatcaaaagattgtacttggccctgagttgaaaaaatttcaaaaatcaaaagtttgtacttggccctgagttgaaaaaaaaaattcacattctaagaataaacagaaaaatgttcttcttggaagtaaataacaaaagccatagtgttttcatttgtcttttcttcaggatacacggtagaagtcagagaatctttgatacttttatttggtgcaataatcaaggccatgcaacaacccaaaatcaagcattttggttcaagtcaggatgacatgagtggggacagaagctgtggcagtcattcaaataatctcatgggtcctgaggaaaagacaggagttaacgtattaagtttctactatatgcaggaactgtgttaaatattttacataagttttgataatagctaacattagctgagcacaaaatttgggccctgatttgtgctgagtatctttcacagattactgcttttaatcagcagtccttgtgagctaggtatgatcattatccccattttatagattacagatgagattctgaggcacaaagaggctaagtaacttgccaaagatcatacgatgttaagtaatggcccctggattcagtctgcagcctgaattcttaaccaattatactgtgatttcattattcttcagaattacactaaaaagaaggtattattcccattttacagatgaggtatctaagctcagagaagctaaacaacttgtgcaacaatcactaagcttataagcagtggattagggttagatttagatatttgtctggcatccaaacctgtgctctccctacagtaccacatggtttccacagtctcatcagaccccggaatttcactccctgagactgcttaattgtgaatttcccaaactgattcaccaagagcctactgtctctgctttgtagatagctttgaccacattcaatgacattaggaaagactccatttcccaagatggctcagaaaatcagatgctatgacgcatgttgaaagtgaaaacccatctctgagaaagaagcatctgttttattagtaaaaaaaaaaaatgaaatttacagcaatgttgtgtgacttctcaaaattctttcattttcttatttcagaatgaatagtgttgttcgttggctgggaatggggaagaatgtgatttttaaaaataaagcataatcaaactctgcataaaaggaagtgctccctttggctttctgccattttaactaaatgtaactcagggaactttcttattaagtagtgaatcagcacctagcatggcttgctactaaaccaataataacttaaggcatttcaacaagaataattctaaacagaataacgctgagggagtcacaagttttcagtatttcagactacactctgaaaaagagttacccctggaatcttagagtgtcacggtgccaatcccagtcaggacagcagtcaagtgcatgaggcagcaaacccttcccacctcaaagattcctcagtggaagatttctcaacaattatttctgtcaaaggcttcccagcaaggacacttttaaaccttacattttttccagtggtttttttttttccttttatatatcattgttattttgaaaacatctcctgaggaactagtgtgatagattctaaacatgggtttggaacagtcccatcaccaacttcaaaaaaagaagatgtgagcttctaggttaattgtaaaaactcattacatttgcagagctttattgacttaatttaaaatcatagaaccactaataaggtaacaattatgggggcttaagatgtgctaggtaccactctaagcacttttttggtcaccacaaaatgatgaaagtatgatgtaggtactattatcatcccactttaagatgagaaaattgaggtaaagaaaacttaaggaacttgtgtaacatggtagggctaagcctcgggacccaacagtcaaactctatggccatcatctaatcacaaggctatactacctcccctgattgcaagaagactcaggtcacaggtaaaaggaactgctcatcagaagtgatgagttttacatgtctcagagataactccaaagttacactaaaccttctaaatcaaaataagaaatagtgcaacatcttagagtttggtagctccaagcaatagacatttttaaacagggtgcatggggaaaagctgtagtttttatctccatcagcctatttgcttattacaactcaataatggcgaagggaagctcaacattttgctggtttctgttgaacaaattcccacagtgcactagaccacacgcctcaaacacctaccgcttccagccaactagcatcacatattaccagagttatggtaatttatacctggcaaataaaggaagaacagaatagtgatgagagaaaccctcaaatttcagtaacaataatgcagagaataaggttccttccaatttttaaattaaaaagaagacaagacttttttttaatttaggaaaagcaaaaggtaatcatgtcttaaatgaacttcacatactattagatgagataaggtgtgtaaaccttgagcccacaagaagtacattggtagtgattaagagtgtgggctctagggccgcgctgcctgcctctgagtcccaggcctgcctcctgctggttgggagactttaaacaaaggattcagtcgccctgtgcttcaatacctcagctgtgaaacgaagacaataataggtgtacctcacaagttgttatgaagattaaatgaaacaatatgcattttgtatataaaacactgcctggcacagagaaagtattcaacacatcttagctattattattcttctaaggggcactcaataaacaatagctactattttaaaaacttccaatgaggaaaacacaattaaacaagttcttttgtgttctctgttaatatgaatcccagtttgagacccacaactaaaataggaaaagtagaaggagtgtcgctataaatttcacattgacacaagaaatctattcccaggagtcgttgagagatctttgtttcttctcttttttcttcttactgaagtttatatgtttacattcctctgtattcagcctgtttgtccattttttcctgctttgtgttcatctattgtgccagcattcttttcgtggtatacaaagatgagatcagattcaaaaagactggttcaatatttttataaaataacatcagctttgagcctctactataaagacactgttttcagttcaaagtaccaatgttaaatagaatgaatgtagtggacttagtaatatgaagagagctcttctggggaaatgtttgtaaaccaaacatattctctaaacaggatagttggtatcctgagtaacctggtagcatagttgaagcttaaataggcctattacactgaaagtggagcagttggcaaccctatccctgagactaccccacttcagacctgcaacagttgggctgacctaggagggcgcagctcacagctgtccttatccctcctttccacactgtcctaggacaaagggtcagcaacctggcctttttagagtaattgatccccttgcctgagaggcatgatcactttccaaaaacagaaagagtgaaacctcggcctgaacagagcaaactcccagctcagggcaagtgatgaaaaacaattctaagaagctgagccactgacatagggaggaacttaatattccagctgcctttcaaacccagggaatttttgtgggttttctggtacttctagaatccttctgagtcagaagcagaagtcaagactcatcttgaagataaaaaatcaaaacaagctgagattctgaaaatgttatctgaatccagaatagcttttgtttcaaatgcaattgaattgatttagtcttgctttccttttgtgccatttaattacatttaaaaataaagcaaaactaggcctcttactgtactaaaaacccctttgttcttttttcacctagcatatctaacactgataaagaaatgttcacaaaaccattttctagagctaagaatctctaaggaattggttgaactaatataatgtactaatttaaggtttcattgcaatccttccacaattagatctttggtttggagttttttttttaattcacactcagagtctgttggttgtggttggattacttattactgtttaacaaatggtgcagatcataattcttcacgtaagtccaatatgggctagattttgaattctgcattatgaaatactcactgaaatgtcacaactcattgtgggtggtattactgaaataaacagcaacactaaatatattacttagaacttttaattttaattttacattgaatgaactaatatgatttcctttatatacagcactttagtatgagcaaactattcccttcgtagtgtaacatatagctttccactttttgttcctagtgtaaaattaagatttccccaccttagagatagccccaccttagagattctgatttactaggtttgggtgggacctaggaatttgtttttgtaacatacaacccaggtgattctgatgctaatgggctgtgaactacactttgaataacacttttctaacatgcaaaccacttaaatcaactttattctttaaaacccataaatagttttcctgtttatccagtcagggacagccagacttgtaaactgcacctgcttccacagtcttagtgccccgtctaaaaggaacaggcaggcgctgaagcactcatcttgccgattttatttcaaacgtccaggagatggcagcaaactctccttccctctcagtgcttcacaggcagccattctaaagctcgttgcattacaatttgctttgaatattctttttttaaaaaagacaaaagactaaagggggccttgagacgtgatttttatctgaccccctgcttctaatcaagaatgagtataaatatttctagggatagaatagaatgatacaattttattatctagaaaagagattgaatttccttggctattttttcttatctctggggaaaaagattgtatga

SEQ ID NO: 1457 - DNA, 2855 bp, Homo sapiens
gcagagagttgagagtgatccaggaaagtgaagcaggagatgcgggactgccccgggtggaagtgatcctcgactgctctgacaggcagaagacagaagggtgcaggcttcaggcaggaaaggagtgtgtggattctccagtggaaggagggcagtcagaagcacctccttctctggtatcctttgccgtctcatcagaaggcacagagcagggagaagatccacgctcggaaaaagatcacagcagacctcacaagcaccgagcgcggcatgcacggctcaggaggagtgaaagcctgtcagaaaaacaagtgaaggaagcaaaatctaaatgcaaaagcattgcccttcttctaacggatgctcccaaccccaactccaagggggtgttgatgtttaagaagcgacgtcggagggccaggaaatacaccctagttagctacggtactggcgagcttgagcgagaggcggacgaggaggaagaaggtgacaaggaggatacatgtgaagtagcatttcttggtgcaagcgaatcagaggtggatgaagagttattgtctgacgttgacgacaacacacaagttgtgaactttgactgggattctggactggtggacattgaaaagaaactgaacagaggggacaagatggagatgttaccagacaccacaggcaagggagccctcatgtttgccaagaggagggagagaatggatcagatcacagcccaaaaagaagaggacaaggtaggtggaacgccaagcagagaacaagatgctgcccagaccgatggcctgagaaccacgacttcttaccaaagaaaggaggaagagtcggtaagaacgcagagctctgtgagcaaaagctacatcgaggtgagtcatggtcttggccatgttccccaacagaatggcttcagtggggcatctgagacagcaaacatccagaggatggtccccatgaatagaacggccaaacccttcccagggtctgtgaatcagccagctacccccttctcgccaacccgaaacatgacgagtcccattgctgactttcctgcacctccaccttactctgcagtcactcctccccctgacgccttctccagaggggtttcaagtccgattgctggcccagcacagccccctccatggccccagcctgccccgtggtcccagccagccttttacgattcgtctgagcgaatagcttcccgagatgagaggatctcagtgccagcaaaaagaacaggaatattgcaggaggccaaaaggagaagcacgacaaaacccatgtttacttttaaagagcccaaagtaagcccaaatcctgaactcttgtcactccttcaaaattcagaaggcaaacggggcactggagctggaggtgattccggaccggaagaagactacctcagcttgggggcagaggcttgtaatttcatgcaaagctcctctgccaaacaaaagacccctcctcctgttgctccaaaacctgcagtcaagtcctcatcctcccaaccagtaactccagtttccccagtctggtctccaggagtggctcccacccaacctcctgccttccccacatccaacccatcaaagggcaccgttgtctcctccatcaaaatagcccagccttcttaccctcctgcccggcctgcaagtactttgaacgtggctggtcccttcaaaggaccacaagcagcagtagccagtcagaattacacacccaaaccaacagtttccacaccaacagtcaatgctgttcagcctggtgcagtgggaccatccaatgagcttccaggaatgagtgggagaggagctcagctctttgctaaaaggcagtcgagaatggagaagtatgtggtcgattcagacacggtgcaggcccacgctgctcgagctcagtctcccactccatctctcccggccagttggaagtactcctccaatgtccgagcacctcctcctgtggcctataatcctatccactcgccgtcttacccactggctgctctcaagtctcagccatcagctgcacagccctccaaaatgggcaagaaaaagggaaagaaacccctcaatgcattagatgtcatgaagcaccaaccgtatcagctcaatgcatccttgtttactttccaacctccagatgcaaaggatggcctcccccagaagtcatcagtcaaggtcaattcagccctggccatgaagcaagctcttcctccccggccagtgaatgctgcctcacctacgaatgtgcaggcttcgtcagtgtactcggtaccagcctatacctctcctccttccttctttgcagaggcctcctcaccagtcagtgcatccccagtgcctgtgggcattcccacctcgccaaagcaagaatcagcctcatcatcttattttgtggcaccaaggccaaagttctcagccaagaaaagtggtgtcacaattcaggtgtggaaaccatctgttgtggaagagtaatcttgtagctgaagctgagtgtccactttgcttgaaatgaattgtttgcagtgtttcttgagtccctgagaatgcctagcaaagtcctcaacttacttaatttcagatatgtcacctcctaatctgggtccaaggagtataatatttttaatgagtcaaaaatccaactcagattgacctaaaatatatttatcttctttgcacacttaaaaaatccaggagcaccccaaaatagacatgtaccgttatattaagtaagcaggagacttaggatttgtgctgtagccacaagaaagacagtgatcagtgatatcaaacatcaggaatcagcctttatgtaacataacagctgtcctcctatggtga

SEQ ID NO: 1458 - protein, 690 aa, Homo sapiens
MFKKRRRRARKYTLVSYGTGELEREADEEEEGDKEDTCEVAFLGASESEVDEELLSDVDDNTQVVNFDWDSGLVDIEKKLNRGDKMEMLPDTTGKGALMFAKRRERMDQITAQKEEDKVGGTPSREQDAAQTDGLRTTTSYQRKEEESVRTQSSVSKSYIEVSHGLGHVPQQNGFSGASETANIQRMVPMNRTAKPFPGSVNQPATPFSPTRNMTSPIADFPAPPPYSAVTPPPDAFSRGVSSPIAGPAQPPPWPQPAPWSQPAFYDSSIASRDERISVPAKRTGILQEAKRRSTTKPMFTFKEPKVSPNPELLSLLQNSEGKRGTGAGGDSGPEEDYLSLGAEACNFMQSSSAKQKTPPPVAPKPAVKSSSSQPVTPVSPVWSPGVAPTQPPAFPTSNPSKGTVVSSIKIAQPSYPPARPASTLNVAGPFKGPQAAVASQNYTPKPTVSTPTVNAVQPGAVGPSNELPGMSGRGAQLFAKRQSRMEKYVVDSDTVQAHAARAQSPTPSLPASWKYSSNVRAPPPVAYNPIHSPSYPLAALKSQPSAAQPSKMGKKKGKKPLNALDVMKHQPYQLNASLFTFQPPDAKDGLPQKSSVKVNSAMKQALPPRPVNADTNVQASSVYSVPAYTSPPSFFAEASSPVSDVPVGIPTSPKQESASSSYFVAPRPKFSAKKSGVTIQVWKPSVVEE

SEQ ID NO: 1459 - DNA, 50826 bp, Mus musculus
  misc_feature (1)...(50826): n = A, C, G or T/U
ctcctgccttagcgaggaggagcagcgcgtccagcagcagccgatcccatctctctcttcatacagcacctggcggggagtcagccatcagaagcaaaggaacttatgggcagagcagaacttctaggagggaacatgagtacccaggatccctcagagctgtggggcagagcagatggaggcacagacctgctccaggatttggggtaagagcgctttttcgatgagtacaacttcccagttccttgaaaaatcgccgctctgaccagtgtttccaggattcgagtctcttcccactgccacctgatggtcgtctacctggccagtttaattgacctgtaggagcttccttctgggggcgctgattcattgtaaaagtgtaagatatttttctaaaagtgagaacagttacactgagagaatgtgataaaaaaaaaatcaacttttgggcatccttcagcagctggggagtgtgcatacaatcgtctgtttctttgatactgggctagtttatcattaaagtgaggtggaagaactctgagtgcacctcttggcagtgaactgtgtcactggttccataaacagaaagactacacggctgtgagtaagagggattttttttttttttcaaaagaaaaagaatgaggaagtttgtacgacaatcatgtttctacggtgcctccttctcacacagcaatgggagctctttcatagcctttagacacaagataacaacagcctggcttcagatagacaggtttaggttaggtgacatcatcagagttcatcagaagggaccctgatgacacagctcatccggacatttagtaaagaaaaaagggctactcagacaagaaaggaggtttccttggagacaaagccttgcacctacacgcttgtgtttcccaagagagaggactctggacctgttgtctacctaagtggctggaattcctcatcacccaatgacataaagacatactgtcaccttgcatagaatggcaataaacacgaaagggtttttaaccccatcttatcggtcacatcagtgaaataacaaagctgagacagctacctgccagaggccccatcctcctctgagaatgggttgaaatttctgtttacactagagattgtatcattttatattgtgttactgtaaaatttctcacggcactgtgctggcacagcaagtagaggtgcttgcggctaagcctggctaagcctgagattgagtcctgggacccacttggcagacctccacacagatgatatgtcagacgggtacacacacacacacacactcacacacacacacacacacacacacacaccatgcacacatgtaatgataattaataaaaagtctaaaagcagctctcaataattctctgtttaaatttaaagccaaggacctgcactgccatttggtattgacagctaggattttcaataagggaaactccttatgaggtcttcagagctccaaaaactctccacgtttctcttcaaataaaaaaaacagaataagggcctctctgggagcatccagcccagaatcaagcagttcagagccgaccttactggccagctcccaaggtttgtacctgtgttttttgcactctccagcctctgaagttaagatacccaaaggagaagaaagatccagaaaatattcaactctgtctctttaattaaacaaatcctatcctgaaagcaggatctaagctttggaattgtcagcacactcaggacacaaacatacctgaccatgtgtctggggacaggcagtgcaggtaaaccacaggcttcccttcccaggcaaagaatagacgtctggtactaagtccggggacccttattattattatcacggaataaatggtacgtttgtatccagatctctttagttcagaagacctgaacattttcttgaatgtcagaacttggtctcagaaacaatgcaaacttcagttgttgaagaaactgctctatagtgtgggtttcaactctctctacatgctagacagactaaggaactttttatttgcttatttttattcttgtttttatacttgatacagggcctaatatagcttaggctctaattcaaggatgacttgaatttcttgatattcctgactgtacctcccaaggcctgggataagaggtgtataacatcacaccccacttatgcagggcttccaggattcaaggcaagcactctaccaactgagtacttcctaggcatatgaactaagaaaggaaggaaggaaggaagggagggagggagggagggagggannnnnnnnnnnnnnnnnnnnnnnnnnnnnnnnnnnnnnnnnnnnnnnnnnnnnnnnnnnnnnnnnnnnnnnnnnnnnnnnnnnnnnnnnnnnnnnnnnnnnnnnnnnnnnnnnnnnnnnnnnnnnnnnnnnnnnnnnnnnnnnnnnnnnnnnnnnnnnnnnnnnnnnnnnnnnnnnnnnnnnnnnnnnnnnnnnnnnnnnnnnnnnnnnnnnnnnnnnnnnnnnnnnnnnnnnnnnnnnnnnnnnnnnnnnnnnnnnnnnnnnnnnnnnnnnnnnnagaaagagggagagagagggagagaaagagagagagagagagagagagggagagggagagaaagagggagagagagagggagagagagagagagagatgtctctgagctaacatttgttttcttcctctacgtgcctctaaagcaagactggaattaagaatcaaggtataaaatgtatattctctgacgggttaggttaggtacagttttatcatttattttaatttagggcatgcccctaaattttaaaatcactaatgagttgtggcattctgttgagaggttggggcctgtggccaataataacttcattgaggtgcattttacataagataaacttgaagagcgcgactgtcactgtagccggtggtagcagattttcacctcccttgaaaaccagtaaggagcacaaaccaggtaaacacaatccgtgatctagctgtttggggaacctacaaaaaccttgatttctagaactcttacttctcagtattgtcttgtttgagccatttgatctaccagggaataagcaaatttcaaactgctggggactcagcatccattctgtaaaactgaatatttaagcaccaacagaagctggcccttgcccctgtcacatcagtgataggctttccataggagatagcagaggaacgttggcaaagaccaacgttccgaacataactgaaacttgatctttgaacctttaatccacttgggtgaggcgtgatcaataccaagcctccagaataatccagtttttttcaaagctccataaaattctatttagttagttagttagttaacggatagataaagatagataaagtctaggtttagtgacttgaattttacaatgattttaatgggttattccagtcatcagatatttcttttctgttgttagtggtttgttttgtgtggtgccagagatgaaaccagaggccttatatattttactctgatataatttagtggaggcatacacacagagaaagagataggggattaatcttggttctttggtacctacttttcttcaggctctggaatatgtagatgctgtgagccagacccagagctgcagtacacccatccctggccatcccagaaaacgcaggactttggcagaacgtgtgttgcatagtctctaagggagacttggacccaatcaagccattcagtccctttgcagtaccaatccaaaagcatttattttcctcttcagtgcatcagggggcctcaaaggagaagaaaaacaaagccctatttgttgtggaggtgtaaggactaacagggcaggcccagggaaccaggcaggggaggctcagctctgggaacggctaggtctactcctcctccgctttccaaagcaagatgtggggtgggtcaggcactgagaggctcagcactccagccttcctgcaggagctccccacatccagcgctcagccaaggcacaaggccccagaaccacaagaactcgcagtgtaggaggtatggaccggcctcatgttcagttccccaggttctatttgataagggattgttacccaacccccaacatgcgcttgatggaagggcagctaggccacacttcaggttcatcaggaccacagagaagggcaaaggggtgggggttccagtggttcgcttacagttaggaaacaggttccaggaaaagccccaggggcgtttcctagcttttaactgctaatgaagcggatccagctctctggtggtacagaaaggaccgtggttggcatgacaacctctgctggtttaggagaaagagtgcagagattaagacagatgtagattaagccttccctgtggagccttgcctggaaagtcaagaccagaaatgccctctttattgatcctacttataacaagaggagaggccttaccgttgtgttcttttctaagagtccctggaacttgagctgccagctgccaggagtgcccccatgccctctcctcactgatttattctccacaccttcctagcctcaggcaaagtacacaggcactagcctcagaccggggaactggattcagcctaaacctaatgcaatggccacttctttccacagaaactgtaagcagaaacaaagatctgattcttttacaagcaaacgttggtgcacacagacatattctcttcaggggctgacattttcacgagggtaaatcagtttgggagattcactaagcagtctgcaaagctgaaatcataggttatgatggaacttttagaactagatggcccactgtacggaggagcacgggggaggtcctggttatatatatatatatatatatatatatatatatatatatatatatatatataaaaacaatgagagtttgcctgtccttatttgatttgcagagcaggcggcacatgtgagtaatcccagcacttggcatgctgagtcagggggatttgtgaatttgaggccagcctgagctacatgctgaggttctgtctttaaaaaggaaagaaaggaggaaggaaggaaggaaggaaggaaggaaggaaggaaggaaggaaggaagagcttttgttgttccttgcatgtaagagtaagtaaaacaccaacaacaaacggtcatctttgtagtaaaggtaaaggtgacagatgattttggcctcacaaccgtatgtgtttctgttgcactaaacaaacattagagaagatacacacaagtgcccaaaggaaacactacttataggcaatgacgtgtgagttttatctacaattgtcacacacacacattttcccctatttcaatctgttcaaccattcttggctctcagtccacacaaaacaaacggttggcgcaggaagtacataacgataaatgcaatgcatccctattacagggcaaccacgttgtatacactctctctggcctcccaagacacacttactccagctttacagtaagcacctgaggaatctgcctggccgaagttccacactcgctaagtccactgcgcctgcgtagctcacaagccaggcagcttccctactgtcacagtccgcagctatgccctccagctatgcaccaaccccataccatccgcacatttcgctgcatttagccttcacaaccatcacgatgtggtattagatattcatttcatagagcagacagtggcttggaaaagccacgtgcaccgagcccgccataggcctcctacccagtggatctaagtgcacacatggttcgcccaacaactgatacagtcccactgtgcattgctgccttgccgctcccaccaattaaacaataatggcgactactcagcctcgcaggcttcccactcacaagcactgtctttcccgttttgcctgcaggaacttctttaattcacacactgctggtgttactgaggccatgtgcacttacggatgagaaagagaggaaccaatctatctctttccgtgtgccaggtctacagagcctgcaagctgcaccacaaaggcagcttcctaattttactcactggtacactgtttggtgcacatgtaaactgaggagggaaaaagaaaattctatgacttctacaaatcaacacaacttattatatatatttttaaaaatgtcaactcagtttttgactactaggtgtcccacatggacaggccactatcccagtgagccagaaccttgatgaattctgtgcacattcaattttctgggccagaaaaacaaaacaaaacaaacaaacaaacaaacaaaaaacaaacgagtaacaacaataaaaacaggctaagaacactatcaagtcaaaactgtccacagagatgtgacggcagatagcacaatgaggctcatgcagtgtagaccactctgaaatcttgaattctacaaatggagggcgggcagtttttgttctgtggttgcgtggtgccatgtgatcagtgaactgactgggatgctttggctcatgtgcgtttcctcttcaggtgtgttcttcttttcctcctgtgtgtgacttccttccacttacatattggaaatctgccctgtgagttcctcacattgggagtggctgcttcgctgcatcctttgttctcccactcattcataaacccgtctatggaacgaggacattgggcaaggttgggaggatacggaagggaagcaaggactgcgcagaagcaaacctcaccctgcgcgcatagcaaaaaccccggcaatagtgtaggtggccccgacgatgtttatcagctgaatgtgaaaatatagcactatatggggtgggagtcatgagtagagggggaaacctgacaagatggagtactatgacaaacagcctatgtgacctcagacctggttatcctccatccatcctggagagcctgctttcactagaagcatctaccgggctgctgtagaatttcactttgagaatcagccccatgagtttgcttttgaaagccttgcttgaatcttggctcaaatcgtatctcttcacactcctgctccccggctgtgcatttgcttatagctgagcagagtccaagcagctgggtcttattactggtctttgccctccgccaacttctcggtagcagatacctgacctctagataacccagcccgtgccctgctacctagtgcctgaccacgttatcggtcctctaaaagtatttacacctttaaaatgtaaatgtgttgccatttaatttatactgacatgagaattacatgaaattatgctatattttggagatatatgaaactgtagagggctggcatatcatgatatgtctgttttaccttacaactgctcatcaaaaactatacaaaacatatggcaaaaatatattctccctaaagaatagctactactgggccagagagaatgccctgtgggtaaagcatttgtcaccaatcctgaaagtctgagtttaattcgtattatagaaggaatggccaatttcccatgcactcaagctagtgggtgtttttaaatagaagcattgtttaggctatttctcactttcctttgtgtttgaaattatttataccgaacagttaagttatacgaatatggcaattattagaagttgggggaaaattgtaaaggtcagtcatttctacccaaagaatatatctacctaaaatgacattgttcaaaatctttcctgtcttataagtatatttttctgtgaacacacacgtcaatacacagattgagttatagtcataattttgctttgtttgtttgtttgtgttttggtaggatagccattatcttggcctctgttcaagaaagtataggtctcatcttagatgggtccatcttagtctttgggtacttgaattcctctggatttccagagggtctgagatagatttgatcacgggatggtatgggatcactgagtgtttgtagggatacaggattaattacagggccaccacattttatgtgtcaataggataatgaggtagttggacatgataagcaaccatggctcaggagcctagaagtcctgaggcgcagattggtgcttgagaaatgacacagtagggagtgtgggtggaagccagcccttccactgagtgactcacaccccgacaaacacagctctactacttttgaatatttttgttgttgttttgttgttttgtggcccccctccccctgagctggggtgattatgtatatataatatatacttacatacatggcaatgggaaaaccttaagactcacaaacatctcctaaatcccgtctgtgtttgcctgagtgctgtaccttcctaaagctgcccgggttcatattcctgctcctattgttttgacgcgcacctgggcctttcacagtatgggtacacaatggacacttggcaggtgtggatgctgtggtgttgacttcacccctcctcttggaagggagccccttaggagcagggatgtaggccattcggtttaccttttctgtatgagcctaccttttgtcgaagaacaggtgtctaagtgttcgttgactcaaagccaagaccagaactcaaggttgctgacttcagcctagtgatgccacactctagactgagtccccttccatctgaggctttttaactggtgaactaaaccgatgctggttagaaattggaagcacgcagtctacagaggagggatggaataaagacctacccgcctgtgagctttacatctcttgaggtacgggactctttcctgtgcccacagcggtaggtttccactagcaagcatggcctaaggcagctaatcctagccagcattttctgaggcacacatgagcaatcagagcaagtgcatagtcgactcaatgtcctgaggagagggagcctccagagggaatgctggctttgcgatccttgaccagccactctgaggaactttaggctcttacccacagaatgttttgccctttgtcacactctttggggaatgatgctgtaacactgcaggctgccctgggaatgaacacaagcaacttgtagtgaggagatacaatttctactcctatctccagtcagtgactgtgtccctcatctgctcccagtatctaacgtctctgggcatgtggctctgtctcagggtctgctctgtgagtctctccgtgtgggactgctatgttctttgcctctgtctcgtagatgactgtgcctctctgtgtatgcttgctaagtcactacttatcgttcctggccgcacacagtacacatacttctgctgactgtgtgagaggtgagatatgtgatctccagctccttccctacccccctcttgctctttcttcctttactgtttttcaatctctccccttctttagtttctcttggagctggatcctgttgagagaagccccccgcccttttctctttattcattctttcccttatctgctcaaagttggttcaactatgtaacctagcctggccttggtctcccaatgctcctgtcttgctctcctgggtgctatgatcactggcctgcacagcatgtccttttgtatctctgtctgtctctctttgactcccatatttccgagtctctgcctctcttcttccatctgtcttcgtgtttccattttccagcacttcctgccttatcatcagacttcaagcacaggttgatcctgctctctaagtacctctgtgttggggttggtcttgtgctctgtgtattgagatgctgagttctgtgccccaagatcaggttgtagtctggacataggcattgtattgaccaacgtgctataaagaatgatcccctggtcaggagggagagggtgggactggagatcaagaagggggtggaagggagggtctcaggtagggaccacgaggagaaggaaaaaaagatgggggaagaagaaggcttccaagagtcagaatagactatgaggatggaccatgagcacgaggccaggagaaacttgccctgaggacacacatggagcagagcaaatagagctagactcaggttggcctatgggtgtgatgtaggttaaaatagttcagaacctgtccagtttaggcttacagactgctatacagggttagagcggggcagaaacccctcataaaaatacttctacacttctcctttcagcactgctttgtttgtttgtttgtttgtgagctgaggtttagcacccagctttagtgggtagatatctgcatgctatgcttctgccaggtctgtttcctaaagctttggacaactaggctcaccattcagccctgctagtaaggtggataggcgggacacttaagcagcgatgtggaaagtcccaaccttgctgattccatcaccgaaaactcccggctggaaannnnnnnnnnnnnnnnnnnnnnnnnnnnnnnnnnnnnnnnnnnnnnnnnnnnnnnnnnnnnnnnnnnnnnnnnnnnnnnnnnnnnnnnnnnnnnnnnnnnnnnnnnnnnnnnnnnnnnnnnnnnnnnnnnnnnngaacttcctcaaccctgtgggaagcttctgcttgcctccttctacttgagaagtgaagttccaccctatggaacacagtcttgtcttagatacagcctgactgtagtacaacagccctgaaagctctggtgctaaatgagaggtgtcttattctacaccggcaatttctgatgacaccaagagctcaagagcttagcctttcccacagttgaagcatccagcactgactctaaatacaggtacacaagtgagatcaacatccgaccagtctggtggagcaactcaggagctaaagtcaggtgaacccaagtgagagcagcttggatggggaaagcccggtggagacagctcatgtttcctgttcacagggaatgtgaagccaagctgtaggttcaaccacagatccatcatctgtgtcatggccttagagaaggagagacacattatccatctgtccttggggcccaaagacttcagagggtgtcactgtctttctaaaatgagaacaattttgaagcaggaaaaaaaaaaaaaaaagaaaaacttttttttgagtatatatgtccctttataactcaatataaacagaatccaagttccaggtcacttctctttgccaggaatggaggtgtacagtgaaatatattaataatctgtaggcaagacattttctcgatgagaaatgaatactctagagctgagggctttgcttagtagagcatttacctaacattcgcaaggccctgggttcaatgcccagtacagccaggaaggaaggagggaagagaggaggaaggaagagagggaggaatgggaaaaaatgtcttaaatgaggccacaaaccaccagtttttctgttattttgctttactccccagcatggaccctgtgcttccgctaggcattctgctgtccatacacaaaccgaccccagcgtcttagcttgtgctctttcctcttagagatgccctctctcactccctaatggatcagacatccatagtcgagcccagagcgcgatcgatcatctcccgccatcaagcttccctggctctgtccttccttccatgagatccagcagcacacagcccgaggtcggcagccacaggggatctctgactgctaacccgcagatcctttttcttttctctatggaaacccagaaactacttcaccttgcccttttccccagatgccaaagattgaagtcaagccattagggctactgaaggaagtttcttaggatgttcacgtttctcagattcttagcagggtagagatcacttgagcctccacagtcagggggctggggacaagaatatacatttcaaccaagacctcgggctagcccaaattttgagtagcaagattttgtattgatttccaacagcaactcattagtggtttgtctggtagtgaatttagtggtttatataaatatttgtgcaaaataaatatcaaaatgatttaagtaaatagcatatagaaagatatttttccttgtaacttgttttttttttttttttttggagtgtgattttaacgtactgtgagttacctcaataattttaaagtctttccttcaacggacatagcataaacaagacataaacttagaccagcaaattaaaatattaaaacccaaaggataaaacaccttggtgtttctagcatgttggaacagtctcctagaaggttccagcatgaggaggcactgggatgaaggcaggaggagcagagttgagaaggaacttccggatccagcctgcctgtgttctctgtggttgagtttatttcctgtatctccgagaggcagttatgaaaactatttagtgggtgggtgtttcctaatttgctgccttatcatgggagagataaggccgctgtttccttcaaggtcaactgctagttttgatattcttataaacccaatgcaagtattctgctctagtctataattagattaacatctttactcttactgcctctgaccttgagacacaactgtaaaaatctataagccataggaataaaacgtgactataacacggtgccttctaaaacagttaccagcagtagtttcttcttttcatttctttagagaaagtaagaccaaaagtcttggagttggaaaataaaacttattcaagactgcatagtcacgtgtcaccagcggctaggagaatgtctggcgtgtcagtgataagagaattgtggtttgttctcttgcaaaagttaaggaactggggaaattgtataacagaagacagcatctcaatacatgaaaatatgggttttctctttgaaaaccttgtcatcttgatttgtgacaacctgacgttgctaccgagagggaccacagagttgctaagctaagctaaagtggtcggagcggttggagccactgaagaagggatcacactgaaagctaacctcttcttgctctgctactcccttcccccaacctcattcctcccacccccacccctgcttgggtccaaggtgtccggacgcccattagctcaccttttctcttcgaagtgcccactagtcaactggtttgttactacacgtcattctaaaaataccagtcttgcaaaggtacagagaaaaatgatgggcgggaacttttgtccacaacaggctctgtgtgagcttcctcatgcaattctgaagagaccagagctagcgcaggaggcattgtgcgtgccctgaagcaagaccaggcaaactaggtgctgctctgtccgcacatcagaaattagcttttagggacaattcaaaattcaaatcttaaaaggtactctggagagagtactttgggagataaaggacacaaaagcctgtgataaaaagaaatgtcaaagatgatagacagagaaaggggcatgttccagactccgccagctactgttcaattttatctgtgagatgtcagccagagaaagtgacattggccaacacaggttccttccacagccccactctactgctcagcggctcaggtggaggcttcgtgccccagccacatcacaaccgatgcctgcactgctgaccaaatgatttctcattgcctggacacttccgatgcctccctaacgccacccgaatcatctgaatgactagccatctctgcctcaccagctccctgggactgggcccccctgcagttggcaactacctctagtgtccagctttctggactaagtcaaaatagtaactagaataaggatcgtataccacagtggagacactgcctggtataagctgagtgaatctcattgattggggaaggtcactaatctactgaggactgctgtttgtcacttcagcggtattggcatgagcagtcctcatcgctggactaggaggactagatattacttttttaaagaaaaatatttaattttatttcatgtgcattggagtcaagtcccctggaactagagttagagacagttgtgagctgccatgtgagtgctggcaattgcacctgagtcttctggaagagcagtgagtcacctggattgggccccaggcaacatgactccagagttactgcactgcttaaagaccaagtgaaggacctttctctcggagaaaggcccagagtacatggccatggtcatggcctggactgctcttatccctgtcgaaataggacatggggatagaaccgaacattagctagattcacagatgatctctgaggaggagatatggttatgtgggaaactgtctcctggagacaccttttctgaaccacaaagatcaattaaaattccaggaatgtgaaacggtcagcttgagtctccttggaactcccaggtccttggataatcatcagcttgaaacagagtttgacttgagagtggatgctcactctgaaaccccagggttccttgtggacagcttcgtatttctcatgaccctggacagcttggcttttctcatgaaagtttccttctttcggaaaagagtgaaagcagacaaaagaaagagaaattggccaatgcatttatggacctttttttctttacttccccccccccattgtttgtgcgcatgcttgcatgtgtgtggacatgcgggtggagggctcccaatccaggtgatgcctttcacttgaaacaagaccttaggcaaggtacttcacctgtctgagccacttcagctcccttacagccaaagtcagatgaacaatatctatgtgagaacaatatctgtgcgaagctagagagatggcttagtggttaagaacactggctgctcttccagaggacccaggttcacacgcatctgtgtgggagggagtccttgtgaatgtgaaggctaagtgttggtgttggaaagcattcttcatagttcttccacctaatgcactgaggctgtgcctctcaaacaaagccagagcctgtggacgtggctagtcttgctagccagcttgctctagagattcattctctctctctctcctactccccccccccccacccctcaactcccttcccaagcaaacagacaaactctgatctccatgcatgtggcaaatactttaaacactgagccatctccctgggcctctgttatagctattttagcttaggctccttaaacaacactatcatttactgggctgtcttacaaactgggtagtttgacaaagggtaattgaccatttcgtagcttcgagggctccaagttcaaaaccgagcatctatgacagtggctccttcaagaaggcttcgaggaagaacctgttttggtcactctggctctctggatacaatcctggtcacacagcgttcttctgtatggaaatctgtcccccagccttccctttttacaggaggattccagccacactggattgcgcccacctgaccggccttgtcttcacttctcttcaaataaggtcgcattcttaggagctggaggttaggataatgtgggagcttgttctgaccacagcctataggctactgctaggtgccactggtgtttctcccactcgtctgggaaattcctagttctcctttgggctgagagcctggtctctggcatccttaaaatggagaatattgctaattcatctctgaggggaaaccccagagaagggttccccatggctcatcttgaaggaaagccctgttctggtctttctaggtggtatcacggcaacctcacccgccatgctgccgaagcccttctgctctccaatggacgtgatggtagctacctgctgcgggacagcaatgagcagactgggctctactctctctctgtgaggtaggtgcctagggacttggtagatttcagtcccatctgtcacttggttctctttacacagcactcacactgccaggtaacacataccccctgattcctggtcagtcaccagattaaaggatttcaaatgctgaatggtaagattgtaaggaagtctgtccagggctggagaggtggcttcatggttgagagcactgggctcttgcagaggacccaagtttgcttcctagcacccttgtttgggagttcacaatgtaactcaagctccagggaggtctgacatctgtggctacctgggcacttgcactcacagaaacacatatatacacattctctctctctctctctctctctctctctctctctctctctctctctcacacacacacacacacacacacacacacacacacacagacatacttatgtatacatgcaccacacacatacacacacacacttatatacacatacaccacacagagacacacacacactcacgcacacatgcacacatgcatgcactaaaaaattatttctcattctattcactgcagaaaaaaaatgtcaaaaccaaaggagactgaaaattatttaaccccaacttgtcattagacacacgaaaaccgtgaaacccaaaggagcaggctgtctgtctcggctcaatcaacagtgagacagcgctgacatctgaattcctgggctgagcccctttttgtgatttctttcttgcctgggaaaggcagaatggtttgtgaccgtgcagtgttcatagtcacagacttaaatgggtaatgttcaattttaaattctttctatggactccatccctttcccccaggtggtgagctaatctagtccctctgagttgcacctataaggacactcagtgcatttagggtttctcctccaatcccccattggccccatttgtagtcttgaacccttgacacgctggcttctagtagcaagcatctaatgttcccgaattcttgtggccttggctggacatgcagcaaaagctctatgctaataatgaccctggggggggggctattggatgactgtggcagcactttcacaaacccaggaagccttgctctcccctctctcctttctgttcctgacctccttgcacacttgggatggtagtcactacatcccagatgctgttcctcgctcctttgtgtctagttcagccattttggtttatttgggtttgggttttgttattaattaagtcttcctctccccctccctctccatttaccccctctctcccccctcttctttcttcttcggttttggggtccaaactcaggttttcatgctttcaaagcatgtattttaccaactacactagcttcccaatccaggaaatacttttactctcttagctgtttctcaatcagggagtaggggagaggagagagggagaaggaggggcagtggaaggaaggaaagaaggaaggaaggaagggagggaggaaggaaggagggagggagggagggannnnnnnnnnnnnnnnnnnnggagaaaggaaggaaggaaggaaggaagtaaggataggaaggaaggaaggaaggaaagaaggatggatgggagaagtcaggtatggtagtgtatcttttcgattctgttgctatggaaacaggcactgcttactggctaaccagcctagtctatttggtgaattgtaagccagagatggatactgtctgaggaacaataaccaagactggcctctggtctccacatgcacacaaagatatacacatgcacttgcacatataagcatgcctgcacacatgtaaatgtttatgcatgcacatacacaaacaaacacaaaaaggtacttctctaaacaactgttgacaggcttcagtgagctcaaaagcaaagagtttaacatattgtttatcctcttcttagacatggacccttcggtattcactttctatgctatataacaagtcaccaaaattttgtcatggcttaaaacaacacaaattgaccgtgccactgttcctgcatacattaaaatccgggcatctattcaaattctgccagcctggcttaaagatgttttcagcagcagctggggctcttgacagaaacgcagaacccctgcatcacttcctcctttccttacctagtttgcttgtctttcatttccctgctgtggtagcaccagggtccctgttcccctagctgtcaatcagggagggagcagtgtcaactgacagatgccactgtgatccgtgctgtgtggcctgcatgcgtaatacacatggcacgactgtctgctgccttcctgccagccagagcacctctctatcctctcctgtgtcagagagttccgttccacggagctcgcatgaagaggtcaggcccacaagagactcttcgtgtttttaaggtgaaccaatttggagacttaacaatgcactaaatctcttcacaactccatcttgactagttcttacctgggtaattggaacagtgctatacattggagttggggtcggagcgtctatgagttctgcctggcataacttccattctctggcagtgagtctacatgcgttttttagaaggagagataggtacagaataggaaacaaattaggtagccaaagggagaaaaattatatctagtaacatttggagtcaccctgacaagtcttatttataaattttctaaatagggctaggcagtaatagctaagtctatgcaagataaaaataactgagttgaactcccagaacccatgtagaaaactaggaatgttggtatgtgctcataatcctgatgctagaaaggagaacacggaggtatcactggggctcactggccacacagaacttgctgaattgatgaaccccaggttcagtgagagtccttgccaaaaaaaaaaaaaaaaatccatgcagaagattcctgacaaatgatacctgaggttaacccctggcttccacaaccatgtgcatacatgtgcacgtgtgcttatacacacatgtacctgcacatgtgagaacacaggtacatacactgcgtgtcaggtagatcacagatggtaactaaagttttatctacatgtgactcatctgagcataagctatttatgaatagactgcatgtatttcaccttcatgaaaaattaaaataaatatcactggttttcattacaaatacttggtaacatttggagcagggggaagctaccatcagaggtgacaggatccataggccagttgtttagagttatgattatttttattcatttatttgtccattcccttaataatagacctttgaaagcgtgcatcttggaccagccatcgtaactcgatgaccttgttgggaagaagtctagtctcatagggccactaagacccaaatcttgctacaaagcaaagtgtagcaatcgcttaaaagaaggcaagtttttgagcaagaaattaaaaggcactcaacataaggcagaattatcatgaggtagaagtttcaggaagactcaaggttgtttaccaatgggaagggccaattgtaggtaaggagcaaggatggaaaaaactcttcctagaggaacagcaggtccagatggacaggggccctgaagctggcgccccagatcagcaacatccactgaggtgagagtctgttaaaaaccttccacctgctgagtcatcgtctgggcatgagacccagcaacctggctcttcagaccttactgttgactctgatacattctgaagttggggtgttggccacagagtgggaggtgagactagggagaagagaaatgaacaaatgaagtgagcaggagagattttatacaacgtttttcatcttgaagatgaagtggaaaatgacagccttggaaatgtgacactctattccgtagataatcatgcaggcaggcgagggagaagactagggtcatgtgactcaccgacagaagcaggcttctgactgattcccagactagggaggaaggccaaggacacacacgtcctgcctgtcacctctgtctctgaattcatggcctttatggacgttaatattcaagaacctttgccgtcagtggaagagaaggcgggggaactgtctcatgtcttcaagtagagtgaaaacctgagagtattccctgacagaagacacacgtgacagcctctaaagtgcttggcgattttgatggctgtgtgttccgcatcgtcaaaggcttatttatggtgatgctaacacactgctatatttaccttcaaaaagaattgtcatttgttaaataatattcttcttttctttcagagccaaagactctgtcaaacactttcatgttgaatatactgggtactcgtttaaattcggctttaatgagtattcatctctaaaggattttgtcaagcattttgcaaatcagcctttgattggaagcgagacaggtaagctgtctaaatacctggcttattaatatggttattaatacatatttctgcatgaggatctgcttggagtctggtgacttctgctggggctgagaacattgcatggtgagagatagggaaggaatacatcaaacacggagccctggccacagccacaagctcacctggaacttgtgaccctctcgtctcagcctcagaagctctgaattatgggatatgggacatgaaaagctcacacagacagacagagcttcatataagtttgaggctacagtctgatccacatagttagttccatagctagtcaggtctatatagtgagaccataaataaataaataaataaataaataaataaataaataagacagagagggagagagggaaagagagaatttctttagaatgttctcttttataatacataaagaaaagaaaacacaagccaattcacaatcatttcaggcctgacaggaaactctgcttgtaacacaaaactgataggtttagaaacatctctgtgtgtgtgtgtgtgtgtgtgtgtgtgtgtgtaggtgagaccctgagaacttaatcaggaacattttcaaaggtaaacttcacacgaaatgcccacagcaaccaagtgctcaatattgaaaatgttggctagaagacatttttatgagcaataataataataataataataataataatagtacccttagtttattacaaagtttcacccaggcagtggtggcgcatgcctttaatcccagcacttgggaggcagaggcaggtggatttctgagtttgaggccagcctggtttacaaagtgagttccaggacagccagggctacacagagaaaccctgtctccgaaaacaaaaacaaaaacaaaaaaaaaccccaaaacaaacaaacaaaacaaaacaaaaacccaaagttttaggcctatagcttggtatggacttgaaatttctcatttcagtcgttagtcaaagtggaagacatatatatataatctctatatatatatattagagagagagagagagagagagagagagagagagagagatcaaacaccacattttgtcagcccacatcccactggtataaccactatggatacttgagctaagggagaatacaggtagggaagtaagtttattttgtctgatggcatctgcagttttaggccatgaccccttacccccttgtcaccatgatgagagtacacagcagtgagaaccactcagcagatgaacaggaagcaaagaagatggagttggggtggggcttatccctgttttactatccccttcaatgtcacaccaccaatgacctaactttttcacactgttcctaccttctcataagaccaagcaggcggtcacatccctttagcacatggacctttgatggacattctctatacatactgaagcacacactatgctggcccttgagttttctaacttgtttgtctataatctataaagtaaagggtcacctctgaatttatggtttagaattctagccttatttgctttaaatgataaaaaaaaatctgtttatcaacaatgggaagactgcaagaatctatagcccgagagatggtgccacagctaattgccatgaatctgtacatttttcttgtaatatctggagtgatctttctgctcatcagtgtggcggggtgagctggcatcactgatcactgctgttgccacttatgtcactgggacagaccccagtatgagtcagtgtctggcacacagatgaacaactcacaggagccacacactggctgctcacaaaaagacgaggtttgaggtaaaatgttctgagtgtgaacctaaagctgtcaatctgtcaatttccaggatggaaatcctcacaatcagccctgacagtttcctcagtgtttaactcgttctcacaaacaaatacatatgggaatattagtttccactgctaccttgacctgagagagcacatcgacttctctaatctctgcagctttcctcccggtgtgtgctccaccctacacttggttttattcaattcttgatctctggaaatggagaggagtgttttaaggcttcttcttcttctccttcttcttcttcttcttcttcttcttcttcttcttcttcttcttcttcttgttcctcttcttcttcctcttcctcttcttcttcctcctcctcctcctcctcttcttctttccttctcctccttctccttcttcttcctcttcttatcttcttctcctcatcctcttcaattacagaactatttatttattttatttatataagtacactgcagctgtcttcagacacaccagaagagggcatcggatcccattacagatggttgtgagccatcatgtggttgttgggaattgaactcagaacctctggaagagcagtcagtgctcctaaccacgtagccatctctccagcccccacattctttttttgaatgcctctccttttgttcctcccatatttgctatcagtgaagaaataaatgaaataaatgaaataaatgaagggatgagtatcttttaggaatcctgtagccatcaaaaccactattgttatctgtttgccacctctttaagtaaagttaattctttcatttaaacttctttcctagacactatttaaatcttttttatgcttctctgtactcattactggaccttctcaaaatgaggggatggcgaatggatgtgcatacacatcttgctttctggcagatttcaaggctgggaccaaagtgaatgcgatatattttgattgagacgttcccacacagtcatcagacaagaggctcacctgaaattgcatcacagtagggtcacctgcacacagtagggtcaatgtcacattgcatttagagctatgtacagccgctttgtaaatacattatcctgactaaagaaatctcacagccaagtgtagtggtagttgtaattctagcacataggcaaaaagatcccatgttcaaggtgagcctagactacacatccaaggtagaggataacctggcctacataacaagaccctgaccaaaaaaaagaggcttaatgcgttagtattggagtttatagagtagttcctccaaagttaaaatgttctgtgtgttatcaccaaggctcccacttcatctattctcgaaaactaaattcgtcatcttgtccacggggtgtcctctgtgctacccatcatctgatacacaatctgctgcttccggagccctgattcagctgatgagtgtgcacttgacttgctgacttcaagccatcgagttagaatgcattaattccacttgcttatctgttcccaccagatgaagccacagccatccaagcttattcaaaggacacaactcatgacacttgagtgttctaatctgcccaccgtgggagtaataggcttccggaacacaagatagtgtgctgaagtcacaatgtctgttaagccgagcagggctgcaatagtcacagagccaccactgtggccatgaggaatggcgaatggaaagcaagatgccaccttctaaaaatagcccacttcttgctcacttatgcattggcttctggtgggcacaaatggtggtacatgcctataatactaaattcaaagtcacctgggctacatagcaaggcccactctcaaaaccaaaacaagtgttagtacctaacgttagctctgacagatccggagacctccaggccaaatttcttgtggtttaaagaagagtacaggaaaactacttgttcacacattgagcgaggctctgctagagcatttttctctaggtcttccaaaatcagaaataaaatccaataacttagacagtgcctgttatttagtcccaggctcagctttggcctgcagtgcctaagagtgtgcatttatagagatggtctgctcggctcagtggcacagaccaccacagtcaagagactgaaaaggaggatcagaaattcaagaccagacttggaaacttagcaagatactgtctcaaatttaaaaaacaaaacaaaacaaaaaaaaaaaaacctattgttaaaaactgggctgggtatgtagttcagagatagggcttgcctaatatgtacagtgccctacagcaggcgatgtattgatttgcccactgatgggaatgctacgacctctgagagcaacagggtgatcttcataaaatgacacaaactgcacgtttgtgctctacaatgatgcataacagtttcagtagcatggcacccagaattcttgattgtaggtcgcaggaaaatgtttgtcttaaagacaattggcagtgttgatctaaagggacacatttaagtgtcaattttttctcctttattcttattctctgttccttaaatgcccagtttgtgattttcttagtctgaagaacacaggtttcctagatcgcacctaagctcctgccaacgtgtagccccctagaatggtctcttcctctggtctccattacagttcctcttcattctaagtctttgtctaaccatccatagacactctgaagatgttcttaatgctcaaaacgttatcatttcctaagcccacagcagagctatgcagtggacctgatgactttttcctccagcacatttgatagttgtataatttttaatgaacgtatcttaactttatcttattgtgcatattagcataaaccccatgaggagaggactcctgtgggttttgtgtcctgatagatcccagaacttgaaagaataatgctaatcgattccttaacatgccggggggggggggggggggtagcctacagtagtctgcacagtactccaacacttttggcgattctaaccagcaaaactgatgcgaagcatgacataggcttatgcttgcttctgtgttctgtgtctacctggtgatgattaaatccagaatcctcattccatttgccatgatagtatctaaagagtacaatccttatacacagcactccagagacctggatatttgagaatatgtatttatagatatatttagtttttagtatagttaattttttactgactcttcctctaattagcaaagtctccccgcactgatatctatacgtaggcatccaagcattgttaagacaaagcaccatttgctcatattgagatagcttccagtgaaaactgccatgtagttttgggggtgcttgcttgcttgttttagtagttgaaggtaactttagtcacctaatccacatatgagaacatgcacagtgcttcaagtcaggtcctctgtttgcagcttccctttagaataattggtgcagtgttggagaccctatgtggttctttcacaaaagccaaatttccacttctgtttttttgctttgatgtgggatgcctgggccttgggtaaaagttagagctcatattagtcactttgtggcaccagcaagtttcccgggggtcgtgctttaatgaagttaagagtttaagaactgcctgaggtgtttttggaggtaacttaacggacaacttggaattttgccaagtcaagcttcttccgttccgctggtcagccccgaaatgcgtttcagttggtaggggaggcgtgtttgcaaatgaaaacggtgcaggggtggggatggggcgtggggggtggagccacagtgaggcatgtttagcaggttccaggcattcgctcagaggttttcacacgaattatttaatcttccccgtggcccacaagaatacaggcagtgacctcattttcagatgaggaaataaaacgtgaggctttatgttatttcccccgaggctgtgcgtctaggaagcctcagtgcaagggtggagggaatccaagctaagcttcggaaggaacaggtactgtctatgttcgcaatgtaaggtagacctatcgttataaagaaaatggatccgcttcaacttccgccattggactacgggtattctcatggtatttaggtaaaatggcatttgagggtcgtttaaatattttttatttcacttgtttattttctttatttgcgtattaatgtgtgcctcaatgcccataagaaagtcaggggagaactttccggagtcaattctttctctccaccacgtggggcccaggtctgaaactccggtcatcaggcttggcagcaagctcctatacccgtatctgtgccacctcgctgaccccattcaaagccttatactaggaaaaaaaaaaatcttaaaacattaaaaaaaaaaaaacctatccagaaagcatcctaaaatagtaggcctgactgcatagctcccgagaaagaacatcaagttgcttgtgtaaataaataaataaataaggtaaagaaaaattacctgaggatggagaatgggaagctaccatgaaagggagctgggaactaagtccttcagaggagtggcatagttacgggaagcaggaccaccatcctcttcccgctttggggcctgtgtgtttgagttgctttctaggcaggtagaaacggaaggtatcttgggaccatttaatttcccctttacaaaggagaaaacaggtatgatgagaaaagaagccaatttgcatatccccattcctgaggctgactccctgtaactcgttttcgtcaaaccttgatttacgcatgcgcgaacctccccccaccgtggagagcagtttgcatccagcacaggttcccatggtgccggacacctgagactgagagtgactgcgttgtgatgagcagacccacaaggtcgccattccactctggagtctgccgtttgccaaccctgtgttctcaggcccactgttaacctctttgagctttgagctttggtttcatcgtcgtctaaaatcgagcttgcggtaacggttcacactttcgtgcctccttgtgaagggagaacaacttcagatatgaaagacttagaatgattctcagcagagacgttctgcagtatgactcattcactaaaccccgtggtggtaattgattctatcagattcaaggcgggagctgtaagatctttggtatagcatgaaacaattaatgacagatgtgttcatcggctgttcatgaggccctattgtactcatatgtgtggtggagtcaggggaccactccaaaataagtggcctcccttggcttgacgtttgaacgaagtcttctgccctgacgaattggtctacttctcttttctcagtgtgtttgcctctgggaggctagacttgggatacgtgtacatgttggttaaagtgtgccaggcaagcaccacggtagacaagaaaaagaactggactattcgtacaggaccccaacccctagaaagccacctctcaatgacaggggccagaaaatcacacagtgacaattgaaaaaccttgttctgaaccccagggcagtataaataaaacataggtgaatattttcacacttacttaacaaataagtattgagaacaaaccaccagatggatactgtcagcctgctaaaatagacaaaatagagaggtgaattaaatgccattcttttaaaaaatagatgtatttctttttatgtaaatgagtgttttgcctgtaggcatgcctataccctatgtctatctggtgcctacagacatcaggcgagggacccagatcccctataactggagtcacagatggttatgagccaccatgaaggtgctggaaactcagctcagagcctctgcgagagcagcaaatgctcataactgctgagtcattggcccaggcccctcaaaaaccattcttgatcgggaacaccttatggtctgcccctcagggagagctcacaagctaactttagtgcataagacaaagatgaaaacaaccaacacacctgaggcctgaagccatccctgccttttgtctaagtttcatcgtaacacactcctggtattgtggatggagttatagatgttatctgtcacataaactctatgtttatcaatcagttcgtcaacacgctgaacgtgtctgaagccaggctcatgtcagcggcaggaagcagccttnnnnnnnnnnnnnnnnnnnncaacaccccaacttcagaatgtatcagagtcaacagtaaggtctgaagagccaggttgctgggtctcatgcccagacgatgactcagcaggtggaaggtttttaacagactctcacctcagtggatgttgctgatctggggcgccagcttcagggcccctgtccatttgccacccccccacccccacccccatgtccccattgccttttatctgactcttccaactaagtcctgtggttcttttataatctaaattcaccaacccagatttcctttcctgtaaagggaaggcatagttttggggtttgggtagaggtgatagccattgcttctctagctgactaaatgtgaaaacactggagtgcgtggagaagggggacgctttagtatgttcattcaggatgtgcagcaagctgaactagagaaggaagggaagcagcccagtagtcatggcaacagggaaggcgtcgatgattggacatgtcatctgcaagagcctgtctctacgcctctcaaacatggacctacagcaatgcttgtgaagccaggaaatagcattgctgagccttctttccagaggaggaaataagtgaggtgaatccaactgatggatgaggacacacacacacacacacacacacacacacacacacacacacatatggggcagggggagggaggaggagaaggaggaggagggaggaagacagagagagggagagagagagagaagagagagagaatatgtaatgtaaaggtttaaagtgtggggcttggggctggagagatgacccagcagttagaaatgcatgctctccttgcagcaggccagagtttccttccaagcacctcctccaaacagctgcgctacctgcacctcccactccagggactctgactcacactctggcctcagcagacatcagtgtgcacatgtgcacagcagcatgcacacaaatgaagtctttaaaaaaaaaaaatcaagttccccaaaattcagtcattggattttcatttaaggacttttcagtgtgttctttatcgaagaatactatctactgttttgcaatctttctgcaaacaccctctgtctggtgcacagctcagccttgtggaggaagtttagctgtttgcactagttaggggaagaacaaacaggcagaagggctagtctaggtcagcttgagcagaggggcgggggagagaggcgatccaggctggtcttagctggtgggtccaggtgtctttccacaatgccagagcaactgcctggcatatcagtgggatatttcttgggggtagggcaaatgtagagacgacaccagccctgagctcacccagcctctgcagaggaaagcagtctgcacgtggccctcgagcctgctctgcatgtggcccctgagcctgctccatggctgcttttgattttgatgcctctgctttcattctgactcctgctccacacgggactgatgaattctcaggaagggccagggtgataaaagagagcacaggcaacgtgcaagagcagactgtgccctctgataactgtcaagccatttgtcactgggagcccggtgccactgacgtgaatgggagggatacagagagggcctggatcctcctctgaggcaaaatcagagacaccttctttcatctttttttaaagatttattttatgtatgttagtacactgtagctgtacagatggttgtgagccttcatgttgttagcccaaagatatattattacacataggtacactgtagctgacttcagatgcaccagaagagggcgtcagatctcattatgggtggttgtgagccactatgtggttgctgggatttgaactcgggaccttcggaagatcagtcagtgctcttatcctctgagccatctcttcatgtgagccagccctctttcatcttttctaaacaaactttcatccttacagcagcctgttatctggtccatggtatctgatttgacagtcattcatgtgtatagaaacactgtgtaatgtcttagagggtagttatcattaacattcagagcttttgcacctaatactaatgaggtatttttctgtcactactggcccctcctttgccccaatttggtgtctatattttctatagtctttcaactcatcttttcaaagatggtcgcctatgtcaccatcttccccatctcctgtcttgtgctctttatttgttcataacacctctttaaaaaaaaaaagttttatttattttatgtatatgagtacaccagaagatcccattacaggtggtgtgagccaccacgtggttgctgggaattaaactcaggacctttggaagaacagtcagttctcttaaccactgacccatcccaccagccccaacacatcttacacatggaatgtgttggcctagtacttctgacccctgaatcttgagtatttgcctaatcagagcatgaacgtgtatctgctgtggcagccccatggccagcaccagtgcctggcacagaactgaatgaatactagttaaattacttgatgaattattttcttcatgtctagtaaagtcctgaatagagctgctgtagaaaagaccttttaagataaaaagcaggaagcaggctggaggtagagcttagtggtagagctttcgactcacacatccaagaccctgaatggtctttagcagtcccccctcccccaagaaaactagcaagaagccattgcagtagaggaaaaacaaagacttcagctttcttctagtcaaagtttctagtttctggttgactggttggttgggggaagttcacagaatgggaaatgtcagaatgcagagtcagaggttctctgagcctctgaatgatgttcccagggtctacttgcccgggctgaaccccctttctgcctggctccctcttctgtatggacatggaagcaattgcaaatgagctcccatctgctcctgccctgatcgcccaagtcagtcggaggcttcactggggtgcgaggagagtatggggagagggctgggaggctgtggttttgagtccactgatctgttatgtttgttccaaagctgctaagcagtaaggacgtcagcagagactctccctgtgcccgtgttctcggctttgttctcacacctttatgagagtctgcttgcaaagtttctagttatggcctaaggtccagctcaaccgtcaagcttcttgtgtgagctgttctgagcatcccacgttgtccacaccattctctgggtctcatcaccttgctcatttaagcgactatattgatctctcagctaactcatgctgtacatctctgcatccaagtcctatggcttgtataaagttggtcttctcggaatgctgtggagatgagtaagcacaagtataactaataatggaggtggtgataagaaggctcaaacaggaagagtgcttgtttcacaagccagggtttgatccctggagtctcacggtagaaagaactggccacaaaagttgtcctctgacctctacatatcacacacacacacacacacacacacacactttataaatagactttacaagcccgccagtcaccttggctaacatttgtatcttccctcaagcatcatattggactatatatgtacgtatgtatgtatatttctgttttcatgcagggactctgatggttttgaagcatccctatccaagggaagtggaagaaccttgcatttacgaatcagtccgggttcacacagcgatgcagacaggaaggacagagaacgacctcgtgcccactgcgccttctgtaagtgcccactgtgctcttcactgattgccattgaatgcagcaagaactaaagtccattggctcacacaaaagttctagtctggagccaacttagtggcacacactcataatcccagcacttgggagtctgagacttgagagtcactatgagctcaaccttgggctaaagagagagttctgtgtcagccggagctgtcttgtagcatcctgtcttgaaaagcaagcaagcaaaccaacaaacaacaaagcagtacattctcgaggggatacaaaacttggaatttggtttaatattgtgaggctataattaaattcagctggtccaaggaaaattaaaaacaaacaaacaaacagaaacccacaaacgctttggatgagtgtaggtcagaattacagtgcttgcctggtattgtgagatcatgcatgtcttatccccagtagaaggagagagagagagagagacagagacagagacagagacagagacagagacagagacagacagagagactgacagagagacagacagagagagagagagagacctagtgataggatttcaaaaacttagaaaatgtcactgatatttctctctttaaacaggttcatggtagagtaggtgagagatgaggatacctagctgcctaagcagtcattccttgacaagctgcttaaaacgtagagaaacaatttcctttgcatttcaactacccatgaaagaaaaacctctccagtccccccggaaaactcggggtaccgttttctatctttggttctccagtgaatggcacccacggggagaaagtattcttacttcttgccaatgtggccccactcccctttagtctgagcattatgggatgcggggatgagtcatcgctcatctcagaggtcatcgctatgtattctgtgagccacagtctgcgggttcctccgacatcccctccttttcccatcctcagggttcctccacttgctctctcctcctaacatgctgagcacttctagtaggggaaatcttagtttgggcagaagataaaaatagcaacatccaaatagaacaccaagaagccatttacacttaaaaaccagccacttccagttattaactaccaagcatattaaaccagatgggaccttcctatccccccaaagtgattttttttctattctgatgccaaaagaagactttcttaaatgtgccgtactgggtgtgatggtgcagtctggaaattccaacacctgggaggctcaagttgaggctaaccaggactatgtagcaagatgctgtgccaattaaaggggaagtgcgtggggttaggactcagtggttaaaacactacccatgcaatctgaagaccagagctgagatcctataacctacttaaaagccagcactcagtagcatacgtgtgtttattccctgcgagatgatgacaggcagacaggagagtctccaaaagctttaagtccagctcaacctggtatgtgttttaaacaaggtgaaaggtaaagaaactcaagtttatgctgtatatatgtatattccatagacatactgtaccatgtacgtgcacacatgtgggcacacacataggccatatatacagggatcattgcttcgtaagttcttgtggctttgtagcttgaatagtttaccattttactacaactcatcaaaaataaaaaatcctgaaaattggttttaaaagacttggaggttggagagctagttaaagagttaacaaaaggaagcattggattttagagctagagaaatctaggaaagtaaaatgattgatacatttccagagacagacgaggcccgagatcagatcaagacctacctctgctcagttcttcttttcttgccagccagttcccttcgtagcttcctctttccctgttcttagctgtcacaaaaccacctcgtgtatcaactgtttatcttcacagtctcctcctcttctgttttttaagataaaaaaaaattatacaatatattctgatcatacttttccctccccagcatctcccagaccttccccatctccatacccatccaattcatgccccttctttcttaaaaaacaaaaaccaagaaatgtaccataaaaacacaaaaaaatcaaaagcaaaatacataatcaaaagaccaataagacaaaaaaaatgcctcctaaaagaaaaaaagtctaccaagcaccagtgagtttgatttgtattggacaaccacttctgggtctaagatctaccctgaactgtggccaatatacccagtatgactccattaaagagaattaatttttcttttgccggcaggtatcggtggcagacagcttcttggttagtggtgggagccatgcccaccttccctcttagcctctgttaggctcctagagacttgccatcagtgagcctacgatctgctctcttttgcctgtgtttatctttggtcagtaggaagagtcagccaatacttgatctgtagctttggtctcagctaggactaagactctttagaccaaattatggaagtcataactactttttgtttgcttcctccatgtgtcacaaagttcaactgactaagtatgtggacactgtaacacaggagagaacttaaaaactgtggttagggcttggtcaacagggaaagcacataatataacaagaagaagcctaagaactttattgtgtaatgacaccaaccaaaacagttgaggctttttaatagatccaggactgtatctcagtatactttgctcacggaatcctgaactgacctagttgagagaacagagccctcgtcagattgtcattcttgtccctgctcacccattgtgggcacctctctctctcccagctttgagctctgaggtatccacatttctgttttctcttttgagaaatgagttccagtctgtggaggaagaacattacgtcatacttctagaagaagaacttgcttgaagtaaaaaactgaaagtagtcgatttcccccaaatgcaggtgcttatataaagttacttcacatcctttgtcaactttaaggaaattattgttcatatattgtaaatgcgaaagcactaggctcctgaggtaagattaaatttaattaattcatttgttaaatgaacattttaaagtgaccaccagctttaagtgttgcagtaaactaggcaaagacctatgagcttccattatagaggaggtcacgatacaattggcatactataacaccaaacaggttacacggagggacagggcaacttccctgggtaagaaacattggagcagaaatgtcatttagaggaaggagaaaatgggttatgtgcatgtatgaaattgtcaacaaattttttttcctaaagaaaagaacagttcacgttaaggagtaagaaggcagagtagagagaaaaaaataacacacaagatccctgaggcagacattccacagaagggcttcaaggaccaacaaggtcagcatcgctaggagtgggccagagggaaggtgaggctctagagcacaagagggctaacctgtgctgcttcccagcagagggatggctgagatgagctaagtgtcctgcagggagcatggctcccatgccagctctccttccctcgctgcacagactgagtctttgttctggatgctgaaaaagtctgagagttttagtcacttaagttaagtcttcacagtttgaaagagaccccctgattactgagtgttcagtggacttgctgctgagttagaggccaggcgatctcttaggacgtaagtggtcaccatcaagatgctacaaagatacagacaacatgataatagacggtgcagttatactcctggagacaatgtattccaagttcctgacccagcctggcttagtgagaatatatgattcctcagcttccttttaacaaccctttccttcaaaagaggatgttcctttgctttgtgacatctttctctgttatatgatctacgatgtgtgatggttcttcttgggtgcctcctttatacgtttccagcatgtttatcgatgtgtccatgtgtatccctctctctctctctgcctctgtctctctgtctctgtctgtctgtctctctctgtcttcctgtctctgtctctctctggctcgctgtctctgtctctgtctctctcttgtgtgtgtgtgtgtgtgtgtgtgtgtgtgtgtatttaggctctttattacagagttatatatatttaactataccctgtgaacatctttggtagcttgcatggtttcctaaaacacaattaagtaaattccttaatattctactactgagtatattggtttacttaaaacagtcattctggttggctgggttttttttaaaatcacattttaagatttgaaataattttgaattgacaggataattgcaagaataatctaaaaagctttgttttccaatagccatttatgagttaattgcttattggatgcctgatcattttaaacacagcagtgtgtattcctacggacagagacacttgcttccatgaccacacaccacaatccgagttaggaagttgctatgccaccattgtaaccacagagcttggtgagctttgcttcatccatacaaagatcctgtccttggtcttacgtgtcctgtctcttgactgtcctgcctgtcccaactcctgttttgccttgagttccctcctctttcatttttgaaaattaaaactcagtccattcgtaaactcttccccatgctggcttgtctctcgcggagttgtgattaggttggagtgtgtggtttggtaggaacgccacaaggggctctctctcgtggccctccctcactgcctcctcagacactccaggtttgctgtttccccctaaggaaggtttgagcaactgagaggcttcgacagctttcttccatttagaatcattttattctttttgttgttgttgttgttaataataaagatttcaggaatctttattaatctaccagagaatttcaaatatgcattccttcctaatgagtatgcattctgctccttactaaaactttgcccatcagttggcgtttattggctgtcttaaccattgttccggttattgcgagtggtgagtctcggacgttcttgctgggctgattttagggagagcttttgatttcccgtgctatccagtgttttgtgttgataggttaagatcctatcacaatttattttgatctttcagaattgtctgtgatttggtgagtaagaggcctttcagggtgtctctgtgtctatgtctgtgtctatggcctcctgatgctttgataacttgactttctgacatagcaaggtgtcccagacatggcccatgctttccttgtgtcatatctaaagtcaactatttttcaagagaaatgtcttcttctttgtctataaaatagtacttcacaacttgatatctgaaccacatagatacctgttttgattgaaatgtcactctcctacctactcagggataaggaaaagacacacgtgtctgcatgtgtacctatgaatttatatctgcgtctatcagtccatctgttcgtctgtcgattctcccctccatagttacacagcaacaactgaaatccttatcagtaccagaaggctcattctaggttttcatggttgcgacaccttctcccacagggaggaatatgggtcccattatctggaatgtggtgatcaatgtccatctgctgctcagttgcccatccccccacaggacttcctgctcattcaataatcagttccaggccactgccgccccactctctgcagataactactttacactagttgccactcccacctatatgggaagaagccctcaccccacctcatcccaccccacctcatcccaccccaccccaccccaccccaccccaccccacccctggctttaccatccacaccaagctgctgctcctacagctaagggcaccagccacatagattctccttgttctctgtttgggctccaccactctgtgccaaggtgcacgaatgtccgaacactcatttcacttgagaactttggatgtttacagaaaacggtgaggggagtggcatggctaatcctttattgttaaacatttaggttgttcctaacctagagctattccaaacaccattcctgctacaatcatgtgtttaaggacaaacctgccacacaattatgtcagttcttatatccagagagtctgtatattctcagatcatacatctttaggatttcacttatcaaaccacagaaaatacgagacttttagtctattagttaaaggaatagtccatagcattatctcttagcttgagtttaatggcccctttacaaaaacatttaaccttaactattttatctctatagacactcacctgtaacaaactaaaatgataattgtgttttgtttttgtttttctgagacagggtttctctgtgtagccctggctgtcctggaactcactctgtagaccaggctgacctcaaactcagaaatctgcctgcctctgcctcccaagtgccgggattaaaggcatgcaccaccattgtctggctggctttttttttttttttaaagatttatttatttatgtatgtgagtacactgtcactgtcatcagacacacaagaagagggcattggatcccattacagatggttgggagccaccatgtgatttctgggaattgaactcaggacctctgaaagagcagtcagtgctcttaaccactgagccatctctccagccccaaaataatttttaaaatgtttcttaatacttaactcagtttaatttctcattttactttttttttccaattttaaatatatgttgtgtgtgttttgtcttaatgtatgcctatgtaccatattcatgcccggtgccctgagaagccaaagaggacattgactctctggaactggagttagaggggttgtgaattaccatctaagcactgggagtcgaacccaggttatctggaggagcaacaagtgcttttaaccacggagccatgcctctagcccctcaatttaacttctttaacatcacggtgattatgtgacgtcagactcagcagtgttgctgagcattgttgaaatgcgcacgcaggaagttcaccttcactgttccgacatccgaattccacaaggggttctgagctatttctcatctctattcttggaatttccgtggttcctctttctatttggtcggaagaattcacctcaagagagaatagtctagaaactgttaaaaagaaccctgacgtcaacgtggtcatttcccaggtctcacttgttttcttctctttaaggaaatggtatatcaggaggtcacattagaataacatcatgtcccaggagttcagtttgtgctgattatgggattgtgaaatttttttatcttagggcccctggcctatgtagagtccgagccattcccataattccttgctgctacctctgaactaatgaaacaatcaaagcaatgaatccaattaaaaacaatggttcgtctgtatttcagatcccattttgagtagatgaagcatttacacttctgagtctctttcctatgggacacgagtcttgtgagacgagtttgcagtagagagaaccctgtagaagaaaaactatggaataaaacaaatatggccatttctgcctcttagttccctttttaaactttaaaagccagagccctaaaataaagaaatccttttacttttctgaatagactgtcccaaatgtagcaatccctcagtatcagtcagtatttccaagagcctgcatggatgccaatgaccttagatgtccaagacccttatctaaaatagtgcagtgtgcacataaactatccacaccccccatgcacttacattagattacttatcacacccaaggcaatacaaatgcctggaaatggccagtagaatgttttgtttatggtatggtaagaataagaatctatacatattcattacagactctgggtttttttttctttttttctttaaaaaaaaatgtttatttatttaatgtatgtgagtatactgttgctgtcttcaaacacaccagaagaggacatccaatcccattacagatggttgtgagccaccatgtggttggtgggaattgaactcaggacctctggaaaagcagtcagcgctctttaaccactgagccatctctccagccccagactcaatgtttttatccaatatctaagttcatgggtagtgagtacaagggtatggaggctgaaggccaatccgagtgtcagctgcccgttccatatgagtgcttacttctactctaggattccgacaacagtccgagctactggctttcactgcacactaacaaacatcacctgttgttaattgttttcaagttgccagcttgaggtaatcaagagcctttccatcagtgcctgtggatatggactatgtcggatgatccagtctgcaaagtgtctcccgtggcaccggggagagttgcaagacctggagagggtcagttaaagatcagtggcagacatgttcttcatagagcaggacagggcaagcctgcagcttaatgtaaagtgcttgcctggagtaacgtccccccacaccccagtactgggagataagaagggatagaagcacaaggccaaacatgtgacaattctgggcttcattccagaccttttcttttacagctgggcaccaaagaaggctatctcaccaagcagggaggcctggtaaaggtaagggagtggggttcgtaatgttgtcagatttttttttaaaggaaaattataaacttattttgagccacttatattacctgagaaatgacttggctgttctctgacgaagcccgatgtgagtgatctgcagttcatactaaaaaggaagcactgtgcagtgtgttccgtggaggggccaattttcttccttcttcttcttcttcttcttcttcttcttcttcttcttcttcttcttcttcttctccttcttcttctccttcttcttctccttcttcttctccttcttcttctccttcttcttctccttcttcttctccttcttcttctccttcttcttctccttcttctccttcttcttctccttcttcttcttcgatttatttactcatcttatgtatatgagtacactgtagctatctttagacagaccagaagagggcattggaccgcattacagatggttgtgagccaccacgtggttgctgggacttgaactcaggacctactggaagagcagccagtgctcttaaccactgagccacctctccagccctctgtttactgaaaggtaggccaaacacataactggtgcttaagaaaaatgacattataaaataccaaagtaaacacagtctacaaatccagggcccctgcctgctccctgcctgcaattgtgcctttaaagctctctttaattttcacatgtcatagccatggtcatgcagtgttttagctcctgtcagagtcagagtcctgccctctctcctgtaaaccaggctgcttgagtctaatctagtcgtgcagctatctctgtccttactagactggatgctcactgaagatgggagacattcattttttgtagcctgtttattgattcatttcctatccagagagggtctccttcacagcccaggctgacctcaagcatacagtcttacttctcaacatccagtgtgaggattaaaggcataaacaactatgcccgttgaatgtttattctgcaatcttctattgtctcttttaactggatgctctgccagctgagacagatcagggcattattaagacataggaaggaaacagcagcaacagtttctgctgttgagtccagagaagagtcagagtgtcatgtgattaaaggattctaaacttcaactgtatccgctttaaagtaataataataaataataatagatgacattactttatatgcaatgggtaaatatgcattatatataaatgaagtttcaagagtatacaccaaatatacataaatttctggggtggtgacatagctcacagaagggtctcaaagttgatagcaatttttattatagcattaataaaacagaaacttaaatggcttgttataaatcaccttgaatatttaaaacacctggttctattcatttaaataaactcgtggtatttctattgtgatcttggaacatagattcatcttatttttttataagtattttgaaactttcctcaaaaaaaaaaaaatacccccaaatattttaggcttatttcatctaatcctttatatacttttaaaatgaaaataaaccatcaagtttagatattacattcttgtattcaaacaaattttctccccttagacctggaaaacaagatggtttactttgcaaaggaacgaactgaaatatttcaaagaccagatggtgagaaagacatgcgtaccctcccctcccccactctcccctcttctctcaccctcaccccatccccactccccccgctgcttaggtgttggttccgtgaggttctagacatcctctgaaacaagagtctagagacccaattatgagggggcggggcacactggccacagagtttgttcggagatcagagacaacctatggagttgcatctctcctttcaataagcagttcatgggaatcaaactcggattatcaggcttgatttgaccacaaacatctttacccactgagccatgttgccagcccaggatcggggctcttgatcctgatctattctgactctgctaaaatgagggctccctccagaggctgctgattggtcagtgcagctgtcgctctccgcagtatttggctccctctgcttgggacaaaggaattcttcctttgccttcttgcctaggaggcaatttccccttgccttaaatgcatatccagggctggagagatggctcactggttaagagcactgactgctcttccagagttcaattcccagaaaccacatggtggctcccaaccatctataatgggatctcatgccctcttctggtgtgtctgaagacagctacagtgtactcatataaaaataaatttaaaacatctttaaaaaaaatctccgttctcattaaaataaataaataaataaataaataaacaaaagtatgtccagtgcccaggttcgttttatcatgccaacttaaaatgatttactttttctttatacaagagttcagcaatagtagaagtttctaaaagatgggagaaaatatgactgactccttccttaaaaatctacatcgatctgatgtaaattgacaaaaggggcatccatcttttttttttttttacaaaaaataaaattattttatttttaaataatgtgcatgaacatgtgcctgtgtggtagtatgtacccatgagtattggtaccaggtcagaggcattgaaccggttggtgctaaagttacaggcagttttaaattgcctggtatgggtgccgggaatcgaacactgatcctctgggagagcagatcaccctcttaaccactgagccatctgtatggcccagcaatgtcttcccagtgcttaatccatgaaaagctagatcccaaaccccagcgtgtgtctcccctgtgtcaggctttgccatcatctgttatcttaatgaaactgaccgttgctcgcagcagaaaccttgctaagggatggacacgcgcatttgtttatttatgtgacatcatttcgttttgtttttcagtcaccagaaccaattcggatcctagacctaacagagtgctcagctgttcaatttgattactcacaggaacgagtaaactgtttctggtacgatatattcataaaggaaatgtttctaaaagtcttttaagccaaggaatcaaaagctatctatcttcacgtgtacacatctggatggagggacagggacctaacctcacacgacggtgtggcatgctaggagtgcctccagttacacaggccacaatacctcctctaaagtggcttcaacaaagaggcaggctgtctaggttcaggctgtgcactgcgcaacaaggacacactcactcactcactcactcactcactcattcattcattcattcacatcataagcaactttactgctttgagattttcctctcaattttaattatcatttcactgactctggtgatagatggatctgtcttgtttgggccccatgtgaccctagcagcagaggaaatgttttgctgtgctacgatcagtatatcgggatatccctatatatatttctgggatggtgtcctgacaaaaacaggtgtgtcttcatttccaccaccttttgtttgaaagtttgtcaaccgtatgcagactgaaagatgtaagctattctccctctaactcagctcactcagaccttgccagattttaggactgctttcagccatcacttcttttcctaagccccaaagccggctagaagaaagctgcaaggatacagtatcttgattgtggaagtcctaagaataaagatattagctatagaactgtagtttcattgttacacagagaaagtgagcaactttcggcagcaatgaacaacagacagcttgttaatgcctgtctatgatctaacccaggtttgattttctttaagtaacaacttgagaagcaggtggactgagacaaggtgccagcaagggcgtggtgtctacccttctcttgactcttcccagctggccccttcagatccaagtggctgcttttgccccgagtgttttcacagtccagtcctttgtagcaggaaagtcagtgttgccctggaaacgttgccctgtgaggcttctgcttgacccactagccgcaacgtaaacaaccatcccctaatcataactggcttaaactaattacatttagtgtcagggcttctgtttccaagaagaaaaggaagatttgtataaatttatagagcaactcacgcctgcaagctgggagtatcagtgacaactaggaaccagtttacactcagcaccctgcacaacgtgtaggatatcaagatccctctctccccacccccatctcctcagccataggcaagagagctacaagatgtgctgctctggcattaaggtgatagaaacacttctaaatttcagctccaggaaggaggattagagtttgaggtcaccctctgctatgtagcaagttcaaagccagcctaggatacatgggtgttgcaggggtgggggaagggttgggggtggggacagacaggagaaaaaaaaatagtgtttgtgttttgattgtaaggaccttataactcaaatgattttgactagtcacagacagcaaaatgaaaaattatcatctaccttcccaagcttttgtgattaaaaaaaaaaatcttttttaatggcagagactaacccgtggtaaggaatgggtctaacccctttttctattctgttttgaaaccgactacatcttcaggaggaagtggtaccctccttaaaccagccagtaaaaatgagctcttcagcatgccctcttctctgcctggcttgtcctttgacacacacagaggctctggacccactgcagagctcagctgagtaaacttaagttccacagaagacaagcaccacaaaagactgagggtgtgacccggacatacgcttcttctttgaagtctcctgggagaatataaatctcatctacaatgacacaaacttaaaacctcctaggcatttctgcagttgctgacagaatggctctgcatacaccaattcttcaaagctaccatgctaattaggggagccctcagcagtccttctccctgggaggcactcacactgttccatcaggatatataccaaccatctcacattgtttcttttgtttcatcagcctagtgtttccattcaggacattttatctctgtgcaaagacgggagttgaagccgatgaatggatcaaaatactgagatggaagttggtgagttataaaagtccccagatgtccagtcttcttggtaactaacatgtggactccaagcacacaccagttgtcagagcgggcttgagaaccaaagggaaggctcttggccgttttgtggagtaatccacattcttaatggatatcaaagggagggaggggtcgtaagaaggaagggatttattcttacgcctcagcctatctatcctcagccacggctttcggtggtcttctggtaaggtgtactggttattatcatttcctttggaagagaatacttggattggaaggtctcagaataggacgctgacatatgcttcaacttggagagccttttaaattgtctcggagggagattagggagtaactcagtttctggtgtaaccactttgtatggatattactaaatttccaaattaccaaaggtgtattttctttctgctcttactttttccccaggcacattatagagagtggatagctgagtgaaagctttctagtgtttcctgtaagtttactatattagtctggtggttgttcctctcatgaagtaatgaggcagctgcttatgaggtaaaggaggctcccagttcttgaggtccaagggcatagcactcccatgagcctctgaagtagaccttttggtgggacataaagacagggacttgttgaggatggaaaccatcacacttccaaacatgaagccagagatatactgggggtgtggtcaagttcaaacgtctagaactctcttcagaacagttcacacttccaagggcagtgcacggtgacctcaggacttcctagtaagtctcatcttttaaaggccccatcacatcaatgccacaccaccctagggaccaagcctttacacgtaggtcaccaaaacatactgtcttgaaaaccgtggtgttttcaaaggcaagacatctttttcctaatgtctctgtgtgtgtgtgtgtgtgtgtgtgtgtgtgtgtgtgtgtgtgtgtctgtgtgtctgtgtgttcatagaatctataggcatgtctgagaatgggtatccttaagaccaagcttgtagctcagaggtaggaacacttctctctggggaaaaaaaaaaagaggctggttcttttgtttgtcttgttttgtcctttttgtttgaaatccaagttaatacaaagatcattttgagactgctctcatgctgaatatcagtggggaaatgctttgtcatggcaaaatgtctgggctgaaatgactcctataaaagtaactttaattcgtctagtgtaattgtcatcttgcaggcttactgcttctgtctgctaacctagacatctgggagtcttatctgggtctagaatgttttcagccctctgacactgctgagtaaactcatcccttcctagttctttctgatctctggctggctgattcaactcagctgttctgactcaaacttcttcccacgatgactgattcaatctggcttctctcagcttcttctgaatttccctgcttgggctcaaaggaactctagcagtctgttctaatcttctgcctccttccgtcttcacctgtgtctatcttgttcttcctctgcagcctgcctctgtaaaactctcctagtaaagctacctccgttttctccctctcccctcccctcttcttccctctctctgtactgctctcttaagtagcttccctttcctctctcatgagagttgggcagattctattctatcaaatctttctctgattcatcactttgtctgccactcaattagatatcactttcaaatatggctgctttcttctacaaacttgggcatgtctatattcctgtcagagggttaaaggtgtgtgctaagggctgaggcacagcacaactagaaacaagtttttacagtaaataacacaatctcagggttcacagtgtgatcagatatcctgcaacaggctccatttctaattccatatattttgtcattatccaaatgacacgtgattattatgcaaagtttaaatgaaaagcagttcaatgtatactttcagacttttccctgggcaaactgatctttaagaacaaaatacagctcttctctggtggttttcacctgccccttcaacctagcagtgcattatcaacatctttctaagtccccagctgaagccagggtcctccttttggctgggtggtagtgtgtcatgcattctcagaagtattggatagatccccaagttgtacctgttgtaataggcactatacagtgtcttgaaggaaaattaaaaaacaaacaataaaacttggtagagccgtggcaatgtaaaactgtataaatgtcttttactgctcagtatgtctttccttaccatttccgagtcaatatcataaagtgattcaatgacagacataactatgttttattacagtcaaaaataagaaaacagctggatcaaggagaagataccgtccgatctaggtcatttatcttcaaatagacttgtgtgctcaggggcacggttgactgttccaggtgtctgatctgtggcagacttcagaggaaaactcattgaagtatttcctctaaaaacaaatcaaaagtagatcgtggttgggagctgtctgctgatccatggaaaacagctggcaggacctggccatctgctcgagaacagaagcagcgccctgctgatggcaactgcctagcgtccaggtggagccactctcagacacagcgccagacaagagctcattggctgtcccagtggctcaggctcattgactttagtttcctggagttcagccccaagtcatggtcagcacaactaaacttcaggacttgctacaagcacaaggaaacagcagtgcatcagggagctcgggctgggctttaggaagcagattaataaacaccaaggacattcaaaggatgggttgcttttgttttgcttataaacgagaacctcaaatagggctgaagaggtggctcagccattaaaagtgcatctgctctcacagagaacctggattcagtttccaggacccagatcgtggggctcattaatgcctgcctgtaactccaggtgcgcacacacacacacacacacacacacacacacacacacctaccttttaaaaggtttggtaagtcatcttagcattttccatgtcaagcttgaccgcttgagtatggttcccaaaactcacacaaaggtagaaggagagaagcaactccacaaagttgttctctgacacgtatgtcccagcacgtatggtctcacatcacatgcacacaaataataatacaaatccagtggatccttcacgtctaatgataaactgagaactacatgccttgtgggtgactaggtagggaaaagtatatgatgtatgataaagggtaggaatatcttaaatagtaagaaaatgtacattgagaagggtggtagtgaatgacttttagtttaatggttatcattacaaatatacttataagcactaattaaaactctttaactgtcatttcttcaaattcatgtggacttctccacaaaggatgttctctgtctctttttccaaggatcagctgtatgagactggtcctatgaggtacccaaacatcattaaagggcaacttctgtttccaaggaagggagtagatcaaatcttcgtgaaatccctgatacacagccaaactagcagagcaggactgaggtgcaatgacatactggggttcagaggtcatgaacagacttaacttccaatcattattgatctagcttttttagagaagggacaccaatgagtgccgagccagcaagtggtgcagagctgaaggaactctgttcttgcaggagaaaggggcaatggttttcacttttctcagtgtgaccaagatgcttgttccaacattgtaccgaacgattcgctttactctgtggttctaagacatttctgcccatcgcgctgggtagggtgtggtacagctgctcacgtcagagcctcaggaagcaaagcaaggcagcgacaggaaagggagaggacaagacagagaccccaggaatatatctcacgtggcatgtttccacgttctgccacctcccaagagtctgctcagattccgattcaggaatggattaacccatccattatgtcagctcgagcagctcggcatctctggactgccttcagggacacatccggagggtactttactcctcttggtatttctcaagatggtgtcaaaattaattcctagaaccttggtttaatatcgttccctgttgtttaaacacctaagactcagaaattaaatttttgttggcttcagagttttgggagctaaggtgtgggtctgtggcaaaacatctggcctgggggctaaggggatttacttgttctgtttgtattttatggaataaagcaacgtcctgataaaatgcattgtgtcaagtttgcaaaataaggagtaacacgtggctcctcctaaaatgtatggcttttatgttcttagaaacaataatctttctctcctactaaacagtctacttaccttctgtaaaaggagtttatttgtatcctttggttctgttcattaaatgaaaagtgcatgtttttgtggtac

SEQ ID NO: 1460 - DNA, 3074 bp, Mus musculus
ctcctgccttagcgaggaggagcagcgcgtccagcagcagccgatcccatctctctcttcatacagcacctggcggggagtcagccatcagaagcaaaggaacttatgggcagagcagaacttctaggagggaacatgagtacccaggatccctcagagctgtggggcagagcagatggaggcacagacctgctccaggatttggggtggtatcacggcaacctcacccgccatgctgccgaagcccttctgctctccaatggacgtgatggtagctacctgctgcgggacagcaatgagcagactgggctctactctctctctgtgagagccaaagactctgtcaaacactttcatgttgaatatactgggtactcgtttaaattcggctttaatgagtattcatctctaaaggattttgtcaagcattttgcaaatcagcctttgattggaagcgagacagggactctgatggttttgaagcatccctatccaagggaagtggaagaaccttgcatttacgaatcagtccgggttcacacagcgatgcagacaggaaggacagagaacgacctcgtgcccactgcgccttctctgggcaccaaagaaggctatctcaccaagcagggaggcctggtaaagacctggaaaacaagatggtttactttgcaaaggaacgaactgaaatatttcaaagaccagatgtcaccagaaccaattcggatcctagacctaacagagtgctcagctgttcaatttgattactcacaggaacgagtaaactgtttctgcctagtgtttccattcaggacattttatctctgtgcaaagacgggagttgaagccgatgaatggatcaaaatactgagatggaagttgtcaaaaataagaaaacagctggatcaaggagaagataccgtccgatctaggtcatttatcttcaaatagacttgtgtgctcaggggcacggttgactgttccaggtgtctgatctgtggcagacttcagaggaaaactcattgaagtatttcctctaaaaacaaatcaaaagtagatcgtggttgggagctgtctgctgatccatggaaaacagctggcaggacctggccatctgctcgagaacagaagcagcgccctgctgatggcaactgcctagcgtccaggtggagccactctcagacacagcgccagacaagagctcattggctgtcccagtggctcaggctcattgactttagtttcctggagttcagccccaagtcatggtcagcacaactaaacttcaggacttgctacaagcacaaggaaacagcagtgcatcagggagctcgggctgggctttaggaagcagattaataaacaccaaggacattcaaaggatgggttgcttttgttttgcttataaacgagaacctcaaatagggctgaagaggtggctcagccattaaaagtgcatctgctctcacagagaacctggattcagtttccaggacccagatcgtggggctcattaatgcctgcctgtaactccaggtgcgcacacacacacacacacacacacacacacacacacacctaccttttaaaaggtttggtaagtcatcttagcattttccatgtcaagcttgaccgcttgagtatggttcccaaaactcacacaaaggtagaaggagagaagcaactccacaaagttgttctctgacacgtatgtcccagcacgtatggtctcacatcacatgcacacaaataataatacaaatccagtggatccttcacgtctaatgataaactgagaactacatgccttgtgggtgactaggtagggaaaagtatatgatgtatgataaagggtaggaatatcttaaatagtaagaaaatgtacattgagaagggtggtagtgaatgacttttagtttaatggttatcattacaaatatacttataagcactaattaaaactctttaactgtcatttcttcaaattcatgtggacttctccacaaaggatgttctctgtctctttttccaaggatcagctgtatgagactggtcctatgaggtacccaaacatcattaaagggcaacttctgtttccaaggaagggagtagatcaaatcttcgtgaaatccctgatacacagccaaactagcagagcaggactgaggtgcaatgacatactggggttcagaggtcatgaacagacttaacttccaatcattattgatctagcttttttagagaagggacaccaatgagtgccgagccagcaagtggtgcagagctgaaggaactctgttcttgcaggagaaaggggcaatggttttcacttttctcagtgtgaccaagatgcttgttccaacattgtaccgaacgattcgctttactctgtggttctaagacatttctgcccatcgcgctgggtagggtgtggtacagctgctcacgtcagagcctcaggaagcaaagcaaggcagcgacaggaaagggagaggacaagacagagaccccaggaatatatctcacgtggcatgtttccacgttctgccacctcccaagagtctgctcagattccgattcaggaatggattaacccatccattatgtcagctcgagcagctcggcatctctggactgccttcagggacacatccggagggtactttactcctcttggtatttctcaagatggtgtcaaaattaattcctagaaccttggtttaatatcgttccctgttgtttaaacacctaagactcagaaattaaatttttgttggcttcagagttttgggagctaaggtgtgggtctgtggcaaaacatctggcctgggggctaaggggatttacttgttctgtttgtattttatggaataaagcaacgtcctgataaaatgcattgtgtcaagtttgcaaaataaggagtaacacgtggctcctcctaaaatgtatggcttttatgttcttagaaacaataatctttctctcctactaaacagtctacttaccttctgtaaaaggagtttatttgtatcctttggttctgttcattaaatgaaaagtgcatgtttttgtggtac

SEQ ID NO: 1461 - protein, 278 aa, Mus musculus
MGRAELLGGNMSTQDPSELWGRADGGTDLLQDLGWYHGNLTRHAAEALLLSNGRDGSYLLRDSNEQTGSLSVRAKDSVKHFHVEYTGYSFKFGFNEYSSLKDFVKHFANQPLIGSETGTLMVLKHPYPREVEEPCIYESVRVHTAMQTGRTENDLVPTAPSLGTKEGYLTKQGGLVKTWKTRWFTLQRNELKYFKDQMSPEPIRILDLTECSAVQFDYSQERVNCFCLVFPFRTFYLCAKTGVEADEWIKILRWKLSKIRKQLDQGEDTVRSRSFIFK
